United States Patent Application Publication US 2011/0183924 A1 - sequence listing, part 128

SEQ ID NO: 355838 - DNA, 1295 bp, Homo sapiens
  misc_feature (49)..(49): n is a, c, g, or t
cctcgcatctcatccattgtatcctccatattctacttctccacccccntcctcgtcgcgcttctaggtctagaacgaatgatcacacactttgaaaggtccaaaatggagtaaggaatgggaagatttgcagttaaagatggctaccatcagggaagagatcagcatctgtgtcagtcttctgtacggctccatgggattaaaggaagcaatgacatcctgatctgttccttgatctttgggcattggagttggcgagaggtgtcagaacaaagagaacatcttactgaaaacaagttcataagatgagaaaaatctacgagcttcttatttacaacactgctgccccctttcctcccagactctgacatggatgttcatgcaacttaagtgtgttgttcctgaactttctgtaatgtttcattttttaaatctgacaaactaaaaagtttaacgtcttctaaaagattgtcatcaacaccataatatgtaatctccaggagcaactgcctgtaatttttatttatttagggagttacataggtgatgggggaaattgttaactacctttcattttcctgggaagtcaaggttacatcttgcagaggttgttttgagaaaaaagggcccttctgagttaaggagccatagttctatcaatgatcaaaagaaaaaaaaaaaaaagagaaactgttacagtatgattcagatcatttaaaaaagcaaaatcaagtgcaattttgtttacaaatggtgtatattaaagatttttctatttcagatgtactttaaagagaaatattagcttaactcttttgacatctgctattgtgacacatcccattgctggcaatgtggtgcacactccgaaacttttaactactgttttgtaagcctccaagggtggcattgcagggtccttaggcaatgttttgtttgcctttatgcagagaggtgctccaagtgctgtgattgagcaccgtgctagaggaactgtaatgcttcagaagttgtagcttatacaaaggaaacaggtcctgctggcttaatttaaacagttattgcatgaagtagcgtggaggccctggactgctgctcgttctttaggatggactgttctggtatctggtattggtttagagactgttaataagggacatcacaaggtgatgggattcatttgaagcactctatttctgttttaatggttttatccaattttgccttcccaagatttttgttctacataaaaagttcatgccactttttaatataaaaaaatttaacaaaattaa

SEQ ID NO: 355839 - DNA, 914 bp, Homo sapiens
atctgtgcttcaaaccattccctacagaaaccattccctcaggtaacctcttacaaagttggaacattttcacagtccatctctcctccctagggaaaagctaggatttggggatgttggggattctacctgcttactctgcactgagctgggggagcggctgtagtgagctcatgcttgctagtccaaacttccactttgatttcagcaacttccaacctgggccctttgtttttagctctcggactcaggcaagacagaaaacagtctctcgtgcaggttccagaaaaaaaaaaaaaaaaagagaaactgttacagtatgattcagatcatttaaaaaagcaaaatcaagtgcaattttgtttacaaatggtgtatattaaagatttttctatttcagatgtactttaaagagaaatattagcttaactcttttgacatctgctattgtgacacatcccattgctggcaatgtggtgcacactccgaaacttttaactactgttttgtaagcctccaagggtggcattgcagggtccttaggcaatgttttgtttgcctttatgcagagaggtgctccaagtgctgtgattgagcaccgtgctagaggaactgtaatgcttcagaagttgtagcttatacaaaggaaacaggtcctgctggcttaatttaaacagttattgcatgaagtagcgtggaggccctggactgctgctcgttctttaggatggactgttctggtatctggtattggtttagagactgttaataagggacatcacaaggtgatgggattcatttgaagcactctatttctgttttaatggttttatccaattttgccttcccaagatttttgttctacataaaaagttcatgccactttttaatataaaaaaatttaacaaaattaa

SEQ ID NO: 355840 - DNA, 2052 bp, Homo sapiens
  misc_feature (1928)..(1928): n is a, c, g, or t
  misc_feature (1949)..(1949): n is a, c, g, or t
  misc_feature (1957)..(1957): n is a, c, g, or t
  misc_feature (1964)..(1964): n is a, c, g, or t
agacgactgtctgagagaggggccgctacgccgcacagcaaacaagctccgcgacgtttccaggacccggataatcccgcccttagagcagagccggaagaaggcgggacgaaccggaagagggtgaaatgctttcggtaggcactccacggctgtgaagatggcggcggctgcgtggcttcaggtgttgcctgtcattcttctgcttctgggagctcacccgtcaccactgtcgtttttcagtgcgggaccggcaaccgtagctgctgccgaccggtccaaatggcacattccgataccgtcggggaaaaattattttagttttggaaagatcctcttcagaaataccactatcttcctgaagtttgatggagaaccttgtgacctgtctttgaatataacctggtatctgaaaagcgctgattgttacaatgaaatctataacttcaaggcagaagaagtagagttgtatttggaaaaacttaaggaaaaaagaggcttgtctgggaaatatcaaacatcatcaaaattgttccagaactgcagtgaactctttaaaacacagaccttttctggagattttatgcatcgactgcctcttttaggagaaaaacaggaggctaaggagaatggaacaaaccttacctttattggagacaaaaccgcaatgcatgaaccattgcaaacttggcaagatgcaccatacatttttattgtacatattggcatttcatcctcaaaggaatcatcaaaagaaaattcactgagtaatctttttaccatgactgttgaagtgaagggtccctatgaatacctcacacttgaagactatcccttgatgatttttttcatggtgatgtgtattgtatatgtcctgtttggtgttctgtggctggcatggtctgcctgctactggagagatctcctgagaattcagttttggattggtgctgtcatcttcctgggaatgcttgagaaagctgtcttctatgcggaatttcagaatatccgatacaaaggagaatctgtccagggtgctttgatccttgcagagctgctttcagcagtgaaacgctcactggctcgaaccctggtcatcatagtcagtctgggatatggcatcgtcaagccacgccttggagtcactcttcataaggttgtagtagcaggagccctctatcttttgttctctggcatggaaggggtcctcagagttactggggcccagactgatcttgcttccttggcctttatccccttggctttcctagacactgccttgtgctggtggatatttattagcctgactcaaacaatgaagctattaaaacttcggaggaacattgtaaaactctctttgtatcggcatttcaccaacacgcttattttggcagtggcagcatccattgtgtttatcatctggacaaccatgaagttcagaatagtgacatgtcagtcggactggcgggagctgtgggtagacgatgccatctggcgcttgctgttctccatgatcctctttgtcatcatggttctctggcgaccatctgcaaacaaccagaggtttgccttttcaccattgtctgaggaagaggaggaggatgaacaaaaggagcctatgctgaaagaaagctttgaaggaatgaaaatgagaagtaccaaacaagaacccaatggaaatagtaaagttaacaaagcacaggaagatgatttgaagtgggtagaagagaatgttccttcttctgtgacagatgtagcacttccagcccttctggattcagatgaggaacgaatgatcacacactttgaaaggtccaaaatggagtaaggaatgggaagatttgcagttaaagatggctaccatcagggaagagatcagcatctgtgtcaggatggataagttctgaagatctattgaatagcatggngactacagtgaataatgtttngtgtattngaaaatngctaggagagtggatcttaaatggtctccccacaaaaatgacaagtatgtgaggtgacagatatgttaatgagcttgatttaatcact

SEQ ID NO: 355841 - DNA, 2042 bp, Homo sapiens
agacgactgtctgagagaggggccgctacgccgcacagcaaacaagctccgcgacgtttccaggacccggataatcccgcccttagagcagagccggaagaaggcgggacgaaccggaagagggtgaaatgctttcggtaggcactccacggctgtgaagatggcggcggctgcgtggcttcaggtgttgcctgtcattcttctgcttctgggagctcacccgtcaccactgtcgtttttcagtgcgggaccggcaaccgtagctgctgccgaccggtccaaatggcacattccgataccgtcggggaaaaattattttagttttggaaagatcctcttcagaaataccactatcttcctgaagtttgatggagaaccttgtgacctgtctttgaatataacctggtatctgaaaagcgctgattgttacaatgaaatctataacttcaaggcagaagaagtagagttgtatttggaaaaacttaaggaaaaaagaggcttgtctgggaaatatcaaacatcatcaaaattgttccagaactgcagtgaactctttaaaacacagaccttttctggagattttatgcatcgactgcctcttttaggagaaaaacaggaggctaaggagaatggaacaaaccttacctttattggagacaaaaccgcaatgcatgaaccattgcaaacttggcaagatgcaccatacatttttattgtacatattggcatttcatcctcaaaggaatcatcaaaagaaaattcactgagtaatctttttaccatgactgttgaagtgaagggtccctatgaatacctcacacttgaagactatcccttgatgatttttttcatggtgatgtgtattgtatatgtcctgtttggtgttctgtggctggcatggtctgcctgctactggagagatctcctgagaattcagttttggattggtgctgtcatcttcctgggaatgcttgagaaagctgtcttctatgcggaatttcagaatatccgatacaaaggagaatctgtccagggtgctttgatccttgcagagctgctttcagcagtgaaacgctcactggctcgaaccctggtcatcatagtcagtctgggatatggcatcgtcaagccacgccttggagtcactcttcataaggttgtagtagcaggagccctctatcttttgttctctggcatggaaggggtcctcagagttactggggcccagactgatcttgcttccttggcctttatccccttggctttcctagacactgccttgtgctggtggatatttattagcctgactcaaacaatgaagctattaaaacttcggaggaacattgtaaaactctctttgtatcggcatttcaccaacacgcttattttggcagtggcagcatccattgtgtttatcatctggacaaccatgaagttcagaatagtgacatgtcagtcggactggcgggagctgtgggtagacgatgccatctggcgcttgctgttctccatgatcctctttgtcatcatggttctctggcgaccatctgcaaacaaccagaggttcttggactcttctgtttactctgctaacatgagatgaccatgtcatcaattaggggtggtgcattgggggacagtatcagggctgtgtcatatagtggaaggaacactgggcctggaatcagaagaactgggttcctatctcagctctcctcttaacttcatgatttttggcatgcggcctctccacctctctggccttagtttcctttctatatactgagggggaattaaacccagcaacatgaagttcctttcagctctgacattttgtgataaatacacaggcatactatggaaataaattgcaagtttggtttcagaccatcacgataaagcagatattgagttacatacatattttgttttttccagtgcatatcaaagttatgtttacactattctgtagtctactatgtgtgcaatagcattatgtctaaaaaatatatgcacgttaatttaaaaacactttattgcca

SEQ ID NO: 355842 - DNA, 3702 bp, Homo sapiens
  misc_feature (1503)..(1503): n is a, c, g, or t
  misc_feature (1541)..(1541): n is a, c, g, or t
  misc_feature (2819)..(2819): n is a, c, g, or t
  misc_feature (3418)..(3418): n is a, c, g, or t
agacgactgtctgagagaggggccgctacgccgcacagcaaacaagctccgcgacgtttccaggacccggataatcccgcccttagagcagagccggaagaaggcgggacgaaccggaagagggtgaaatgctttcggtaggcactccacggctgtgaagatggcggcggctgcgtggcttcaggtgttgcctgtcattcttctgcttctgggagctcacccgtcaccactgtcgtttttcagtgcgggaccggcaaccgtagctgctgccgaccggtccaaatggcacattccgataccgtcggggaaaaattattttagttttggaaagatcctcttcagaaataccactatcttcctgaagtttgatggagaaccttgtgacctgtctttgaatataacctggtatctgaaaagcgctgattgttacaatgaaatctataacttcaaggcagaagaagtagagttgtatttggaaaaacttaaggaaaaaagaggcttgtctgggaaatatcaaacatcatcaaaattgttccagaactgcagtgaactctttaaaacacagaccttttctggagattttatgcatcgactgcctcttttaggagaaaaacaggaggctaaggagaatggaacaaaccttacctttattggagacaaaaccattcagatgcctttcttgaagaaacatttcttggattgttgaaagactttaataatttccaaagttccaaaagttgattttgatagtttttgccagtgttttcgttgcttttatggatgagtagattttcagagtttcttattctgccattctgaaagtgtctcactacctaaaccccagttttatttgtacagaattttaactgaatgtaagttaggcatgacagtctttgttaatttttttaaacaaaagatagccattaggactgggtacagtggctcacgcctgtaatgccaacactttgggaggccaaggtgggcagatgacttgaggttgggagttcgagaccagcttggccaatgtggtgaaactttgtctttactaaaaatacaaaaattagttgctcatggtggcaggcacctgtaatccaagctactcaggaggctgaggcaggagaatcgcgtgaacttgggaggtggaggctgcagtgagctgagatcacgctactgcactccagcctgggcagccagtgagattccatctcaaaaaaaaaagaaaaaagatattcattggattttctcttactaataggtatatattcactgtgaaaatggagacgatatacataaatgaaaagaagaaaatagtaatctataataccatgcagtgatatatttatcttcctattcttttgtatatgggcatgtttatattattttaaaaagggaatcttagagtatgtattatatgacttttttttgtagcttagcaatataacatggacatgtcgtcagtttggtaaatattgtattgcatcgttacttaaatgcttgtatagngtcttattgtatgagtacattgcaatttgttcaattcnctgttcttgaacttttatgagtttcattatcttggaattttatgcagtgttgtgattaatattttaactacatttgcttttaagtctttattttctgatctcagaagaattgtatattgggataagtttttaattctataacttaaaagtaaaaatcctttgtaattttatgttctaatagttttagcagtttggtgtgattacacagagcacatgcatattaaccaaaataagatcatattatataccattgtataattttttctttttattaccaaattggtacattgaatactacttcacctttttatggctgcttagtgttccattttattatgattttaataactcccaattgatgaacattggggttgttcccaaatttcccctattatgggtaaagttatgttcataatgtctagctatatttctgtgtacatttataatctttaggctaaattcctggaggtagaattgctagatccacatgtatgcacagtttaaaggtgctttttcatagcaatttatggccccaagaaagtgagagtgagtgtctttgtttatgttgctatgaaaggacacctggagctgggtaatttataaagaaaagaggtttatttggctcactgttctgtgggctatgaaagaagcatggtgccggcatctgtttctagtgagggcttcaggctgtttctactcatggtggaaggtgaaggggggagcctgtgtgtgcagatcacctggcaagagaggaagaaggaaagagggaggaggaggagaggaggtagtgggctttttttttaataatcaaggaaccaatagagggataactcattactgaaaggacagtggcaccaagccattcattagggattggctcccatgacccaaacacctctctctagaattcacctcaaacattggggatcaaatttcaatatgaaatttgggaggacagatatctaaaccatagcagtgagtttccatctttcctcacaaaaacaatggctgtcatcatttaaaatagattttatgcagtttgtctagttaagcaacaatttgttcttgtaaattgtatttaaaaagttatcgttaagccaggcgctgtggctcacacctgtaaccccagcaccttgggaggccacagcaggcagatcgctagagcttacgagtttgagaccaccctgggcaatatggtgaaacctcgtctctacaaaaaatggaaaaattagccagaaggtggcacgtgcacctgtagtccccgctacttgggagacngaagtgggaggatggcttgagtctgggaggcagaggttgcagtgagccaaagtcacaccacttcactctaggcgatagagccatacctcgtctctaaaacaaaaacaacagcaaaaaaattattgttgagggtgaaccttcatttatatggatattggcacttgtgctttcttcagttgtcttctgtgcacagcatactttgagttctactcaaggcttgagtcttgttacagtgattaaaactggctgaaaggtgagcctgttgaataccacaagtaatatttaggaatacttagtcaaaatatagtcaaaagaaatgaaagagttatctatcttttgatctttcttcctgaaaatttggtccaaggcaaataccttataatcctatttaaagaatattcacaggctgggttcagtggtaatctcagcactttttaaggcccaaggtgggtgaatcacttgaagccagggtttgagactagtctggtcaacatgacaaaaccctatctctactaaaaatgcaaaaattagcttggtgtggtggggtacacctgtaatcccagctacttgggtgcatgaggcctgagaatcacttgagnccaagaagcagaggttgtagtgagccatgattgcaccactgcactccagcctgggtgacaaaatgagactctgtctcaaaaagcaaaaaggatactcacaaattcagtacctccatcctatttcattaaagctctgattaaacatatatgtttatgggccgggtgtggtggctcacacctgtgatcccagcactttgggaggccaaggtgggtggatcacctgatgtcaggagttcgagatcagcctggcaaacatggtgaaacctcatctctactaaaaatac

SEQ ID NO: 355843 - DNA, 4068 bp, Homo sapiens
  misc_feature (1869)..(1869): n is a, c, g, or t
  misc_feature (1907)..(1907): n is a, c, g, or t
  misc_feature (3185)..(3185): n is a, c, g, or t
  misc_feature (3784)..(3784): n is a, c, g, or t
agacgactgtctgagagaggggccgctacgccgcacagcaaacaagctccgcgacgtttccaggacccggataatcccgcccttagagcagagccggaagaaggcgggacgaaccggaagagggtgaaatgctttcggtaggcactccacggctgtgaagatggcggcggctgcgtggcttcaggtgttgcctgtcattcttctgcttctgggagctcacccgtcaccactgtcgtttttcagtgcgggaccggcaaccgtagctgctgccgaccggtccaaatggcacattccgataccgtcggtgagtattcacttcactaacgtctgaacctagaggagcaaggggtggggctacggcggcccaaggggtccatgaaggttccgcaaaagtctcttcaaaaggggtggggttgctgggatggtctgtgtggctagccaactgggacccacctccctggagtggaaagccgcgcacttctgtgattaggctagcgggaatgtaagggccacttcagcaacagaaaggagtggtggagcggcttctcatcagaaaaacagaactttcagtgcctgacttgagatgtaaacttgatgtacaaacggagagttgtttatctttcagatgtttcacagaatccagtgtccccgggttggataagaaagatatgggaaaaattattttagttttggaaagatcctcttcagaaataccactatcttcctgaagtttgatggagaaccttgtgacctgtctttgaatataacctggtatctgaaaagcgctgattgttacaatgaaatctataacttcaaggcagaagaagtagagttgtatttggaaaaacttaaggaaaaaagaggcttgtctgggaaatatcaaacatcatcaaaattgttccagaactgcagtgaactctttaaaacacagaccttttctggagattttatgcatcgactgcctcttttaggagaaaaacaggaggctaaggagaatggaacaaaccttacctttattggagacaaaaccattcagatgcctttcttgaagaaacatttcttggattgttgaaagactttaataatttccaaagttccaaaagttgattttgatagtttttgccagtgttttcgttgcttttatggatgagtagattttcagagtttcttattctgccattctgaaagtgtctcactacctaaaccccagttttatttgtacagaattttaactgaatgtaagttaggcatgacagtctttgttaatttttttaaacaaaagatagccattaggactgggtacagtggctcacgcctgtaatgccaacactttgggaggccaaggtgggcagatgacttgaggttgggagttcgagaccagcttggccaatgtggtgaaactttgtctttactaaaaatacaaaaattagttgctcatggtggcaggcacctgtaatccaagctactcaggaggctgaggcaggagaatcgcgtgaacttgggaggtggaggctgcagtgagctgagatcacgctactgcactccagcctgggcagccagtgagattccatctcaaaaaaaaaagaaaaaagatattcattggattttctcttactaataggtatatattcactgtgaaaatggagacgatatacataaatgaaaagaagaaaatagtaatctataataccatgcagtgatatatttatcttcctattcttttgtatatgggcatgtttatattattttaaaaagggaatcttagagtatgtattatatgacttttttttgtagcttagcaatataacatggacatgtcgtcagtttggtaaatattgtattgcatcgttacttaaatgcttgtatagngtcttattgtatgagtacattgcaatttgttcaattcnctgttcttgaacttttatgagtttcattatcttggaattttatgcagtgttgtgattaatattttaactacatttgcttttaagtctttattttctgatctcagaagaattgtatattgggataagtttttaattctataacttaaaagtaaaaatcctttgtaattttatgttctaatagttttagcagtttggtgtgattacacagagcacatgcatattaaccaaaataagatcatattatataccattgtataattttttctttttattaccaaattggtacattgaatactacttcacctttttatggctgcttagtgttccattttattatgattttaataactcccaattgatgaacattggggttgttcccaaatttcccctattatgggtaaagttatgttcataatgtctagctatatttctgtgtacatttataatctttaggctaaattcctggaggtagaattgctagatccacatgtatgcacagtttaaaggtgctttttcatagcaatttatggccccaagaaagtgagagtgagtgtctttgtttatgttgctatgaaaggacacctggagctgggtaatttataaagaaaagaggtttatttggctcactgttctgtgggctatgaaagaagcatggtgccggcatctgtttctagtgagggcttcaggctgtttctactcatggtggaaggtgaaggggggagcctgtgtgtgcagatcacctggcaagagaggaagaaggaaagagggaggaggaggagaggaggtagtgggctttttttttaataatcaaggaaccaatagagggataactcattactgaaaggacagtggcaccaagccattcattagggattggctcccatgacccaaacacctctctctagaattcacctcaaacattggggatcaaatttcaatatgaaatttgggaggacagatatctaaaccatagcagtgagtttccatctttcctcacaaaaacaatggctgtcatcatttaaaatagattttatgcagtttgtctagttaagcaacaatttgttcttgtaaattgtatttaaaaagttatcgttaagccaggcgctgtggctcacacctgtaaccccagcaccttgggaggccacagcaggcagatcgctagagcttacgagtttgagaccaccctgggcaatatggtgaaacctcgtctctacaaaaaatggaaaaattagccagaaggtggcacgtgcacctgtagtccccgctacttgggagacngaagtgggaggatggcttgagtctgggaggcagaggttgcagtgagccaaagtcacaccacttcactctaggcgatagagccatacctcgtctctaaaacaaaaacaacagcaaaaaaattattgttgagggtgaaccttcatttatatggatattggcacttgtgctttcttcagttgtcttctgtgcacagcatactttgagttctactcaaggcttgagtcttgttacagtgattaaaactggctgaaaggtgagcctgttgaataccacaagtaatatttaggaatacttagtcaaaatatagtcaaaagaaatgaaagagttatctatcttttgatctttcttcctgaaaatttggtccaaggcaaataccttataatcctatttaaagaatattcacaggctgggttcagtggtaatctcagcactttttaaggcccaaggtgggtgaatcacttgaagccagggtttgagactagtctggtcaacatgacaaaaccctatctctactaaaaatgcaaaaattagcttggtgtggtggggtacacctgtaatcccagctacttgggtgcatgaggcctgagaatcacttgagnccaagaagcagaggttgtagtgagccatgattgcaccactgcactccagcctgggtgacaaaatgagactctgtctcaaaaagcaaaaaggatactcacaaattcagtacctccatcctatttcattaaagctctgattaaacatatatgtttatgggccgggtgtggtggctcacacctgtgatcccagcactttgggaggccaaggtgggtggatcacctgatgtcaggagttcgagatcagcctggcaaacatggtgaaacctcatctctactaaaaatac

SEQ ID NO: 355844 - DNA, 2895 bp, Homo sapiens
  misc_feature (11)..(11): n is a, c, g, or t
  misc_feature (64)..(64): n is a, c, g, or t
  misc_feature (696)..(696): n is a, c, g, or t
  misc_feature (734)..(734): n is a, c, g, or t
  misc_feature (2012)..(2012): n is a, c, g, or t
  misc_feature (2611)..(2611): n is a, c, g, or t
gctcttgtggngacacgatcatgaccaaacccggggggcgtggttcttttagtcaggtgtcccngggttagatatgtcgacagcgtcgtcttgttattttaaacaaaagatagccattaggactgggtacagtggctcacgcctgtaatgccaacactttgggaggccaaggtgggcagatgacttgaggttgggagttcgagaccagcttggccaatgtggtgaaactttgtctttactaaaaatacaaaaattagttgctcatggtggcaggcacctgtaatccaagctactcaggaggctgaggcaggagaatcgcgtgaacttgggaggtggaggctgcagtgagctgagatcacgctactgcactccagcctgggcagccagtgagattccatctcaaaaaaaaaagaaaaaagatattcattggattttctcttactaataggtatatattcactgtgaaaatggagacgatatacataaatgaaaagaagaaaatagtaatctataataccatgcagtgatatatttatcttcctattcttttgtatatgggcatgtttatattattttaaaaagggaatcttagagtatgtattatatgacttttttttgtagcttagcaatataacatggacatgtcgtcagtttggtaaatattgtattgcatcgttacttaaatgcttgtatagngtcttattgtatgagtacattgcaatttgttcaattcnctgttcttgaacttttatgagtttcattatcttggaattttatgcagtgttgtgattaatattttaactacatttgcttttaagtctttattttctgatctcagaagaattgtatattgggataagtttttaattctataacttaaaagtaaaaatcctttgtaattttatgttctaatagttttagcagtttggtgtgattacacagagcacatgcatattaaccaaaataagatcatattatataccattgtataattttttctttttattaccaaattggtacattgaatactacttcacctttttatggctgcttagtgttccattttattatgattttaataactcccaattgatgaacattggggttgttcccaaatttcccctattatgggtaaagttatgttcataatgtctagctatatttctgtgtacatttataatctttaggctaaattcctggaggtagaattgctagatccacatgtatgcacagtttaaaggtgctttttcatagcaatttatggccccaagaaagtgagagtgagtgtctttgtttatgttgctatgaaaggacacctggagctgggtaatttataaagaaaagaggtttatttggctcactgttctgtgggctatgaaagaagcatggtgccggcatctgtttctagtgagggcttcaggctgtttctactcatggtggaaggtgaaggggggagcctgtgtgtgcagatcacctggcaagagaggaagaaggaaagagggaggaggaggagaggaggtagtgggctttttttttaataatcaaggaaccaatagagggataactcattactgaaaggacagtggcaccaagccattcattagggattggctcccatgacccaaacacctctctctagaattcacctcaaacattggggatcaaatttcaatatgaaatttgggaggacagatatctaaaccatagcagtgagtttccatctttcctcacaaaaacaatggctgtcatcatttaaaatagattttatgcagtttgtctagttaagcaacaatttgttcttgtaaattgtatttaaaaagttatcgttaagccaggcgctgtggctcacacctgtaaccccagcaccttgggaggccacagcaggcagatcgctagagcttacgagtttgagaccaccctgggcaatatggtgaaacctcgtctctacaaaaaatggaaaaattagccagaaggtggcacgtgcacctgtagtccccgctacttgggagacngaagtgggaggatggcttgagtctgggaggcagaggttgcagtgagccaaagtcacaccacttcactctaggcgatagagccatacctcgtctctaaaacaaaaacaacagcaaaaaaattattgttgagggtgaaccttcatttatatggatattggcacttgtgctttcttcagttgtcttctgtgcacagcatactttgagttctactcaaggcttgagtcttgttacagtgattaaaactggctgaaaggtgagcctgttgaataccacaagtaatatttaggaatacttagtcaaaatatagtcaaaagaaatgaaagagttatctatcttttgatctttcttcctgaaaatttggtccaaggcaaataccttataatcctatttaaagaatattcacaggctgggttcagtggtaatctcagcactttttaaggcccaaggtgggtgaatcacttgaagccagggtttgagactagtctggtcaacatgacaaaaccctatctctactaaaaatgcaaaaattagcttggtgtggtggggtacacctgtaatcccagctacttgggtgcatgaggcctgagaatcacttgagnccaagaagcagaggttgtagtgagccatgattgcaccactgcactccagcctgggtgacaaaatgagactctgtctcaaaaagcaaaaaggatactcacaaattcagtacctccatcctatttcattaaagctctgattaaacatatatgtttatgggccgggtgtggtggctcacacctgtgatcccagcactttgggaggccaaggtgggtggatcacctgatgtcaggagttcgagatcagcctggcaaacatggtgaaacctcatctctactaaaaatac

SEQ ID NO: 355845 - DNA, 3125 bp, Homo sapiens
  misc_feature (1503)..(1503): n is a, c, g, or t
  misc_feature (1541)..(1541): n is a, c, g, or t
  misc_feature (2841)..(2841): n is a, c, g, or t
agacgactgtctgagagaggggccgctacgccgcacagcaaacaagctccgcgacgtttccaggacccggataatcccgcccttagagcagagccggaagaaggcgggacgaaccggaagagggtgaaatgctttcggtaggcactccacggctgtgaagatggcggcggctgcgtggcttcaggtgttgcctgtcattcttctgcttctgggagctcacccgtcaccactgtcgtttttcagtgcgggaccggcaaccgtagctgctgccgaccggtccaaatggcacattccgataccgtcggggaaaaattattttagttttggaaagatcctcttcagaaataccactatcttcctgaagtttgatggagaaccttgtgacctgtctttgaatataacctggtatctgaaaagcgctgattgttacaatgaaatctataacttcaaggcagaagaagtagagttgtatttggaaaaacttaaggaaaaaagaggcttgtctgggaaatatcaaacatcatcaaaattgttccagaactgcagtgaactctttaaaacacagaccttttctggagattttatgcatcgactgcctcttttaggagaaaaacaggaggctaaggagaatggaacaaaccttacctttattggagacaaaaccattcagatgcctttcttgaagaaacatttcttggattgttgaaagactttaataatttccaaagttccaaaagttgattttgatagtttttgccagtgttttcgttgcttttatggatgagtagattttcagagtttcttattctgccattctgaaagtgtctcactacctaaaccccagttttatttgtacagaattttaactgaatgtaagttaggcatgacagtctttgttaatttttttaaacaaaagatagccattaggactgggtacagtggctcacgcctgtaatgccaacactttgggaggccaaggtgggcagatgacttgaggttgggagttcgagaccagcttggccaatgtggtgaaactttgtctttactaaaaatacaaaaattagttgctcatggtggcaggcacctgtaatccaagctactcaggaggctgaggcaggagaatcgcgtgaacttgggaggtggaggctgcagtgagctgagatcacgctactgcactccagcctgggcagccagtgagattccatctcaaaaaaaaaagaaaaaagatattcattggattttctcttactaataggtatatattcactgtgaaaatggagacgatatacataaatgaaaagaagaaaatagtaatctataataccatgcagtgatatatttatcttcctattcttttgtatatgggcatgtttatattattttaaaaagggaatcttagagtatgtattatatgacttttttttgtagcttagcaatataacatggacatgtcgtcagtttggtaaatattgtattgcatcgttacttaaatgcttgtatagngtcttattgtatgagtacattgcaatttgttcaattcnctgttcttgaacttttatgagtttcattatcttggaattttatgcagtgttgtgattaatattttaactacatttgcttttaagtctttattttctgatctcagaagaattgtatattgggataagtttttaattctataacttaaaagtaaaaatcctttgtaattttatgttctaatagttttagcagtttggtgtgattacacagagcacatgcatattaaccaaaataagatcatattatataccattgtataattttttctttttattaccaaattggtacattgaatactacttcacctttttatggctgcttagtgttccattttattatgattttaataactcccaattgatgaacattggggttgttcccaaatttcccctattatgggtaaagttatgttcataatgtctagctatatttctgtgtacatttataatctttaggctaaattcctggaggtagaattgctagatccacatgtatgcacagtttaaaggtgctttttcatagcaatttatggccccaagaaagtgagagtgagtgtctttgtttatgttgctatgaaaggacacctggagctgggtaatttataaagaaaagaggtttatttggctcactgttctgtgggctatgaaagaagcatggtgccggcatctgtttctagtgagggcttcaggctgtttctactcatggtggaaggtgaaggggggagcctgtgtgtgcagatcacctggcaagagaggaagaaggaaagagggaggaggaggagaggaggtagtgggctttttttttaataatcaaggaaccaatagagggataactcattactgaaaggacagtggcaccaagccattcattagggattggctcccatgacccaaacacctctctctagaattcacctcaaacattggggatcaaatttcaatatgaaatttgggaggacagatatctaaaccatagcagtgagtttccatctttcctcacaaaaacaatggctgtcatcatttaaaatagattttatgcagtttgtctagttaagcaacaatttgttcttgtaaattgtatttaaaaagttatcgttaagccaggcgctgtggctcacacctgtaaccccagcaccttgggaggccacagcaggcagatcgctagagcttacgagtttgagaccaccctgggcaatatggtgaaacctcgtctctacaaaaaatggaaaaattagccagaaggtggcacgtgcacctgtaatcccagctacttgggtgcatgaggcctgagaatcacttgagnccaagaagcagaggttgtagtgagccatgattgcaccactgcactccagcctgggtgacaaaatgagactctgtctcaaaaagcaaaaaggatactcacaaattcagtacctccatcctatttcattaaagctctgattaaacatatatgtttatgggccgggtgtggtggctcacacctgtgatcccagcactttgggaggccaaggtgggtggatcacctgatgtcaggagttcgagatcagcctggcaaacatggtgaaacctcatctctactaaaaatac

SEQ ID NO: 355846 - DNA, 324 bp, Homo sapiens
aaccctggtcatcatagtcagtctgggatatggcatcgtcaagtaagtattaacttcctgtatggaagagcaaattaaaatgctgattaaattaaaacagtattgcatgttcccaatgtagtagttctgaaatagttgataaaagaaataattctgaaacaagaaaggtatttgaaattttgtagcattgtaaatgttgggaaaatgtgtttcattttccatacttccaaatatattccatacttccaaatatattccatacttccaagtccaaatgtattccatacttccaaatccaaatgtattccatacttccgaatatat

SEQ ID NO: 355847 - DNA, 431 bp, Homo sapiens
acatctgtttttcaccacttctttttctttgtctgcaggcccagactgatcttgcttccttggcctttatccccttggctttcctagacactgccttgtgctggtggatatccttctcattggcttgtttgatgatggtccattttctccccttggagatgggtttccattgatctttctgcaaagagtttttatcagttttgttaattactccttagtgtggggaacagtgcatgctaagtcttaacaacctgagggttcaggtaagcagttttttttgtttctatttttttaattttaaaaatcaaattggaaattggtgactgtggaccgagctcgagataaaatcttttggcttttttcttttaagtgagcatttcatcttgattttgcacttcttgtttgtgtacctaatcatttagtgttagagt

SEQ ID NO: 355848 - DNA, 642 bp, Homo sapiens
gggactttggttttaaggagcttgggagagaggaatgggaatagggtgaacacagacatctcaagcttgcttttctttcctagattcagatgcctttcttgaagaaacatttcttggattgttgaaagactttaataatttccaaagttccaaaagttgattttgatagtttttgccagtgttttcgttgcttttatggatgagtagattttcagagtttcttattctgccattctgaaagtgtctcactacctaaaccccagttttatttgtacagaattttaactgaatgtaagttaggcatgacagtctttgttaatttttttaaacaaaagatagccattaggactgggtacagtggctcacgcctgtaatgccaacactttgggaggccaaggtgggcagatgacttgaggttgggagttcgagaccagcttggccaatgtggtgaaactttgtctttactaaaaatacaaaaattagttgctcatggtggcaggcacctgtaatccaagctactcaggaggctgaggcaggagaatcgcgtgaacttgggaggtggaggctgcagtgagctgagatcacgctactgcactccagcctgggcagccagtgagattccatctcaaaaaaaaaagaaaa

SEQ ID NO: 355849 - DNA, 565 bp, Homo sapiens
atctgtgcttcaaaccattccctacagaaaccattccctcaggtaacctcttacaaagttggaacattttcacagtccatctctcctccctagggaaaagctaggatttggggatgttggggattctacctgcttactctgcactgagctgggggagcggctgtagtgagctcatgcttgctagtccaaacttccactttgatttcagcaacttccaacctgggccctttgtttttagctctcggactcaggcaagacagaaaacagtctctcgtgcaggttccagaaaagtcagaatgttggatgtacattccagtcatttccttccctctgcaaaaagaagctgggagctgagggtttcctctctatcatgtggtactgtgctgggtccatgggaagggaagaattatggcaagagggtgcctcaggtttttctgccgactttgattcagctggtttcatgctttcctatagtgcagaagaccctcaactggtttctggatttcccacaaagggaatttttccatgtgttattgaatcagtgtgtctgtagagggaaggagtg

SEQ ID NO: 355850 - DNA, 2964 bp, Homo sapiens
agacgactgtctgagagaggggccgctacgccgcacagcaaacaagctccgcgacgtttccaggacccggataatcccgcccttagagcagagccggaagaaggcgggacgaaccggaagagggtgaaatgctttcggtaggcactccacggctgtgaagatggcggcggctgcgtggcttcaggtgttgcctgtcattcttctgcttctgggagctcacccgtcaccactgtcgtttttcagtgcgggaccggcaaccgtagctgctgccgaccggtccaaatggcacattccgataccgtcggggaaaaattattttagttttggaaagatcctcttcagaaataccactatcttcctgaagtttgatggagaaccttgtgacctgtctttgaatataacctggtatctgaaaagcgctgattgttacaatgaaatctataacttcaaggcagaagaagtagagttgtatttggaaaaacttaaggaaaaaagaggcttgtctgggaaatatcaaacatcatcaaaattgttccagaactgcagtgaactctttaaaacacagaccttttctggagattttatgcatcgactgcctcttttaggagaaaaacaggaggctaaggagaatggaacaaaccttacctttattggagacaaaaccgcaatgcatgaaccattgcaaacttggcaagatgcaccatacatttttattgtacatattggcatttcatcctcaaaggaatcatcaaaagaaaattcactgagtaatctttttaccatgactgttgaagtgaagggtccctatgaatacctcacacttgaagactatcccttgatgatttggctggcatggtctgcctgctactggagagatctcctgagaattcagttttggattggtgctgtcatcttcctgggaatgcttgagaaagctgtcttctatgcggaatttcagaatatccgatacaaaggagaatctgtccagggtgctttgatccttgcagagctgctttcagcagtgaaacgctcactggctcgaaccctggtcatcatagtcagtctgggatatggcatcgtcaagccacgccttggagtcactcttcataaggttgtagtagcaggagccctctatcttttgttctctggcatggaaggggtcctcagagttactggggcccagactgatcttgcttccttggcctttatccccttggctttcctagacactgccttgtgctggtggatatttattagcctgactcaaacaatgaagctattaaaacttcggaggaacattgtaaaactctctttgtatcggcatttcaccaacacgcttattttggcagtggcagcatccattgtgtttatcatctggacaaccatgaagttcagaatagtgacatgtcagtcggactggcgggagctgtgggtagacgatgccatctggcgcttgctgttctccatgatcctctttgtcatcatggttctctggcgaccatctgcaaacaaccagaggtttgccttttcaccattgtctgaggaagaggaggaggatgaacaaaaggagcctatgctgaaagaaagctttgaaggaatgaaaatgagaagtaccaaacaagaacccaatggaaatagtaaagttaacaaagcacaggaagatgatttgaagtgggtagaagagaatgttccttcttctgtgacagatgtagcacttccagcccttctggattcagatgaggaacgaatgatcacacactttgaaaggtccaaaatggagtaaggaatgggaagatttgcagttaaagatggctaccatcagggaagagatcagcatctgtgtcagtcttctgtacggctccatgggattaaaggaagcaatgacatcctgatctgttccttgatctttgggcattggagttggcgagaggtgtcagaacaaagagaacatcttactgaaaacaagttcataagatgagaaaaatctacgagcttcttatttacaacactgctgccccctttcctcccagactctgacatggatgttcatgcaacttaagtgtgttgttcctgaactttctgtaatgtttcattttttaaatctgacaaactaaaaagtttaacgtcttctaaaagattgtcatcaacaccataatatgtaatctccaggagcaactgcctgtaatttttatttatttagggagttacataggtgatgggggaaattgttaactacctttcattttcctgggaagtcaaggttacatcttgcagaggttgttttgagaaaaaagggcccttctgagttaaggagccatagttctatcaatgatcaaaagaaaaaaaaaaaaaagagaaactgttacagtatgattcagatcatttaaaaaagcaaaatcaagtgcaattttgtttacaaatggtgtatattaaagatttttctatttcagatgtactttaaagagaaatattagcttaactcttttgacatctgctattgtgacacatcccattgctggcaatgtggtgcacactccgaaacttttaactactgttttgtaagcctccaagggtggcattgcagggtccttaggcaatgttttgtttgcctttatgcagagaggtgctccaagtgctgtgattgagcaccgtgctagaggaactgtaatgcttcagaagttgtagcttatacaaaggaaacaggtcctgctggcttaatttaaacagttattgcatgaagtagcgtggaggccctggactgctgctcgttctttaggatggactgttctggtatctggtattggtttagagactgttaataagggacatcacaaggtgatgggattcatttgaagcactctatttctgttttaatggttttatccaattttgccttcccaagatttttgttctacataaaaagttcatgccactttttaatataaaaaaatttaacaaaattaa

SEQ ID NO: 355851 - DNA, 3375 bp, Homo sapiens
agacgactgtctgagagaggggccgctacgccgcacagcaaacaagctccgcgacgtttccaggacccggataatcccgcccttagagcagagccggaagaaggcgggacgaaccggaagagggtgaaatgctttcggtaggcactccacggctgtgaagatggcggcggctgcgtggcttcaggtgttgcctgtcattcttctgcttctgggagctcacccgtcaccactgtcgtttttcagtgcgggaccggcaaccgtagctgctgccgaccggtccaaatggcacattccgataccgtcggtgagtattcacttcactaacgtctgaacctagaggagcaaggggtggggctacggcggcccaaggggtccatgaaggttccgcaaaagtctcttcaaaaggggtggggttgctgggatggtctgtgtggctagccaactgggacccacctccctggagtggaaagccgcgcacttctgtgattaggctagcgggaatgtaagggccacttcagcaacagaaaggagtggtggagcggcttctcatcagaaaaacagaactttcagtgcctgacttgagatgtaaacttgatgtacaaacggagagttgtttatctttcagatgtttcacagaatccagtgtccccgggttggataagaaagatatgggaaaaattattttagttttggaaagatcctcttcagaaataccactatcttcctgaagtttgatggagaaccttgtgacctgtctttgaatataacctggtatctgaaaagcgctgattgttacaatgaaatctataacttcaaggcagaagaagtagagttgtatttggaaaaacttaaggaaaaaagaggcttgtctgggaaatatcaaacatcatcaaaattgttccagaactgcagtgaactctttaaaacacagaccttttctggagattttatgcatcgactgcctcttttaggagaaaaacaggaggctaaggagaatggaacaaaccttacctttattggagacaaaaccgcaatgcatgaaccattgcaaacttggcaagatgcaccatacatttttattgtacatattggcatttcatcctcaaaggaatcatcaaaagaaaattcactgagtaatctttttaccatgactgttgaagtgaagggtccctatgaatacctcacacttgaagactatcccttgatgatttttttcatggtgatgtgtattgtatatgtcctgtttggtgttctgtggctggcatggtctgcctgctactggagagatctcctgagaattcagttttggattggtgctgtcatcttcctgggaatgcttgagaaagctgtcttctatgcggaatttcagaatatccgatacaaaggagaatctgtccagggtgctttgatccttgcagagctgctttcagcagtgaaacgctcactggctcgaaccctggtcatcatagtcagtctgggatatggcatcgtcaagccacgccttggagtcactcttcataaggttgtagtagcaggagccctctatcttttgttctctggcatggaaggggtcctcagagttactggggcccagactgatcttgcttccttggcctttatccccttggctttcctagacactgccttgtgctggtggatatttattagcctgactcaaacaatgaagctattaaaacttcggaggaacattgtaaaactctctttgtatcggcatttcaccaacacgcttattttggcagtggcagcatccattgtgtttatcatctggacaaccatgaagttcagaatagtgacatgtcagtcggactggcgggagctgtgggtagacgatgccatctggcgcttgctgttctccatgatcctctttgtcatcatggttctctggcgaccatctgcaaacaaccagaggtttgccttttcaccattgtctgaggaagaggaggaggatgaacaaaaggagcctatgctgaaagaaagctttgaaggaatgaaaatgagaagtaccaaacaagaacccaatggaaatagtaaagttaacaaagcacaggaagatgatttgaagtgggtagaagagaatgttccttcttctgtgacagatgtagcacttccagcccttctggattcagatgaggaacgaatgatcacacactttgaaaggtccaaaatggagtaaggaatgggaagatttgcagttaaagatggctaccatcagggaagagatcagcatctgtgtcagtcttctgtacggctccatgggattaaaggaagcaatgacatcctgatctgttccttgatctttgggcattggagttggcgagaggtgtcagaacaaagagaacatcttactgaaaacaagttcataagatgagaaaaatctacgagcttcttatttacaacactgctgccccctttcctcccagactctgacatggatgttcatgcaacttaagtgtgttgttcctgaactttctgtaatgtttcattttttaaatctgacaaactaaaaagtttaacgtcttctaaaagattgtcatcaacaccataatatgtaatctccaggagcaactgcctgtaatttttatttatttagggagttacataggtgatgggggaaattgttaactacctttcattttcctgggaagtcaaggttacatcttgcagaggttgttttgagaaaaaagggcccttctgagttaaggagccatagttctatcaatgatcaaaagaaaaaaaaaaaaaagagaaactgttacagtatgattcagatcatttaaaaaagcaaaatcaagtgcaattttgtttacaaatggtgtatattaaagatttttctatttcagatgtactttaaagagaaatattagcttaactcttttgacatctgctattgtgacacatcccattgctggcaatgtggtgcacactccgaaacttttaactactgttttgtaagcctccaagggtggcattgcagggtccttaggcaatgttttgtttgcctttatgcagagaggtgctccaagtgctgtgattgagcaccgtgctagaggaactgtaatgcttcagaagttgtagcttatacaaaggaaacaggtcctgctggcttaatttaaacagttattgcatgaagtagcgtggaggccctggactgctgctcgttctttaggatggactgttctggtatctggtattggtttagagactgttaataagggacatcacaaggtgatgggattcatttgaagcactctatttctgttttaatggttttatccaattttgccttcccaagatttttgttctacataaaaagttcatgccactttttaatataaaaaaatttaacaaaattaa

SEQ ID NO: 355852 - DNA, 2895 bp, Homo sapiens
agacgactgtctgagagaggggccgctacgccgcacagcaaacaagctccgcgacgtttccaggacccggataatcccgcccttagagcagagccggaagaaggcgggacgaaccggaagagggtgaaatgctttcggtaggcactccacggctgtgaagatggcggcggctgcgtggcttcaggtgttgcctgtcattcttctgcttctgggagctcacccgtcaccactgtcgtttttcagtgcgggaccggcaaccgtagctgctgccgaccggtccaaatggcacattccgataccgtcggggaaaaattattttagttttggaaagatcctcttcagaaataccactatcttcctgaagtttgatggagaaccttgtgacctgtctttgaatataacctggtatctgaaaagcgctgattgttacaatgaaatctataacttcaagaccttttctggagattttatgcatcgactgcctcttttaggagaaaaacaggaggctaaggagaatggaacaaaccttacctttattggagacaaaaccgcaatgcatgaaccattgcaaacttggcaagatgcaccatacatttttattgtacatattggcatttcatcctcaaaggaatcatcaaaagaaaattcactgagtaatctttttaccatgactgttgaagtgaagggtccctatgaatacctcacacttgaagactatcccttgatgatttttttcatggtgatgtgtattgtatatgtcctgtttggtgttctgtggctggcatggtctgcctgctactggagagatctcctgagaattcagttttggattggtgctgtcatcttcctgggaatgcttgagaaagctgtcttctatgcggaatttcagaatatccgatacaaaggagaatctgtccagggtgctttgatccttgcagagctgctttcagcagtgaaacgctcactggctcgaaccctggtcatcatagtcagtctgggatatggcatcgtcaagccacgccttggagtcactcttcataaggttgtagtagcaggagccctctatcttttgttctctggcatggaaggggtcctcagagttactggggcccagactgatcttgcttccttggcctttatccccttggctttcctagacactgccttgtgctggtggatatttattagcctgactcaaacaatgaagctattaaaacttcggaggaacattgtaaaactctctttgtatcggcatttcaccaacacgcttattttggcagtggcagcatccattgtgtttatcatctggacaaccatgaagttcagaatagtgacatgtcagtcggactggcgggagctgtgggtagacgatgccatctggcgcttgctgttctccatgatcctctttgtcatcatggttctctggcgaccatctgcaaacaaccagaggtttgccttttcaccattgtctgaggaagaggaggaggatgaacaaaaggagcctatgctgaaagaaagctttgaaggaatgaaaatgagaagtaccaaacaagaacccaatggaaatagtaaagttaacaaagcacaggaagatgatttgaagtgggtagaagagaatgttccttcttctgtgacagatgtagcacttccagcccttctggattcagatgaggaacgaatgatcacacactttgaaaggtccaaaatggagtaaggaatgggaagatttgcagttaaagatggctaccatcagggaagagatcagcatctgtgtcagtcttctgtacggctccatgggattaaaggaagcaatgacatcctgatctgttccttgatctttgggcattggagttggcgagaggtgtcagaacaaagagaacatcttactgaaaacaagttcataagatgagaaaaatctacgagcttcttatttacaacactgctgccccctttcctcccagactctgacatggatgttcatgcaacttaagtgtgttgttcctgaactttctgtaatgtttcattttttaaatctgacaaactaaaaagtttaacgtcttctaaaagattgtcatcaacaccataatatgtaatctccaggagcaactgcctgtaatttttatttatttagggagttacataggtgatgggggaaattgttaactacctttcattttcctgggaagtcaaggttacatcttgcagaggttgttttgagaaaaaagggcccttctgagttaaggagccatagttctatcaatgatcaaaagaaaaaaaaaaaaaagagaaactgttacagtatgattcagatcatttaaaaaagcaaaatcaagtgcaattttgtttacaaatggtgtatattaaagatttttctatttcagatgtactttaaagagaaatattagcttaactcttttgacatctgctattgtgacacatcccattgctggcaatgtggtgcacactccgaaacttttaactactgttttgtaagcctccaagggtggcattgcagggtccttaggcaatgttttgtttgcctttatgcagagaggtgctccaagtgctgtgattgagcaccgtgctagaggaactgtaatgcttcagaagttgtagcttatacaaaggaaacaggtcctgctggcttaatttaaacagttattgcatgaagtagcgtggaggccctggactgctgctcgttctttaggatggactgttctggtatctggtattggtttagagactgttaataagggacatcacaaggtgatgggattcatttgaagcactctatttctgttttaatggttttatccaattttgccttcccaagatttttgttctacataaaaagttcatgccactttttaatataaaaaaatttaacaaaattaa

SEQ ID NO: 355853 - DNA, 3397 bp, Homo sapiens
agacgactgtctgagagaggggccgctacgccgcacagcaaacaagctccgcgacgtttccaggacccggataatcccgcccttagagcagagccggaagaaggcgggacgaaccggaagagggtgaaatgctttcggtaggcactccacggctgtgaagatggcggcggctgcgtggcttcaggtgttgcctgtcattcttctgcttctgggagctcacccgtcaccactgtcgtttttcagtgcgggaccggcaaccgtagctgctgccgaccggtccaaatggcacattccgataccgtcggggaaaaattattttagttttggaaagatcctcttcagaaataccactatcttcctgaagtttgatggagaaccttgtgacctgtctttgaatataacctggtatctgaaaagcgctgattgttacaatgaaatctataacttcaaggcagaagaagtagagttgtatttggaaaaacttaaggaaaaaagaggcttgtctgggaaatatcaaacatcatcaaaattgttccagaactgcagtgaactctttaaaacacagaccttttctggagattttatgcatcgactgcctcttttaggagaaaaacaggaggctaaggagaatggaacaaaccttacctttattggagacaaaaccgcaatgcatgaaccattgcaaacttggcaagatgcaccatacatttttattgtacatattggcatttcatcctcaaaggaatcatcaaaagaaaattcactgagtaatctttttaccatgactgttgaagtgaagggtccctatgaatacctcacacttgaagactatcccttgatgatttttttcatggtgatgtgtattgtatatgtcctgtttggtgttctgtggctggcatggtctgcctgctactggagagatctcctgagaattcagttttggattggtgctgtcatcttcctgggaatgcttgagaaagctgtcttctatgcggaatttcagaatatccgatacaaaggagaatctgtccagggtgctttgatccttgcagagctgctttcagcagtgaaacgctcactggctcgaaccctggtcatcatagtcagtctgggatatggcatcgtcaagccacgccttggagtcactcttcataaggttgtagtagcaggagccctctatcttttgttctctggcatggaaggggtcctcagagttactggggcccagactgatcttgcttccttggcctttatccccttggctttcctagacactgccttgtgctggtggatatttattagcctgactcaaacaatgaagctattaaaacttcggaggaacattgtaaaactctctttgtatcggcatttcaccaacacgcttattttggcagtggcagcatccattgtgtttatcatctggacaaccatgaagttcagaatagtgacatgtcagtcggactggcgggagctgtgggtagacgatgccatctggcgcttgctgttctccatgatcctctttgtcatcatggttctctggcgaccatctgcaaacaaccagaggtttgccttttcaccattgtctgaggaagaggaggaggatgaacaaaaggagcctatgctgaaagaaagctttgaaggaatgaaaatgagaagtaccaaacaagaacccaatggaaatagtaaagttaacaaagcacaggaagatgatttgaagtgggtagaagagaatgttccttcttctgtgacagatgtagcacttccagcccttctggattcagatgaggaacgaatgatcacacactttgaaaggtccaaaatggagtaaggaatgggaagatttgcagttaaagatggctaccatcagggaagagatcagcatctgtgtcagtcttctgtacggctccatgggattaaaggaagcaatgacatcctgatctgttccttgatctttgggcattggagttggcgagaggtgtcagaacaaagagaacatcttactgaaaacaagttcataagatgagaaaaatctacgagcttcttatttacaacactgctgccccctttcctcccagactctgacatggatgttcatgcaacttaagtgtgttgttcctgaactttctgtaatgtttcattttttaaatctgacaaactaaaaagtttaacgtcttctaaaagattgtcatcaacaccataatatgtaatctccaggagcaactgcctgtaatttttatttatttagggagttacataggtgatgggggaaattgttaactacctttcattttcctgggaagtcaaggttacatcttgcagaggttgttttgagaaaaaagggcccttctgagttaaggagccatagttctatcaatgatcaaaagaaaaaaaaaaaaaagagaaactgttacagtatgattcagatcatttaaaaaagcaaaatcaagtgcaattttgtttacaaatggtgtatattaaagatttttctatttcagatgtactttaaagagaaatattagcttaactcttttgacatctgctattgtgacacatcccattgctggcaatgtggtgcacactccgaaacttttaactactgttttgtaagcctccaagggtggcattgcagggtccttaggcaatgttttgtttgcctttatgcagagaggtgctccaagtgctgtgattgagcaccgtgctagaggaactgtaatgcttcagaagttgtagcttatacaaaggaaacaggtcctgctggcttaatttaaacagttattgcatgaagtagcgtggaggccctggactgctgctcgttctttaggatggactgttctggtatctggtattggtttagagactgttaataagggacatcacaaggtgatgggattcatttgaagcactctatttctgttttaatggttttatccaattttgccttcccaagatttttgttctacataaaaagttcatgccactttttaatataaaaaaatttaacaaaattaatgtatttttctcatttttttcaaactttttctaaagactctttctgtcaaactcatgaaaaatttctttctatggcttttattctagattgtcttattttctgttaaaaccaatgaccacatgaccacaatcttcactaactcatactgcagtgaaagtgttaacccttaggtagtttctctacaactctttgctatggtgatttttaaaaaagtttcctaggaagtatctctgaggaacagcaatctgaagaactgactatattctcatgctaagtcattagccaaaagctggtggtattgttgcatgctgctattgcatattaaaacgtagcagatgaataatagttgtaatgcagcaggatagttggtcaaattatttttttagg

SEQ ID NO: 355854 - DNA, 1795 bp, Homo sapiens
atatgtattttttatttcccttgactctgatagtaaacctggccctctcagcagttgacgcctgtgttattttatggatatttattagcctgactcaaacaatgaagctattaaaacttcggaggaacattgtaaaactctctttgtatcggcatttcaccaacacgcttattttggcagtggcagcatccattgtgtttatcatctggacaaccatgaagttcagaatagtgacatgtcagtcggactggcgggagctgtgggtagacgatgccatctggcgcttgctgttctccatgatcctctttgtcatcatggttctctggcgaccatctgcaaacaaccagaggtttgccttttcaccattgtctgaggaagaggaggaggatgaacaaaaggagcctatgctgaaagaaagctttgaaggaatgaaaatgagaagtaccaaacaagaacccaatggaaatagtaaagttaacaaagcacaggaagatgatttgaagtgggtagaagagaatgttccttcttctgtgacagatgtagcacttccagcccttctggattcagatgaggaacgaatgatcacacactttgaaaggtccaaaatggagtaaggaatgggaagatttgcagttaaagatggctaccatcagggaagagatcagcatctgtgtcagtcttctgtacggctccatgggattaaaggaagcaatgacatcctgatctgttccttgatctttgggcattggagttggcgagaggtgtcagaacaaagagaacatcttactgaaaacaagttcataagatgagaaaaatctacgagcttcttatttacaacactgctgccccctttcctcccagactctgacatggatgttcatgcaacttaagtgtgttgttcctgaactttctgtaatgtttcattttttaaatctgacaaactaaaaagtttaacgtcttctaaaagattgtcatcaacaccataatatgtaatctccaggagcaactgcctgtaatttttatttatttagggagttacataggtgatgggggaaattgttaactacctttcattttcctgggaagtcaaggttacatcttgcagaggttgttttgagaaaaaagggcccttctgagttaaggagccatagttctatcaatgatcaaaagaaaaaaaaaaaaaagagaaactgttacagtatgattcagatcatttaaaaaagcaaaatcaagtgcaattttgtttacaaatggtgtatattaaagatttttctatttcagatgtactttaaagagaaatattagcttaactcttttgacatctgctattgtgacacatcccattgctggcaatgtggtgcacactccgaaacttttaactactgttttgtaagcctccaagggtggcattgcagggtccttaggcaatgttttgtttgcctttatgcagagaggtgctccaagtgctgtgattgagcaccgtgctagaggaactgtaatgcttcagaagttgtagcttatacaaaggaaacaggtcctgctggcttaatttaaacagttattgcatgaagtagcgtggaggccctggactgctgctcgttctttaggatggactgttctggtatctggtattggtttagagactgttaataagggacatcacaaggtgatgggattcatttgaagcactctatttctgttttaatggttttatccaattttgccttcccaagatttttgttctacataaaaagttcatgccactttttaatataaaaaaatttaacaaaattaa

SEQ ID NO: 355855 - DNA, 2377 bp, Homo sapiens
  misc_feature (2263)..(2263): n is a, c, g, or t
  misc_feature (2265)..(2265): n is a, c, g, or t
agacgactgtctgagagaggggccgctacgccgcacagcaaacaagctccgcgacgtttccaggacccggataatcccgcccttagagcagagccggaagaaggcgggacgaaccggaagagggtgaaatgctttcggtaggcactccacggctgtgaagatggcggcggctgcgtggcttcaggtgttgcctgtcattcttctgcttctgggagctcacccgtcaccactgtcgtttttcagtgcgggaccggcaaccgtagctgctgccgaccggtccaaatggcacattccgataccgtcggggaaaaattattttagttttggaaagatcctcttcagaaataccactatcttcctgaagtttgatggagaaccttgtgacctgtctttgaatataacctggtatctgaaaagcgctgattgttacaatgaaatctataacttcaaggcagaagaagtagagttgtatttggaaaaacttaaggaaaaaagaggcttgtctgggaaatatcaaacatcatcaaaattgttccagaactgcagtgaactctttaaaacacagaccttttctggagattttatgcatcgactgcctcttttaggagaaaaacaggaggctaaggagaatggaacaaaccttacctttattggagacaaaaccgcaatgcatgaaccattgcaaacttggcaagatgcaccatacatttttattgtacatattggcatttcatcctcaaaggaatcatcaaaagaaaattcactgagtaatctttttaccatgactgttgaagtgaagggtccctatgaatacctcacacttgaagactatcccttgatgatttttttcatggtgatgtgtattgtatatgtcctgtttggtgttctgtggctggcatggtctgcctgctactggagagatctcctgagaattcagttttggattggtgctgtcatcttcctgggaatgcttgagaaagctgtcttctatgcggaatttcagaatatccgatacaaaggagaatctgtccagggtgctttgatccttgcagagctgctttcagcagtgaaacgctcactggctcgaaccctggtcatcatagtcagtctgggatatggcatcgtcaagccacgccttggagtcactcttcataaggttgtagtagcaggagccctctatcttttgttctctggcatggaaggggtcctcagagttactggggcccagactgatcttgcttccttggcctttatccccttggctttcctagacactgccttgtgctggtggatatttattagcctgactcaaacaatgaagctattaaaacttcggaggaacattgtaaaactctctttgtatcggcatttcaccaacacgcttattttggcagtggcagcatccattgtgtttatcatctggacaaccatgaagttcagaatagtgacatgtcagtcggactggcgggagctgtgggtagacgatgccatctggcgcttgctgttctccatgatcctctttgtcatcatggttctctggcgaccatctgcaaacaaccagaggtttgccttttcaccattgtctgaggaagaggaggaggatgaacaaaaggagcctatgctgaaagaaagctttgaaggaatgaaaatgagaagtaccaaacaagaacccaatggaaatagtaaagttaacaaagcacaggaagatgatttgaagtgggtagaagagaatgttccttcttctgtgacagatgtagcacttccagcccttctggattcagatgaggaacgaatgatcacacactttgaaaggtccaaaatggagtaaggaatgggaagatttgcagttaaagatggctaccatcagggaagagatcagcatctgtgtcagtcttctgtacggctccatgggattaaaggaagcaatgacatcctgatctgttccttgatctttgggcattggagttggcgagaggtgtcagaacaaagagaacatcttactgaaaacaagttcataagatgagaaaaatctacgagcttcttatttacaacactgctgccccctttcctcccagactctgacatggatgttcatgcaacttatttagggagttacataggtgatgggggaaattgttaactacctttcattttcctgggaagtcaaggttacatcttgcagaggttgttttgagaaaaaagggcccttctgagttaaggagccatagttctatcaatgatcaaaagaaaaaaaaaaaaaaananaaaaaaaaaattctcttttcctcaaattaaaaaagaggaagagtttttacagagattataaactatttcagggcttagttacctctaattaaacctttctgcgttacaagaa

SEQ ID NO: 355856 - DNA, 1673 bp, Homo sapiens
  misc_feature (1600)..(1600): n is a, c, g, or t
  misc_feature (1613)..(1613): n is a, c, g, or t
  misc_feature (1634)..(1634): n is a, c, g, or t
  misc_feature (1647)..(1647): n is a, c, g, or t
  misc_feature (1649)..(1649): n is a, c, g, or t
  misc_feature (1668)..(1668): n is a, c, g, or t
agacgactgtctgagagaggggccgctacgccgcacagcaaacaagctccgcgacgtttccaggacccggataatcccgcccttagagcagagccggaagaaggcgggacgaaccggaagagggtgaaatgctttcggtaggcactccacggctgtgaagatggcggcggctgcgtggcttcaggtgttgcctgtcattcttctgcttctgggagctcacccgtcaccactgtcgtttttcagtgcgggaccggcaaccgtagctgctgccgaccggtccaaatggcacattccgataccgtcggggaaaaattattttagttttggaaagatcctcttcagaaataccactatcttcctgaagtttgatggagaaccttgtgacctgtctttgaatataacctggtatctgaaaagcgctgattgttacaatgaaatctataacttcaaggcagaagaagtagagttgtatttggaaaaacttaaggaaaaaagaggcttgtctgggaaatatcaaacatcatcaaaattgttccagaactgcagtgaactctttaaaacacagaccttttctggagattttatgcatcgactgcctcttttaggagaaaaacaggaggctaaggagaatggaacaaaccttacctttattggagacaaaaccgcaatgcatgaaccattgcaaacttggcaagatgcaccatacatttttattgtacatattggcatttcatcctcaaaggaatcatcaaaagaaaattcactgagtaatctttttaccatgactgttgaagtgaagggtccctatgaatacctcacacttgaagactatcccttgatgatttttttcatggtgatgtgtattgtatatgtcctgtttggtgttctgtggctggcatggtctgcctgctactggagagatctcctgagaattcagttttggattggtgctgtcatcttcctgggaatgcttgagaaagctgtcttctatgcggaatttcagaatatccgatacaaaggagaatctgtccagggtgctttgatccttgcagagctgctttcagcagtgaaacgctcactggctcgaaccctggtcatcatagtcagtctgggatatggcatcgtcaagccacgccttggagtcactcttcataaggttgtagtagcaggagccctctatcttttgttctctggcatggaaggggtcctcagagttactggggcccagactgatcttgcttccttggcctttatccccttggctttcctagacactgccttgtgctggtggatatttattagcctgactcaaacaatgaagctattaaaacttcggaggaacattgtaaaactctctttgtatcggcatttcaccaacacgcttattttggcagtggcagcatccattgtgtttatcatctggacaaccatgaagttcagaatagtgacatgtcagtcggactggcgggagctgtgggtagacgatgccatctggcgcttgctgttctccatgatcctctttgtcatcatggttctctggcgaccatctgcaaacaaccagagttgctttcccatgtctgaggagagaggagatgaccanaggagctatgtgnaagaagcttgaggatgaatgngagtccaacagancnatggatagtagttacaagncagag

SEQ ID NO: 355857 - DNA, 1526 bp, Homo sapiens
agacgactgtctgagagaggggccgctacgccgcacagcaaacaagctccgcgacgtttccaggacccggataatcccgcccttagagcagagccggaagaaggcgggacgaaccggaagagggtgaaatgctttcggtaggcactccacggctgtgaagatggcggcggctgcgtggcttcaggtgttgcctgtcattcttctgcttctgggagctcacccgtcaccactgtcgtttttcagtgcgggaccggcaaccgtagctgctgccgaccggtccaaatggcacattccgataccgtcggggaaaaattattttagttttggaaagatcctcttcagaaataccactatcttcctgaagtttgatggagaaccttgtgacctgtctttgaatataacctggtatctgaaaagcgctgattgttacaatgaaatctataacttcaaggcagaagaagtagagttgtatttggaaaaacttaaggaaaaaagaggcttgtctgggaaatatcaaacatcatcaaaattgttccagaactgcagtgaactctttaaaacacagaccttttctggagattttatgcatcgactgcctcttttaggagaaaaacaggaggctaaggagaatggaacaaaccttacctttattggagacaaaaccgcaatgcatgaaccattgcaaacttggcaagatgcaccatacatttttattgtacatattggcatttcatcctcaaaggaatcatcaaaagaaaattcactgagtaatctttttaccatgactgttgaagtgaagggtccctatgaatacctcacacttgaagactatcccttgatgatttttttcatggtgatgtgtattgtatatgtcctgtttggtgttctgtggctggcatggtctgcctgctactggagagatctcctgagaattcagttttggattggtgctgtcatcttcctgggaatgcttgagaaagctgtcttctatgcggaatttcagaatatccgatacaaaggagaatctgtccagggtgctttgatccttgcagagctgctttcagcagtgaaacgctcactggctcgaaccctggtcatcatagtcagtctgggatatggcatcgtcaagccacgccttggagtcactcttcataaggttgtagtagcaggagccctctatcttttgttctctggcatggaaggggtcctcagagttactggggcccagactgatcttgcttccttggcctttatccccttggctttcctagacactgccttgtgctggtggatatccttctcattggcttgtttgatgatggtccattttctccccttggagatgggtttccattgatctttctgcaaagagtttttatcagttttgttaattactccttagtgtggggaacagtgcatgctaagtcttaacaacctgagggttcaggtaagcagttttttttgtttctatttttttaattttaaaaatcaaattggaaattggtgactgtggaccgagctcgaga

SEQ ID NO: 355858 - DNA, 3641 bp, Homo sapiens
  misc_feature (1442)..(1442): n is a, c, g, or t
  misc_feature (1480)..(1480): n is a, c, g, or t
  misc_feature (2758)..(2758): n is a, c, g, or t
  misc_feature (3357)..(3357): n is a, c, g, or t
agacgactgtctgagagaggggccgctacgccgcacagcaaacaagctccgcgacgtttccaggacccggataatcccgcccttagagcagagccggaagaaggcgggacgaaccggaagagggtgaaatgctttcggtaggcactccacggctgtgaagatggcggcggctgcgtggcttcaggtgttgcctgtcattcttctgcttctgggagctcacccgtcaccactgtcgtttttcagtgcgggaccggcaaccgtagctgctgccgaccggtccaaatggcacattccgataccgtcgttgatggagaaccttgtgacctgtctttgaatataacctggtatctgaaaagcgctgattgttacaatgaaatctataacttcaaggcagaagaagtagagttgtatttggaaaaacttaaggaaaaaagaggcttgtctgggaaatatcaaacatcatcaaaattgttccagaactgcagtgaactctttaaaacacagaccttttctggagattttatgcatcgactgcctcttttaggagaaaaacaggaggctaaggagaatggaacaaaccttacctttattggagacaaaaccattcagatgcctttcttgaagaaacatttcttggattgttgaaagactttaataatttccaaagttccaaaagttgattttgatagtttttgccagtgttttcgttgcttttatggatgagtagattttcagagtttcttattctgccattctgaaagtgtctcactacctaaaccccagttttatttgtacagaattttaactgaatgtaagttaggcatgacagtctttgttaatttttttaaacaaaagatagccattaggactgggtacagtggctcacgcctgtaatgccaacactttgggaggccaaggtgggcagatgacttgaggttgggagttcgagaccagcttggccaatgtggtgaaactttgtctttactaaaaatacaaaaattagttgctcatggtggcaggcacctgtaatccaagctactcaggaggctgaggcaggagaatcgcgtgaacttgggaggtggaggctgcagtgagctgagatcacgctactgcactccagcctgggcagccagtgagattccatctcaaaaaaaaaagaaaaaagatattcattggattttctcttactaataggtatatattcactgtgaaaatggagacgatatacataaatgaaaagaagaaaatagtaatctataataccatgcagtgatatatttatcttcctattcttttgtatatgggcatgtttatattattttaaaaagggaatcttagagtatgtattatatgacttttttttgtagcttagcaatataacatggacatgtcgtcagtttggtaaatattgtattgcatcgttacttaaatgcttgtatagngtcttattgtatgagtacattgcaatttgttcaattcnctgttcttgaacttttatgagtttcattatcttggaattttatgcagtgttgtgattaatattttaactacatttgcttttaagtctttattttctgatctcagaagaattgtatattgggataagtttttaattctataacttaaaagtaaaaatcctttgtaattttatgttctaatagttttagcagtttggtgtgattacacagagcacatgcatattaaccaaaataagatcatattatataccattgtataattttttctttttattaccaaattggtacattgaatactacttcacctttttatggctgcttagtgttccattttattatgattttaataactcccaattgatgaacattggggttgttcccaaatttcccctattatgggtaaagttatgttcataatgtctagctatatttctgtgtacatttataatctttaggctaaattcctggaggtagaattgctagatccacatgtatgcacagtttaaaggtgctttttcatagcaatttatggccccaagaaagtgagagtgagtgtctttgtttatgttgctatgaaaggacacctggagctgggtaatttataaagaaaagaggtttatttggctcactgttctgtgggctatgaaagaagcatggtgccggcatctgtttctagtgagggcttcaggctgtttctactcatggtggaaggtgaaggggggagcctgtgtgtgcagatcacctggcaagagaggaagaaggaaagagggaggaggaggagaggaggtagtgggctttttttttaataatcaaggaaccaatagagggataactcattactgaaaggacagtggcaccaagccattcattagggattggctcccatgacccaaacacctctctctagaattcacctcaaacattggggatcaaatttcaatatgaaatttgggaggacagatatctaaaccatagcagtgagtttccatctttcctcacaaaaacaatggctgtcatcatttaaaatagattttatgcagtttgtctagttaagcaacaatttgttcttgtaaattgtatttaaaaagttatcgttaagccaggcgctgtggctcacacctgtaaccccagcaccttgggaggccacagcaggcagatcgctagagcttacgagtttgagaccaccctgggcaatatggtgaaacctcgtctctacaaaaaatggaaaaattagccagaaggtggcacgtgcacctgtagtccccgctacttgggagacngaagtgggaggatggcttgagtctgggaggcagaggttgcagtgagccaaagtcacaccacttcactctaggcgatagagccatacctcgtctctaaaacaaaaacaacagcaaaaaaattattgttgagggtgaaccttcatttatatggatattggcacttgtgctttcttcagttgtcttctgtgcacagcatactttgagttctactcaaggcttgagtcttgttacagtgattaaaactggctgaaaggtgagcctgttgaataccacaagtaatatttaggaatacttagtcaaaatatagtcaaaagaaatgaaagagttatctatcttttgatctttcttcctgaaaatttggtccaaggcaaataccttataatcctatttaaagaatattcacaggctgggttcagtggtaatctcagcactttttaaggcccaaggtgggtgaatcacttgaagccagggtttgagactagtctggtcaacatgacaaaaccctatctctactaaaaatgcaaaaattagcttggtgtggtggggtacacctgtaatcccagctacttgggtgcatgaggcctgagaatcacttgagnccaagaagcagaggttgtagtgagccatgattgcaccactgcactccagcctgggtgacaaaatgagactctgtctcaaaaagcaaaaaggatactcacaaattcagtacctccatcctatttcattaaagctctgattaaacatatatgtttatgggccgggtgtggtggctcacacctgtgatcccagcactttgggaggccaaggtgggtggatcacctgatgtcaggagttcgagatcagcctggcaaacatggtgaaacctcatctctactaaaaatac

SEQ ID NO: 355859 - DNA, 544 bp, Homo sapiens
tttcagatgacaaatgtcgacctaaatctgataactggcttattatgtaatttattggtgttattatagtagagattggtaatctacagtaagattttcagttaggatttgagattatgataataactaatagaatatttctaaattggaattagaagattgttgtatgacagagagtcaggacttgccatttggcaaacatcaaagtcattgtttggtgtgtaatagtacaaaatcatcttgcttaacagagaaaggatatctgttgctcccgaatgaaacaatttttctgaaatagagggcccagaattggtctctgacaattaataaagacatcaaagatagcaaaatgatttttatatcttagggccaatactaccaatttaataattaaaacaagttctggtgagctctgaacttggcagaattggtggcaacatagactttggattttccaaattccccacataaaacaaaggggatcaactagatagaaaaaccagaaacctttggaaatatctgttaaaaaaagaaaaaaaaaact

SEQ ID NO: 355860 - DNA, 473 bp, Homo sapiens
cccaccacaacacacacaccaacccccacaataggctagtacaggctggtgtgctcgcgtcgcatttggccgcctccctaccgctccaagcccagccctcagccatggcatgccccctggatcaggccattggcctcctcgtggccatcttccacaagtactccggcagggagggtgacaagcacaccctgagcaagaaggagctgaaggagctgatccagaaggagctcaccattggctcgaagctgcaggatgctgaaattgcaaggctgatggaagacttggaccggaacaaggaccaggaggtgaacttccaggagtatgtcaccttcctgggggccttggctttgatctacaatgaagccctcaagggctgaaaataaatagggaagatggagacaccctctgggggtcctctctgagtcaaatccagtggtgggtaattgtacaataaattttttttggtcaaattt

SEQ ID NO: 355861 - DNA, 442 bp, Homo sapiens
ttcgcccacgcgtcgcccgcggcgtcggtcgcatttggccgcctccctaccgctccaagcccagccctcagccatggcatgccccctggatcaggccattggcctcctcgtggccatcttccacaagtactccggcagggagggtgacaagcacaccctgagcaagaaggagctgaaggagctgatccagaaggagctcaccattggctcgaagctgcaggatgctgaaattgcaaggctgatggaagacttggaccggaacaaggaccaggaggtgaacttccaggagtatgtcaccttcctgggggccttggctttgatctacaatgaagccctcaagggctgaaaataaatagggaagatggagacaccctctgggggtcctctctgagtcaaatccagtggtgggtaattgtacaataaattttttttggtcaaattt

SEQ ID NO: 355862 - DNA, 538 bp, Homo sapiens
agcggaaactgagcaaactgagctgcgcagatgaggggagactcgtcaccaggcgtgcagtgggcactgctgggctcccccatcccgtcctaacccggaacagccccgggcaggaggcgtggaaagtcgagggggtaaaccgcgaatgctccaagcccagccctcagccatggcatgccccctggatcaggccattggcctcctcgtggccatcttccacaagtactccggcagggagggtgacaagcacaccctgagcaagaaggagctgaaggagctgatccagaaggagctcaccattggctcgaagctgcaggatgctgaaattgcaaggctgatggaagacttggaccggaacaaggaccaggaggtgaacttccaggagtatgtcaccttcctgggggccttggctttgatctacaatgaagccctcaagggctgaaaataaatagggaagatggagacaccctctgggggtcctctctgagtcaaatccagtggtgggtaattgtacaataaattttttttggtcaaattt

SEQ ID NO: 355863 - DNA, 436 bp, Homo sapiens
tctcgtgccgaattcggcacgagcgcatttggccgcctccctaccgctccaagcccagccctcagccatggcatgccccctggatcaggccattggcctcctcgtggccatcttccacaagtactccggcagggagggtgacaagcacaccctgagcaagaaggagctgaaggagctgatccagaaggagctcaccattggctcgaagctgcaggatgctgaaattgcaaggctgatggaagacttggaccggaacaaggaccaggaggtgaacttccaggagtatgtcaccttcctgggggccttggctttgatctacaatgaagccctcaagggctgaaaataaatagggaagatggagacaccctctgggggtcctctctgagtcaaatccagtggtgggtaattgtacaataaattttttttggtcaaattt

SEQ ID NO: 355864 - DNA, 471 bp, Homo sapiens
gtcctcaggacctcggatgattttggagccaaagctggggctgttgccacaaaagtagacatgcgggccgcctccctaccgctccaagcccagccctcagccatggcatgccccctggatcaggccattggcctcctcgtggccatcttccacaagtactccggcagggagggtgacaagcacaccctgagcaagaaggagctgaaggagctgatccagaaggagctcaccattggctcgaagctgcaggatgctgaaattgcaaggctgatggaagacttggaccggaacaaggaccaggaggtgaacttccaggagtatgtcaccttcctgggggccttggctttgatctacaatgaagccctcaagggctgaaaataaatagggaagatggagacaccctctgggggtcctctctgagtcaaatccagtggtgggtaattgtacaataaattttttttggtcaaattt

SEQ ID NO: 355865 - DNA, 1216 bp, Homo sapiens
  misc_feature (728)..(728): n is a, c, g, or t
  misc_feature (744)..(744): n is a, c, g, or t
  misc_feature (746)..(747): n is a, c, g, or t
agcggaaactgagcaaactgagctgcgcagatgaggggagactcgtcaccaggcgtgcagtgggcactgctgggctcccccatcccgtcctaacccggaacagccccgggcaggaggcgtggaaagtcgagggggtaaaccgcgaatgtgcgttgtgtaagccacggcgcagggtggggcgcgggcgggacttgggcgggcggggtgggcttggccgagctggcctccggggcaccgaccgctataaggccagtcggactgcgacacagcccatcccctcgaccgctcgcgtcgcatttggccgcctccctaccgctccaagcccagccctcagccatggcatgccccctggatcaggccattggcctcctcgtggccatcttccacaagtactccggcagggagggtgacaagcacaccctgagcaagaaggagctgaaggagctgatccagaaggagctcaccattggctcgaagctgcaggatgctgaaattgcaaggctgatggaagacttggaccggaacaaggaccaggaggtgaacttccaggagtatgtcaccttcctgggggccttggctttgatctacaatgaagccctcaagggctgaaaataaatagggaagatggagacaccctctgggggtcctctctgagtcaaatccagtggtgggtaattgtacaataaattttttttggtcaaattttaacaacacacaccacccacacncaacaccaccacaaananncaccaacctccacaacacaaaaaaagacacaaacaaaacaacacaccgcacaccaacaaaacaaaccgacaaacaaaaagagaaggcgaaagagtagcaaacaacaacacaacgcgaataacagagaaacaaacagcacggagggagggcggcgcgagagctagagcaagagcgagcggcgggaggggcaaatcctccgcgcacagcagcgccggcatagtgggtgtcaaggtcggcgagcgcccgcacagggacagcagacaagcatagcaaacttcaacaaaagcccgcgagcgcagccgacgatatttgacaaagcacacaacacggaggggagggggagcaagaacaccggacagggcgactcgagaggggatcggacaactgtcgaagagagcgcgcagcacatcgccatagaatcgtgaggaccgcgcacacatcacaaggagacgtggcacatctcgagcgc

SEQ ID NO: 355866 - DNA, 950 bp, Homo sapiens
agcggaaactgagcaaactgagctgcgcagatgaggggagactcgtcaccaggcgtgcagtgggcactgctgggctcccccatcccgtcctaacccggaacagccccgggcaggaggcgtggaaagtcgagggggtaaaccgcgaatgtgcgttgtgtaagccacggcgcagggtggggcgcgggcgggacttgggcgggcggggtgggcttggccgagctggcctccggggcaccgaccgctataaggccagtcggactgcgacacagcccatcccctcgaccgctcgcgtcgcatttggccgcctccctaccgctccaagcccagccctcagccatggcatgccccctggatcaggccattggcctcctcgtggccatcttccacaagtactccggcagggagggtgacaagcacaccctgagcaagaaggagctgaaggagctgatccagaaggagctcaccattggctcgaagctgcaggatgctgaaattgcaaggctgatggaagacttggaccggaacaaggaccaggaggtgaacttccaggagtatgtcaccttcctgggggccttggctttgatctacaatgaagccctcaagggctgaaaataaatagggaagatggagacaccctctgggggtcctctctgagtcaaatccagtggtgggtaattgtacaataaattttttttggtcaaatttaaaaaaaaaaaaattgagatagttctctctctccccaagtaggtctacaagaaggctaattccccttatcattagaaagagcttaatcacccgtttcagtgatccaggacgcttattaaattcagttgccttaattgtgggttacctagatccgtgttaggcccctttgctaaacatgtcaaagaaaagctaagttaagtactaacgattctaaaagggctcagggaattgaaacggtttgacta

SEQ ID NO: 355867 - DNA, 388 bp, Homo sapiens
gcggccgcctactactactaaattcgcggccgcgtcgacggccattggcctcctcgtggccatcttccacaagtactccggcagggagggtgacaagcacaccctgagcaagaaggagctgaaggagctgatccagaaggagctcaccattggctcgaagctgcaggatgctgaaattgcaaggctgatggaagacttggaccggaacaaggaccaggaggtgaacttccaggagtatgtcaccttcctgggggccttggctttgatctacaatgaagccctcaagggctgaaaataaatagggaagatggagacaccctctgggggtcctctctgagtcaaatccagtggtgggtaattgtacaataaattttttttggtcaaattt

SEQ ID NO: 355868 - DNA, 754 bp, Homo sapiens
agaacaccttatgtctaacccactcttatgttctgacccaccctcgaccgctcgcgtcgcatttggccgcctccctaccgctccaagcccagccctcagccatggcatgccccctggatcaggccattggcctcctcgtggccatcttccacaagtactccggcagggagggtgacaagcacaccctgagcaagaaggagctgaaggagctgatccagaaggagctcaccattggctcgaagctgcaggatgctgaaattgcaaggctgatggaagacttggaccggaacaaggaccaggaggtgaacttccaggagtatgtcaccttcctgggggccttggctttgatctacaatgaagccctcaagggctgaaaataaatagggaagatggagacaccctctgggggtcctctctgagtcaaatccagtggtgggtaccattgtgatactaaaaaaaaaaaaaacacacgaacaaaccaaaaaaaaatgttgttgggcggcacgcggggacccagagaaaggtttcaaaaacaatctcgtgtgggggccgcgggggcccaggagatggtcaggtcgccactgtggcccacaacggggtccaaaagagaaacccgggggccggatagggggtgggtttccccaaataaaaaaaaggcggggggcacccgagcgcgtgtggaccaccccagaaggggggtcgagggcaacggggctacaccgggagcaagcgagcaaaaatcaggcgggggggt

SEQ ID NO: 355869 - DNA, 746 bp, Homo sapiens
aaaaggaaataggccaggtacgaggccggtggtaatcggcaccgaggggactgcgacacagcccatcccctcgaccgctcgcgtcgcatttggccgcctccctaccgctccaagcccagccctcagccatggcatgccccctggatcaggccattggcctcctcgtggccatcttccacaagtactccggcagggagggtgacaagcacaccctgagcaagaaggagctgaaggagctgatccagaaggagctcaccattggctcgaagctgcaggatgctgaaattgcaaggctgatggaagacttggaccggaacaaggaccaggaggtgaacttccaggagtatgtcaccttcctgggggccttggctttgatctacaatgaagccctcaagggctgaaaataaatagggaagatggagacaccctctgggggtcctctctgagtcaaatccagtggtgggtaattgtacaataaattttttttggtcaaatttaaaaaaaaaaaaaaaaaaaaaaaaaaaaaaaaaaaaaaaaaacacccgggggcatctttttgcgcgggggggggaaaaagggggtaagaaagtgggccgatgtgtgcacaaaggagtttcctctggtggaccaaattttcttgtgttcaccaggggggaaaattcgccggagatccccataataaggaggccgaaatatataattcagaaaaccccgggttacccgggattataggcgctggcgaaaag

SEQ ID NO: 355870 - DNA, 892 bp, Homo sapiens
tctcgtgccgaattcggcacgagcgcatttggccgcctccctaccgctccaagcccagccctcagccatggcatgccccctggatcaggccattggcctcctcgtggccatcttccacaagtactccggcagggagggtgacaagcacaccctgagcaagaaggagctgaaggagctgatccagaaggagctcaccattggctcgaagctgcaggatgctgaaattgcaaggctgatggaagacttggaccggaacaaggaccaggaggtgaacttccaggagtatgtcaccttcctgggggccttggctttgatctacaatgaagccctcaagggctgaaaataaatagggaagatggagacaccctctgggggtcctctctgagtcaaatccagtggtgggtaattgtacaataaattttttttggtcaaatttaaaaaaaaaaaaaaaaaaaaaaaaaaaaaaaaaaaaaaaaaaaaaaaaacacaccaaaaaacaaagggggggggacgacaaaaaaaacccccggggggggccacagaagaggacaacaccaagactggggaacaacaggcggacaaaagagggggcacaaaatacgcgacgaaaggcgcggggcgcgcacacaaaccgggacgagaggggaaccaccggaccagcgggaagagcgagagaaaagagccaccaacaaaagacggcggaggggggaggaacacacagaggggacaaaacaactccaacagaagagacaaaacaacgagccagagagaaaaacaaaaagcagtcagacggggcagacggggtccacacaaagcagagtcaacagagcggagcgccaagcaaaaagggtacaaacagacgaagcacataacagccaaaaaatatacacga

SEQ ID NO: 355871 - DNA, 679 bp, Homo sapiens
gtcctcaggacctcggatgattttggagccaaagctggggctgttgccacaaaagtagacatgcgggccgcctccctaccgctccaagcccagccctcagccatggcatgccccctggatcaggccattggcctcctcgtggccatcttccacaagtactccggcagggagggtgacaagcacaccctgagcaagaaggagctgaaggagctgatccagaaggagctcaccattggctcgaagctgcaggatgctgaaattgcaaggctgatggaagacttggaccggaacaaggaccaggaggtgaacttccaggagtatgtcaccttcctgggggccttggctttgatctacaatgaagccctcaagggctgaaaataaatagggaagatggagacaccctctgggggtcctctctgagtcaaatccagtggtgggtaattgtacaataaattttttttggtcaaatttaaaaaaaaaaaaaaaaaaacaaaaaaaaaaaatgggggggattaagggggggggggggaaaaaggggtacggaaggggccagggggcaaagggtgtccggtgacccaagtttttggggtcaaaggggggaaatggggggggcccccataagggggggcgaattaaatccgaaaaagccggggtacccgggttaggacgtggggaaaac

SEQ ID NO: 355872 - DNA, 614 bp, Homo sapiens
acatataccaactgtggtagtctgaattgtcctccaaagatatcaggccctgaaactggtgagttttacattatgaaaccaaaggtgtgattaagttgaggatcttgagatggaaggattatactggactgtccaggtgggagcggtcgacggacgcgtccgtcgaccgctcgcgtcgcatttggccgcctccctaccgctccaagcccagccctcagccatggcatgccccctggatcaggccattggcctcctcgtggccatcttccacaagtactccggcagggagggtgacaagcacaccctgagcaagaaggagctgaaggagctgatccagaaggagctcaccattggctcgaagctgcaggatgctgaaattgcaaggctgatggaagacttggaccggaacaaggaccaggaggtgaacttccaggagtatgtcaccttcctgggggccttggctttgatctacaatgaagccctcaagggctgaaaataaatagggaagatggagacaccctctgggggtcctctctgagtcaaatccagcggtcgacggacgcgtccgtcgaccgctattcactcaaggaaaggttggataggattgccaaata

SEQ ID NO: 355873 - DNA, 535 bp, Homo sapiens
agaggtgcctggtgcatctgactcacatttacccacattctgaggccctggtccacatgtagaccctgagctgtagacccactctcccagcgggtaggggatgcttccagccggatatccatctctccaaatgaggaccagtaactgagaagtagctgaggagaagcaatgccaaagtgacatgggtccttggtgatgagggagcacagagccacttgcagagaggattgcctgggagggggaaggggaagaatccagggttgtcatcaccactgagtatggatttcacattctaacacattagaagctgcaggatgctgaaattgcaaggctgatggaagacttggaccggaacaaggaccaggaggtgaacttccaggagtatgtcaccttcctgggggccttggctttgatctacaatgaagccctcaagggctgaaaataaatagggaagatggagacaccctctgggggtcctctctgagtcaaatccagtggtgggtaattgtacaataaattttttttggtcaaattt

SEQ ID NO: 355874 - DNA, 933 bp, Homo sapiens
  misc_feature (384)..(384): n is a, c, g, or t
  misc_feature (466)..(466): n is a, c, g, or t
aaaaggaaataggccaggtacgaggccggtggtaatcggcaccgaggggactgcgacacagcccatcccctcgaccgctcgcgtcgcatttggccgcctccctaccgctccaagcccagccctcagccatggcatgccccctggatcaggccattggcctcctcgtggccatcttccacaagtactccggcagggagggtgacaagcacaccctgagcaagaaggagctgaaggagctgatccagaaggagctcaccattggctcgaagctgcaggatgctgaaattgcaaggctgatggaagacttggaccggaactaatggacctaggagtgtgaatcttccatggagtatgtcatccttcctggagggcctttggctttgnatctacaagtgaaggcccgtcaacgggctgaaacataacagtagggatatatggcagacagccctctggcgggtcctctctngagtcagaagtccatgtggttggcgctaattgtagcaagtagacacttgttgtgtttcgtgtcaagagttgtaacagacaaccacaatataaacatagacgatagtagcacattgaaacacacgaaccagagacaagaagacatacaatgcggggcgggcgacccagagacgggtgcccctccagaggcgcgcgcgaactttgacagagccatgcaaccaggattcgtatgcgaggcatagaagtggggcgtgcccccacacatgaggggagcggcgccagtctaaagatcacaggcgagcgagcagatcggagtgccccggagcatgccaagcatagcattgggcgaggcgtgggcaaaataaggcggcgccaggcaagagcgggcatatggtcgagggaaaggcaccgacggcggcgggccaggcgggggcgacccattgttggggcgcaaaaatcatcccccaa

SEQ ID NO: 355875 - DNA, 1292 bp, Homo sapiens
agcggaaactgagcaaactgagctgcgcagatgaggggagactcgtcaccaggcgtgcagtgggcactgctgggctcccccatcccgtcctaacccggaacagccccgggcaggaggcgtggaaagtcgagggggtaaaccgcgaatgtgcgttgtgtaagccacggcgcagggtggggcgcgggcgggacttgggcgggcggggtgggcttggccgagctggcctccggggcaccgaccgctataaggccagtcggactgcgacacagcccatcccctcgaccgctcgcgtcgcatttggccgcctccctaccgtgagttctctccaggagccctgggtactttccagggccagctgccctcacgctgggggtccagccatcccctgcccagttcagccgctggatccagactggggccatctgtggcgctcccccgctggagggatagtcaggagcagcagtgctgtgccaggcaggccttgggctaagggatcgcaatggggtgtgctcttttggggtgcggaagggagtgccctgggtgtgtcattgccaccatgtgtggccctgtgaagctgtgtttaagctgcctttgcagcctccattcccctcccctgcccagccatactcctcaacttctggatcccctgaaggacagttctcagctgtgcccaaagctactgttcctatatgcttcttagaatccttaagccacctctcttgccttggccctagtgtgctctctccttccccttcaagccctgggctgtctcctgatgccattgtgtgtggcctgagactgggtggttccaaaggaggcggggctagtgcaggcagcattattggggtgtgtgggtgagaagtccttgctcccatggcactgactaggccctctgctgccagctccaagcccagccctcagccatggcatgccccctggatcaggccattggcctcctcgtggccatcttccacaagtactccggcagggagggtgacaagcacaccctgagcaagaaggagctgaaggagctgatccagaaggagctcaccattggctcgaagctgcaggatgctgaaattgcaaggctgatggaagacttggaccggaacaaggaccaggaggtgaacttccaggagtatgtcaccttcctgggggccttggctttgatctacaatgaagccctcaagggctgaaaataaatagggaagatggagacaccctctgggggtcctctctgagtcaaatccagtggtgggtaattgtacaataaattttttttggtcaaattt

SEQ ID NO: 355876 - DNA, 630 bp, Homo sapiens
agaacaccttatgtctaacccactcttatgttctgacccaccctcgaccgctcgcgtcgcatttggccgcctccctaccgtgagttctctccaggagccctgggtactttccagggccagctgccctcacgctgggggtccagccatcccctgcccagttcagccgctggatccagactggggccatctgtggcgctcccccgctggagggatagtcaggagcagcagtgctgtgccaggctccaagcccagccctcagccatggcatgccccctggatcaggccattggcctcctcgtggccatcttccacaagtactccggcagggagggtgacaagcacaccctgagcaagaaggagctgaaggagctgatccagaaggagctcaccattggctcgaagctgcaggatgctgaaattgcaaggctgatggaagacttggaccggaacaaggaccaggaggtgaacttccaggagtatgtcaccttcctgggggccttggctttgatctacaatgaagccctcaagggctgaaaataaatagggaagatggagacaccctctgggggtcctctctgagtcaaatccagtggtgggtaattgtacaataaattttttttggtcaaattt

SEQ ID NO: 355877 - DNA, 826 bp, Homo sapiens
cgggaagataacttcggcttctggtggtgggtgggtgatagactctcaaaatccaaagcataggttttttctgggtgtgtcattgccaccatgtgtggccctgtgaagctgtgtttaagctgcctttgcagcctccattcccctcccctgcccagccatactcctcaacttctggatcccctgaaggacagttctcagctgtgcccaaagctactgttcctatatgcttcttagaatccttaagccacctctcttgccttggccctagtgtgctctctccttccccttcaagccctgggctgtctcctgatgccattgtgtgtggcctgagactgggtggttccaaaggaggcggggctagtgcaggcagcattattggggtgtgtgggtgagaagtccttgctcccatggcactgactaggccctctgctgccagctccaagcccagccctcagccatggcatgccccctggatcaggccattggcctcctcgtggccatcttccacaagtactccggcagggagggtgacaagcacaccctgagcaagaaggagctgaaggagctgatccagaaggagctcaccattggctcgaagctgcaggatgctgaaattgcaaggctgatggaagacttggaccggaacaaggaccaggaggtgaacttccaggagtatgtcaccttcctgggggccttggctttgatctacaatgaagccctcaagggctgaaaataaatagggaagatggagacaccctctgggggtcctctctgagtcaaatccagtggtgggtaattgtacaataaattttttttggtcaaattt

SEQ ID NO: 355878 - DNA, 589 bp, Homo sapiens
acatataccaactgtggtagtctgaattgtcctccaaagatatcaggccctgaaactggtgagttttacattatgaaaccaaaggtgtgattaagttgaggatcttgagatggaaggattatactggactgtccaggtgggagcggtcgacggacgcgtccgtcgaccgctcgcgtcgcatttggccgcctccctaccgctccaagcccagccctcagccatggcatgccccctggatcaggccattggcctcctcgtggccatcttccacaagtactccggcagggagggtgacaagcacaccctgagcaagaaggagctgaaggagctgatccagaaggagctcaccattggctcgaagctgcaggatgctgaaattgcaaggctgatggaagacttggaccggaacaaggaccaggaggtgaacttccaggagtatgtcaccttcctgggggccttggctttgatctacaatgaagccctcaagggctgaaaataaatagggaagatggagacaccctctgggggtcctctctgagtcaaatccagtggtgggtaattgtacaataaattttttttggtcaaattt

SEQ ID NO: 355879 - DNA, 1048 bp, Homo sapiens
agcggaaactgagcaaactgagctgcgcagatgaggggagactcgtcaccaggcgtgcagtgggcactgctgggctcccccatcccgtcctaacccggaacagccccgggcaggaggcgtggaaagtcgagggggtaaaccgcgaatgtgcgttgtgtaagccacggcgcagggtggggcgcgggcgggacttgggcgggcggggtgggcttggccgagctggcctccggggcaccgaccgctataaggccagtcggactgcgacacagcccatcccctcgaccgctcgcgtcgcatttggccgcctccctaccgctccaagcccagccctcagccatggcatgccccctggatcaggccattggcctcctcgtggccatcttccacaagtactccggcagggagggtgacaagcacaccctgagcaagaaggagctgaaggagctgatccagaaggagctcaccattggctcgaagctgcaggatgctgaaattgcaaggctgatggaagacttggaccggaacaaggaccaggaggtgaacttccaggagtatgtcaccttcctgggggccttggctttgatctacaatgaagccctcaagggctgaaaataaatagggaagatggagacaccctctgggggtcctctctgagtcaaatccagtggtgggtaattgtacaataaattttttttggtcaaatttaaaaaaaaaaaaaaaaaaactcggagagactaggtgcatcccggagtcgtccaagcccggtttgaacggctccccggaagccaaccgggaacccattgggaagggccaacagggggaccggcatagggcctgagccgggaggtgcagcagaagcatggaagaaacaatatgatgcagatcgggagcagatccggatccaggggatcacacaacaagggccgaaagggcgcgtgggccggcccccaagccgggacgcgagaacttccagaacggcgctcaaggatggcagggagtactgggagccataatgcatgggcccagaggggaggcccaggagaggacg

SEQ ID NO: 355880 - DNA, 1205 bp, Homo sapiens
agcggaaactgagcaaactgagctgcgcagatgaggggagactcgtcaccaggcgtgcagtgggcactgctgggctcccccatcccgtcctaacccggaacagccccgggcaggaggcgtggaaagtcgagggggtaaaccgcgaatgtgcgttgtgtaagccacggcgcagggtggggcgcgggcgggacttgggcgggcggggtgggcttggccgagctggcctccggggcaccgaccgctataaggccagtcggactgcgacacagcccatcccctcgaccgctcgcgtcgcatttggccgcctccctaccgctccaagcccagccctcagccatggcatgccccctggatcaggccattggcctcctcgtggccatcttccacaagtactccggcagggagggtgacaagcacaccctgagcaagaaggagctgaaggagctgatccagaaggagctcaccattggctcgaagctgcaggatgctgaaattgcaaggctgatggaagacttggaccggaacaaggaccaggaggtgaacttccaggagtatgtcaccttcctgggggccttggctttgatctacaatgaagccctcaagggctgaaaataaatagggaagatggagacaccctctgggggtcctctctgagtcaaatccagtggtgggtaattgtacaataaattttttttggtcaaatttaaaaaaaaaaaaaaaaaaaaaaaaaaaaaaaaaaaaaaaagaaaaaaaaaaaaggggggggggcataaaagttcctctctcggggggggggccaacagcttacgaatatgaaccccggtttttgtgataaaagggggtcccctataataggggaggctgattattatttaagacgcaacgcaaggggagcgcggtttttaaaaaacgctgggtcgtggggaaaacagggggcacaccgtggggggaaatcttctggtgggagaaacgaacccctcatccctcgtggggggggggggccacctaccggggggcgaaacaactacccctcatcgaaaggataatataatagccccctacgaaggggacaccttatactcaaacttccaccggctgatattgtgggcggttcaccacaatgggcgctatatcgcgcggcgcggctagggacattctggccttgcgggattttctctctgacacaattttactcgcggggccga

SEQ ID NO: 355881 - DNA, 1403 bp, Homo sapiens
  misc_feature (1025)..(1026): n is a, c, g, or t
agcggaaactgagcaaactgagctgcgcagatgaggggagactcgtcaccaggcgtgcagtgggcactgctgggctcccccatcccgtcctaacccggaacagccccgggcaggaggcgtggaaagtcgagggggtaaaccgcgaatgtgcgttgtgtaagccacggcgcagggtggggcgcgggcgggacttgggcgggcggggtgggcttggccgagctggcctccggggcaccgaccgctataaggccagtcggactgcgacacagcccatcccctcgaccgctcgcgtcgcatttggccgcctccctaccgctccaagcccagccctcagccatggcatgccccctggatcaggccattggcctcctcgtggccatcttccacaagtactccggcagggagggtgacaagcacaccctgagcaagaaggagctgaaggagctgatccagaaggagctcaccattggctcgaagctgcaggatgctgaaattgcaaggctgatggaagacttggaccggaacaaggaccaggaggtgaacttccaggagtatgtcaccttcctgggggccttggctttgatctacaatgaagccctcaagggctgaaaataaatagggaagatggagacaccctctgggggtcctctctgagtcaaatccagtggtgggtaattgtacaataaattttttttggtcaaatttaaaaaaaaaaaaagaaaaaaaaaaaaaaaatttttgggcggccttgggccctagaaaaagtttttaaaacccttcggttgggggcggggccccggtgggtagggacctgggccaaaaggggtcccaaggaaaccgggggccatgagatcagcgggtcggggttcccccacccaaaaaaaaaacgcgcgggggcaccgcgggggggttctggaccaaaccccagaagggagctccgggagggccataaaggggtcctataccaaacagggggccccaagggaggcgctccgataatcaaattatccgcgcgcgcggggggnnaaacacacaccaaccacacaaagaaaaacacaacaaaatagaaaacaacacacgcacgagaaagagacacagaacagaggtgaaggagacaaacagaaaaagacagggagagaggcgaagaaggacagaggagagaggaaaaggagcgagggggagaggacaaaagatcgacgacggaaggacgacgagacagaaagcgacaggacacgcgagaacaagacaacacgcgagcaagggaaagccgcgagaaaggcaaaggagggagggaacagacagagaaagccaagaagaagacagagagaagcggcaaaggaggagaatgcgaaacagagcgaaaaagagagagactggagaaggacgaaaaaggagggagcaac

SEQ ID NO: 355882 - DNA, 1194 bp, Homo sapiens
agcggaaactgagcaaactgagctgcgcagatgaggggagactcgtcaccaggcgtgcagtgggcactgctgggctcccccatcccgtcctaacccggaacagccccgggcaggaggcgtggaaagtcgagggggtaaaccgcgaatgtgcgttgtgtaagccacggcgcagggtggggcgcgggcgggacttgggcgggcggggtgggcttggccgagctggcctccggggcaccgaccgctataaggccagtcggactgcgacacagcccatcccctcgaccgctcgcgtcgcatttggccgcctccctaccgctccaagcccagccctcagccatggcatgccccctggatcaggccattggcctcctcgtggccatcttccacaagtactccggcagggagggtgacaagcacaccctgagcaagaaggagctgaaggagctgatccagaaggagctcaccattggctcgaagctgcaggatgctgaaattgcaaggctgatggaagacttggaccggaacaaggaccaggaggtgaacttccaggagtatgtcaccttcctgggggccttggctttgatctacaatgaagccctcaagggctgaaaataaatagggaagatggagacaccctctgggggtcctctctgagtcaaatccagtggtgggtaattgtacaataaattttttttggtcaaatttaaaaaaaaaaaagcgcctcggaggcgtcagctgttcaagatgaagtgaacatctccttcccagccactggtgcagaaatcattgaagtggacgatgaacgcaaattcgtacttctatgagaagcgtatggcacagaagttgtgctgagctctgggtgaagaatggcaggggttatgtggccgaatcagggtggaaacgacagacaggttcccatgaagcaggtgtcttgacccatggcgggtccggctgctaatgaagaaggggatctgtgacagaccagggacggcgaagaacggaacatcagtcgggtggcttgcggtgaaactgggggctcaactggttctgggacacaggcgagggatccgcgggaggaaacagggccgccggtgggcccaagattaggacccggaatcaaccccaaaaaggtcgcgatgtggaacgttaagggagaacggcaccaaaaggcgtccgtggaaggggttgagagca

SEQ ID NO: 355883 - DNA, 755 bp, Homo sapiens
agcggaaactgagcaaactgagctgcgcagatgaggggagactcgtcaccaggcgtgcagtgggcactgctgggctcccccatcccgtcctaacccggaacagccccgggcaggaggcgtggaaagtcgagggggtaaaccgcgaatgtgcgttgtgtaagccacggcgcagggtggggcgcgggcgggacttgggcgggcggggtgggcttggccgagctggcctccggggcaccgaccgctataaggccagtcggactgcgacacagcccatcccctcgaccgctcgcgtcgcatttggccgcctccctaccgctccaagcccagccctcagccatggcatgccccctggatcaggccattggcctcctcgtggccatcttccacaagtactccggcagggagggtgacaagcacaccctgagcaagaaggagctgaaggagctgatccagaaggagctcaccattggctcgaagctgcaggatgctgaaattgcaaggctgatggaagacttggaccggaacaaggaccaggaggtgaacttccaggagtatgtcaccttcctgggggccttggctttgatctacaatgaagccctcaagggctgaaaataaatagggaagatggagacaccctctgggggtcctctctgagtcaaatccagcggtcgacggacggcccgagaacttctgcatgctgcaggtgcagccaaaaaaagaaaaatgcattgtggtaaagggcccaaccaagacac

SEQ ID NO: 355884 - DNA, 989 bp, Homo sapiens
agcggaaactgagcaaactgagctgcgcagatgaggggagactcgtcaccaggcgtgcagtgggcactgctgggctcccccatcccgtcctaacccggaacagccccgggcaggaggcgtggaaagtcgagggggtaaaccgcgaatgtgcgttgtgtaagccacggcgcagggtggggcgcgggcgggacttgggcgggcggggtgggcttggccgagctggcctccggggcaccgaccgctataaggccagtcggactgcgacacagcccatcccctcgaccgctcgcgtcgcatttggccgcctccctaccgctccaagcccagccctcagccatggcatgccccctggatcaggccattggcctcctcgtggccatcttccacaagtactccggcagggagggtgacaagcacaccctgagcaagaaggagctgaaggagctgatccagaaggagctcaccattggctcgaagctgcaggatgctgaaattgcaaggctgatggaagacttggaccggaacaaggaccaggaggtgaacttccaggagtatgtcaccttcctgggggccttggctttgatctacaatgaagccctcaagggctgaaaataaatagggaagatggagacaccctctgggggtcctctctgagtcaaatccagtggtgggtaccattgtgatactaaaaaaaaaaaaaacacacgaacaaaccaaaaaaaaatgttgttgggcggcacgcggggacccagagaaaggtttcaaaaacaatctcgtgtgggggccgcgggggcccaggagatggtcaggtcgccactgtggcccacaacggggtccaaaagagaaacccgggggccggatagggggtgggtttccccaaataaaaaaaaggcggggggcacccgagcgcgtgtggaccaccccagaaggggggtcgagggcaacggggctacaccgggagcaagcgagcaaaaatcaggcgggggggt

SEQ ID NO: 355885 - DNA, 1704 bp, Homo sapiens
agcggaaactgagcaaactgagctgcgcagatgaggggagactcgtcaccaggcgtgcagtgggcactgctgggctcccccatcccgtcctaacccggaacagccccgggcaggaggcgtggaaagtcgagggggtaaaccgcgaatgtgcgttgtgtaagccacggcgcagggtggggcgcgggcgggacttgggcgggcggggtgggcttggccgagctggcctccggggcaccgaccgctataaggccagtcggactgcgacacagcccatcccctcgaccgctcgcgtcgcatttggccgcctccctaccgtgagttctctccaggagccctgggtactttccagggccagctgccctcacgctgggggtccagccatcccctgcccagttcagccgctggatccagactggggccatctgtggcgctcccccgctggagggatagtcaggagcagcagtgctgtgccaggcaggccttgggctaagggatcgcaatggggtgtgctcttttggggtgcggaagggagtgccctgggtgtgtcattgccaccatgtgtggccctgtgaagctgtgtttaagctgcctttgcagcctccattcccctcccctgcccagccatactcctcaacttctggatcccctgaaggacagttctcagctgtgcccaaagctactgttcctatatgcttcttagaatccttaagccacctctcttgccttggccctagtgtgctctctccttccccttcaagccctgggctgtctcctgatgccattgtgtgtggcctgagactgggtggttccaaaggaggcggggctagtgcaggcagcattattggggtgtgtgggtgagaagtccttgctcccatggcactgactaggccctctgctgccagctccaagcccagccctcagccatggcatgccccctggatcaggccattggcctcctcgtggccatcttccacaagtactccggcagggagggtgacaagcacaccctgagcaagaaggagctgaaggagctgatccagaaggagctcaccattggctcgaagctgcaggatgctgaaattgcaaggctgatggaagacttggaccggaacaaggaccaggaggtgaacttccaggagtatgtcaccttcctgggggccttggctttgatctacaatgaagccctcaagggctgaaaataaatagggaagatggagacaccctctgggggtcctctctgagtcaaatccagtggtgggtaattgtacaataaattttttttggtcaaatttaaaaaaaaaaaaaaaaaaaaaaaaaaatctggtgtgcgcgcgcgcgcgcacctacggcgcccttcgagaaaaagcgtctttcagaaacacattccggtatgggcgcgcgcgcgggggccaaatataggggaacagtggagcacccgtgggccaaaagcgcgtggtctccacaaggagagaccccggggcacaagacaaaagggcggcgggggggaatcttctctcacccaatatataaaaaaaaggcccccggcggggggaacaaccgcgagaggcgtgtcttctggacacaaaaatctttcgcagagagcgggagagttcgtggagggggcaccatcaacagggggggaattctatattaaacccgggggagcgcttcccagaggacgaaagccctaaaattttcaaatgt

SEQ ID NO: 355886 - DNA, 327 bp, Homo sapiens
tataccaccctataccaccgaactataccacccaagcacaccctgagcaagaaggagctgaaggagctgatccagaaggagctcaccattggctcgaagctgcaggatgctgaaattgcaaggctgatggaagacttggaccggaacaaggaccaggaggtgaacttccaggagtatgtcaccttcctgggggccttggctttgatctacaatgaagccctcaagggctgaaaataaatagggaagatggagacaccctctgggggtcctctctgagtcaaatccagtggtgggtaattgtacaataaattttttttggtcaaattt

SEQ ID NO: 355887 - DNA, 334 bp, Homo sapiens
gcggccgcctactactactaaattcgcggccgcgtcgaccaagcacaccctgagcaagaaggagctgaaggagctgatccagaaggagctcaccattggctcgaagctgcaggatgctgaaattgcaaggctgatggaagacttggaccggaacaaggaccaggaggtgaacttccaggagtatgtcaccttcctgggggccttggctttgatctacaatgaagccctcaagggctgaaaataaatagggaagatggagacaccctctgggggtcctctctgagtcaaatccagtggtgggtaattgtacaataaattttttttggtcaaattt

SEQ ID NO: 355888 - DNA, 941 bp, Homo sapiens
gcggccgcctactactactaaattcgcggccgcgtcgaccgcatttggccgcctccctaccgctccaagcccagccctcagccatggcatgccccctggatcaggccattggcctcctcgtggccatcttccacaagtactccggcagggagggtgacaagcacaccctgagcaagaaggagctgaaggagctgatccagaaggagctcaccattggctcgaagctgcaggatgctgaaattgcaaggctgatggaagacttggaccggaacaaggaccaggaggtgaacttccaggagtatgtcaccttcctgggggccttggctttgatctacaatgaagccctcaagggctgaaaataaatagggaagatggagacaccctctgggggtcctctctgagtcaaatccagtggtgggtaattgtacaataaattttttttggtcaaatttaaaaaaaaaaaagcgcctcggaggcgtcagctgttcaagatgaagtgaacatctccttcccagccactggtgcagaaatcattgaagtggacgatgaacgcaaattcgtacttctatgagaagcgtatggcacagaagttgtgctgagctctgggtgaagaatggcaggggttatgtggccgaatcagggtggaaacgacagacaggttcccatgaagcaggtgtcttgacccatggcgggtccggctgctaatgaagaaggggatctgtgacagaccagggacggcgaagaacggaacatcagtcgggtggcttgcggtgaaactgggggctcaactggttctgggacacaggcgagggatccgcgggaggaaacagggccgccggtgggcccaagattaggacccggaatcaaccccaaaaaggtcgcgatgtggaacgttaagggagaacggcaccaaaaggcgtccgtggaaggggttgagagca

SEQ ID NO: 355889 - DNA, 1035 bp, Homo sapiens
agaggtgcctggtgcatctgactcacatttacccacattctgaggccctggtccacatgtagaccctgagctgtagacccactctcccagcgggtaggggatgcttccagccggatatccatctctccaaatgaggaccagtaactgagaagtagctgaggagaagcaatgccaaagtgacatgggtccttggtgatgagggagcacagagccacttgcagagaggattgcctgggagggggaaggggaagaatccagggttgtcatcaccactgagtatggatttcacattctaacacattagaagctgcaggatgctgaaattgcaaggctgatggaagacttggaccggaacaaggaccaggaggtgaacttccaggagtatgtcaccttcctgggggccttggctttgatctacaatgaagccctcaagggctgaaaataaatagggaagatggagacaccctctgggggtcctctctgagtcaaatccagtggtgggtaattgtacaataaattttttttggtcaaatttaaaaaaaaaaaaaaaaaaaaaaaaaaaaaaaaaaaaaaaagaaaaaaaaaaaaggggggggggcataaaagttcctctctcggggggggggccaacagcttacgaatatgaaccccggtttttgtgataaaagggggtcccctataataggggaggctgattattatttaagacgcaacgcaaggggagcgcggtttttaaaaaacgctgggtcgtggggaaaacagggggcacaccgtggggggaaatcttctggtgggagaaacgaacccctcatccctcgtggggggggggggccacctaccggggggcgaaacaactacccctcatcgaaaggataatataatagccccctacgaaggggacaccttatactcaaacttccaccggctgatattgtgggcggttcaccacaatgggcgctatatcgcgcggcgcggctagggacattctggccttgcgggattttctctctgacacaattttactcgcggggccga

SEQ ID NO: 355890 - DNA, 252 bp, Homo sapiens
  misc_feature (49)..(49): n is a, c, g, or t
tcgagctccggtacaccctcccaaggaatagagaaattgcaaaggctgnatggaagacattggacccggaacaaggaccaggaggtgaacttccaggagtatgtcaccttcctgggggccttggctttgatctacaatgaagccctcaagggctgaaaataaatagggaagatggagacaccctctgggggtcctctctgagtcaaatccagtggtgggtaattgtacaataaattttttttggtcaaattt

SEQ ID NO: 355891 - DNA, 234 bp, Homo sapiens
gtgctgtatcgccaacacatgtatatacatacagcaaggagtttcggagattaaaaggaccaggaggtgaacttccaggagtatgtcaccttcctgggggccttggctttgatctacaatgaagccctcaagggctgaaaataaatagggaagatggagacaccctctgggggtcctctctgagtcaaatccagtggtgggtaattgtacaataaattttttttggtcaaattt

SEQ ID NO: 355892 - DNA, 1000 bp, Homo sapiens
  misc_feature (955)..(955): n is a, c, g, or t
  misc_feature (981)..(981): n is a, c, g, or t
  misc_feature (999)..(999): n is a, c, g, or t
agcggaaactgagcaaactgagctgcgcagatgaggggagactcgtcaccaggcgtgcagtgggcactgctgggctcccccatcccgtcctaacccggaacagccccgggcaggaggcgtggaaagtcgagggggtaaaccgcgaatgtgcgttgtgtaagccacggcgcagggtggggcgcgggcgggacttgggcgggcggggtgggcttggccgagctggcctccggggcaccgaccgctataaggccagtcggactgcgacacagcccatcccctcgaccgctcgcgtcgcatttggccgcctccctaccgctccaagcccagccctcagccatggcatgccccctggatcaggccattggcctcctcgtggccatcttccacaagtactccggcagggagggtgacaagcacaccctgagcaagaaggagctgaaggagctgatccagaaggagctcaccattggctcgaagctgcaggatgctgaaattgcaaggctgatggaagacttggaccggaacaatacagccaatggcattgccctgctctgggccccgcggcccttcaacctacgctctggtcgcacccgtcgggccctggacataccccttgtcaagaactggtatcgggagcattgtcctgccgggcagcctgtgaaagtgagggtctcctaccagaagctgcttaagtactatgtgctgaatgccctgaagcatcggccccctaaggctcaaaagaagaggtatttgttccgctccttcaaagccaccaaattctttcagtccacaaagctggactgggtggaggttgggctccaggtttgccgccagggctacaacatgctcaaccttctcattcaccgcaaaaacctcaactacctgcacctggactacaacttcaacctcaacctgtgaaaacgctaccaccaaggaaagaaagaaatctcgtttnggaatgctttccactgtgtcgggaanttctgcgtttgactaaanc

SEQ ID NO: 355893 - DNA, 705 bp, Homo sapiens
agcggaaactgagcaaactgagctgcgcagatgaggggagactcgtcaccaggcgtgcagtgggcactgctgggctcccccatcccgtcctaacccggaacagccccgggcaggaggcgtggaaagtcgagggggtaaaccgcgaatgtgcgttgtgtaagccacggcgcagggtggggcgcgggcgggacttgggcgggcggggtgggcttggccgagctggcctccggggcaccgaccgctataaggccagtcggactgcgacacagcccatcccctcgaccgctcgcgtcgcatttggccgcctccctaccgctccaagcccagccctcagccatggcatgccccctggatcaggccattggcctcctcgtggccatcttccacaagtactccggcagggagggtgacaagcacaccctgagcaagaaggagctgaaggagctgatccagaaggagctcaccattggctcgaagctgcaggatgctgaaattgcaaggctgatggaagacttggaccggaacaaggaccaggaggtgaacttccaggagtatgtcaccttcctgggggccttggctttgatctacaatgaagccctcaagggctgaaaataaatagggaagatggagacaccctctgggggtcctctctgagtcaaatccagtggtgggtaattgtacaataaattttttttggtcaaattt

SEQ ID NO: 355894 - DNA, 446 bp, Homo sapiens
gcggccgcctactactactactactgctcgaattcagcttctaacgatgtacggggctccaagcccagccctcagccatggcatgccccctggatcaggccattggcctcctcgtggccatcttccacaagtactccggcagggagggtgacaagcacaccctgagcaagaaggagctgaaggagctgatccagaaggagctcaccattggctcgaagctgcaggatgctgaaattgcaaggctgatggaagacttggaccggaacaaggaccaggaggtgaacttccaggagtatgtcaccttcctgggggccttggctttgatctacaatgaagccctcaagggctgaaaataaatagggaagatggagacaccctctgggggtcctctctgagtcaaatccagtggtgggtaattgtacaataaattttttttggtcaaattt

SEQ ID NO: 355895 - DNA, 407 bp, Homo sapiens
  misc_feature (40)..(40): n is a, c, g, or t
  misc_feature (54)..(54): n is a, c, g, or t
ctggtttcaccgctaccaagacccgactctgcgacctggncatggccccctggntacaggccattggcctcctcgtggccatcttccacaagtactccggcagggagggtgacaagcacaccctgagcaagaaggagctgaaggagctgatccagaaggagctcaccattggctcgaagctgcaggatgctgaaattgcaaggctgatggaagacttggaccggaacaaggaccaggaggtgaacttccaggagtatgtcaccttcctgggggccttggctttgatctacaatgaagccctcaagggctgaaaataaatagggaagatggagacaccctctgggggtcctctctgagtcaaatccagtggtgggtaattgtacaataaattttttttggtcaaattt

SEQ ID NO: 355896 - DNA, 693 bp, Homo sapiens
ttcgcccacgcgtcgcccgcggcgtcggtcgcatttggccgcctccctaccgctccaagcccagccctcagccatggcatgccccctggatcaggccattggcctcctcgtggccatcttccacaagtactccggcagggagggtgacaagcacaccctgagcaagaaggagctgaaggagctgatccagaaggagctcaccattggctcgaagctgcaggatgctgaaattgcaaggctgatggaagacttggaccggaacaaggaccaggaggtgaacttccaggagtatgtcaccttcctgggggccttggctttgatctacaatgaagccctcaagggctgaaaataaatagggaagatggagacaccctctgggggtcctctctgagtcaaatccagtggtgggtaattgtacaataaattttttttggtcaaatttaaaaaaaaaaaaaaaaaaaaaaaaaaaaaaaaaaaaaaaaaaaaacataaaagaaaagcacgagaaaaagagagaaaacgacgaagagaagaaagagaaacaagaagagagagaaaaatggagaacaagcagaagagaaaaagagaggaaagaagaggagaaaagcaacggaaagagaaacaaaagaaagaaagaggaagaaagaaagaaagaagaagagcggagaaggaagaggaacaagagagagagag

SEQ ID NO: 355897 - DNA, 554 bp, Homo sapiens
cccaccacaacacacacaccaacccccacaataggctagtacaggctggtgtgctcgcgtcgcatttggccgcctccctaccgctccaagcccagccctcagccatggcatgccccctggatcaggccattggcctcctcgtggccatcttccacaagtactccggcagggagggtgacaagcacaccctgagcaagaaggagctgaaggagctgatccagaaggagctcaccattggctcgaagctgcaggatgctgaaattgcaaggctgatggaagacttggaccggaacaaggaccaggaggtgaacttccaggagtatgtcaccttcctgggggccttggctttgatctacaatgaagccctcaagggctgaaaataaatagggaagatggagacaccctctgggggtcctctctgagtcaaatccagtggtgggtaattgtacaataaattttttttggtcaaatttaaaaaaattcaaacatattactgatctcctcacacccatttggctcatctattaccctatagaggactaaagaaaaaactt

SEQ ID NO: 355898 - DNA, 598 bp, Homo sapiens
acatataccaactgtggtagtctgaattgtcctccaaagatatcaggccctgaaactggtgagttttacattatgaaaccaaaggtgtgattaagttgaggatcttgagatggaaggattatactggactgtccaggtgggagcggtcgacggacgcgtccgtcgaccgctcgcgtcgcatttggccgcctccctaccgctccaagcccagccctcagccatggcatgccccctggatcaggccattggcctcctcgtggccatcttccacaagtactccggcagggagggtgacaagcacaccctgagcaagaaggagctgaaggagctgatccagaaggagctcaccattggctcgaagctgcaggatgctgaaattgcaaggctgatggaagacttggaccggaacaaggaccaggaggtgaacttccaggagtatgtcaccttcctgggggccttggctttgatctacaatgaagccctcaagggctgaaaataaatagggaagatggagacaccctctgggggtcctctctgagtcaaatccagcggtcgacggacgggggatcctgctagagtcgacgcaacaaaaacgcaa

SEQ ID NO: 355899 - DNA, 663 bp, Homo sapiens
agcggaaactgagcaaactgagctgcgcagatgaggggagactcgtcaccaggcgtgcagtgggcactgctgggctcccccatcccgtcctaacccggaacagccccgggcaggaggcgtggaaagtcgagggggtaaaccgcgaatggccagctgccctcacgctgggggtccagccatcccctgcccagttcagccgctggatccagactggggccatctgtggcgctcccccgctggagggatagtcaggagcagcagtgctgtgccaggctccaagcccagccctcagccatggcatgccccctggatcaggccattggcctcctcgtggccatcttccacaagtactccggcagggagggtgacaagcacaccctgagcaagaaggagctgaaggagctgatccagaaggagctcaccattggctcgaagctgcaggatgctgaaattgcaaggctgatggaagacttggaccggaacaaggaccaggaggtgaacttccaggagtatgtcaccttcctgggggccttggctttgatctacaatgaagccctcaagggctgaaaataaatagggaagatggagacaccctctgggggtcctctctgagtcaaatccagtggtgggtaattgtacaataaattttttttggtcaaattt

SEQ ID NO: 355900 - DNA, 443 bp, Homo sapiens
ccatgtcagaatatactcgaccgctcgcgtcgcatttggccgcctccctaccgctccaagcccagccctcagccatggcatgccccctggatcaggccattggcctcctcgtggccatcttccacaagtactccggcagggagggtgacaagcacaccctgagcaagaaggagctgaaggagctgatccagaaggagctcaccattggctcgaagctgcaggatgctgaaattgcaaggctgatggaagacttggaccggaacaaggaccaggaggtgaacttccaggagtatgtcaccttcctgggggccttggctttgatctacaatgaagccctcaagggctgaaaataaatagggaagatggagacaccctctgggggtcctctctgagtcaaatccagtggtgggtaattgtacaataaattttttttggtcaaattt

SEQ ID NO: 355901 - DNA, 452 bp, Homo sapiens
gcggccgcctactactactaaattcgcggccgcgtcgaccgcatttggccgcctccctaccgctccaagcccagccctcagccatggcatgccccctggatcaggccattggcctcctcgtggccatcttccacaagtactccggcagggagggtgacaagcacaccctgagcaagaaggagctgaaggagctgatccagaaggagctcaccattggctcgaagctgcaggatgctgaaattgcaaggctgatggaagacttggaccggaacaaggaccaggaggtgaacttccaggagtatgtcaccttcctgggggccttggctttgatctacaatgaagccctcaagggctgaaaataaatagggaagatggagacaccctctgggggtcctctctgagtcaaatccagtggtgggtaattgtacaataaattttttttggtcaaattt

SEQ ID NO: 355902 - DNA, 1164 bp, Homo sapiens
agcggaaactgagcaaactgagctgcgcagatgaggggagactcgtcaccaggcgtgcagtgggcactgctgggctcccccatcccgtcctaacccggaacagccccgggcaggaggcgtggaaagtcgagggggtaaaccgcgaatgtgcgttgtgtaagccacggcgcagggtggggcgcgggcgggacttgggcgggcggggtgggcttggccgagctggcctccggggcaccgaccgctataaggccagtcggactgcgacacagcccatcccctcgaccgctcgcgtcgcatttggccgcctccctaccgctccaagcccagccctcagccatggcatgccccctggatcaggccattggcctcctcgtggccatcttccacaagtactccggcagggagggtgacaagcacaccctgagcaagaaggagctgaaggagctgatccagaaggagctcaccattggctcgaagctgcaggatgctgaaattgcaaggctgatggaagacttggaccggaacaaggaccaggaggtgaacttccaggagtatgtcaccttcctgggggccttggctttgatctacaatgaagccctcaagggctgaaaataaatagggaagatggagacaccctctgggggtcctctctgagtcaaatccagtggtgggtaattgtacaataaattttttttggtcaaatttaaaaaaaaaaaaaaaaaaacaaaaaaaaaaaaaaagaggggggggggctaaaaaatttcccgggggggccccagtttaggggttacccagtttttttggttcaaggggggcccccttggggggggggtataaaaaagagggggggccgggtttaaacaaggtgggggtggggaaacaccggctaggtggggactctgtggaaggggacccttacctcgcggcggcgggccactcgttgggcacctaccccaacagagattaaacggccgaggggaaacacaacctttcacgcggtgacgtgggggtaacccacgcgataatcttggcggtggaaagttcggtcccggtttggttttcgaattttcagcgtcgtcgctactatatcggcacaaccacacccagaccaacacacagggcagcactacacgcaacagaccccaccacacaacgtacaaaaca

SEQ ID NO: 355903 - DNA, 1117 bp, Homo sapiens
agcggaaactgagcaaactgagctgcgcagatgaggggagactcgtcaccaggcgtgcagtgggcactgctgggctcccccatcccgtcctaacccggaacagccccgggcaggaggcgtggaaagtcgagggggtaaaccgcgaatgtgcgttgtgtaagccacggcgcagggtggggcgcgggcgggacttgggcgggcggggtgggcttggccgagctggcctccggggcaccgaccgctataaggccagtcggactgcgacacagcccatcccctcgaccgctcgcgtcgcatttggccgcctccctaccgctccaagcccagccctcagccatggcatgccccctggatcaggccattggcctcctcgtggccatcttccacaagtactccggcagggagggtgacaagcacaccctgagcaagaaggagctgaaggagctgatccagaaggagctcaccattggctcgaagctgcaggatgctgaaattgcaaggctgatggaagacttggaccggaacaaggaccaggaggtgaacttccaggagtatgtcaccttcctgggggccttggctttgatctacaatgaagccctcaagggctgaaaataaatagggaagatggagacaccctctgggggtcctctctgagtcaaatccagtggtgggtaattgtacaataaattttttttggtcaaatttaaaaaaaaaaaaaaaaaaaaaaaaaaatctggtgtgcgcgcgcgcgcgcacctacggcgcccttcgagaaaaagcgtctttcagaaacacattccggtatgggcgcgcgcgcgggggccaaatataggggaacagtggagcacccgtgggccaaaagcgcgtggtctccacaaggagagaccccggggcacaagacaaaagggcggcgggggggaatcttctctcacccaatatataaaaaaaaggcccccggcggggggaacaaccgcgagaggcgtgtcttctggacacaaaaatctttcgcagagagcgggagagttcgtggagggggcaccatcaacagggggggaattctatattaaacccgggggagcgcttcccagaggacgaaagccctaaaattttcaaatgt

SEQ ID NO: 355904 - DNA, 1227 bp, Homo sapiens
agcggaaactgagcaaactgagctgcgcagatgaggggagactcgtcaccaggcgtgcagtgggcactgctgggctcccccatcccgtcctaacccggaacagccccgggcaggaggcgtggaaagtcgagggggtaaaccgcgaatgtgcgttgtgtaagccacggcgcagggtggggcgcgggcgggacttgggcgggcggggtgggcttggccgagctggcctccggggcaccgaccgctataaggccagtcggactgcgacacagcccatcccctcgaccgctcgcgtcgcatttggccgcctccctaccgctccaagcccagccctcagccatggcatgccccctggatcaggccattggcctcctcgtggccatcttccacaagtactccggcagggagggtgacaagcacaccctgagcaagaaggagctgaaggagctgatccagaaggagctcaccattggctcgaagctgcaggatgctgaaattgcaaggctgatggaagacttggaccggaacaaggaccaggaggtgaacttccaggagtatgtcaccttcctgggggccttggctttgatctacaatgaagccctcaagggctgaaaataaatagggaagatggagacaccctctgggggtcctctctgagtcaaatccagtggtgggtaattgtacaataaattttttttggtcaaatttaaaaaaaaaaaaaaaaaaaaaaaaaaacctgcgagaggattttatgttggggtgtggcgaaaaagagagaggttatgtgaaatgtgggccctgtggtccatagggtgttttccggaaccagagttttcttggtgacaagggggtaagaatctggcggagactaccctaataagtggagtcagtaatagaattgacaataaagccagggttaaaccggggcatacaaggaacgcgggagaaagagaaaaacagagaacagaagaagagaagagaaacgagacaagaagagagaagagagaagaagcaaaggaaagaaacaagaaagaacagaaaagcaagaaaaaaaaacagaacagacaaacaaaacaagagagaaaagagagaagagagaggaagaagaacgaaagaggaggaagaagcagaaggaagagaagagacgacagaaaaagagagagacagaaaagaacaagaagagagtgagagaggagaggagaagaaaagagcaagaagatagaaagaaga

SEQ ID NO: 355905 - DNA, 786 bp, Homo sapiens
agcggaaactgagcaaactgagctgcgcagatgaggggagactcgtcaccaggcgtgcagtgggcactgctgggctcccccatcccgtcctaacccggaacagccccgggcaggaggcgtggaaagtcgagggggtaaaccgcgaatgtgcgttgtgtaagccacggcgcagggtggggcgcgggcgggacttgggcgggcggggtgggcttggccgagctggcctccggggcaccgaccgctataaggccagtcggactgcgacacagcccatcccctcgaccgctcgcgtcgcatttggccgcctccctaccgctccaagcccagccctcagccatggcatgccccctggatcaggccattggcctcctcgtggccatcttccacaagtactccggcagggagggtgacaagcacaccctgagcaagaaggagctgaaggagctgatccagaaggagctcaccattggctcgaagctgcaggatgctgaaattgcaaggctgatggaagacttggaccggaacaaggaccaggaggtgaacttccaggagtatgtcaccttcctgggggccttggctttgatctacaatgaagccctcaagggctgaaaataaatagggaagatggagacaccctctgggggtcctctctgagtcaaatccagtggtgggtaattgtacaataaattttttttggtcaaatttttttttttttttttttttttttttttttttttttttttttttttttttttttttttttttttaaaataatagggagagaac

SEQ ID NO: 355906 - DNA, 714 bp, Homo sapiens
agcggaaactgagcaaactgagctgcgcagatgaggggagactcgtcaccaggcgtgcagtgggcactgctgggctcccccatcccgtcctaacccggaacagccccgggcaggaggcgtggaaagtcgagggggtaaaccgcgaatgtgcgttgtgtaagccacggcgcagggtggggcgcgggcgggacttgggcgggcggggtgggcttggccgagctggcctccggggcaccgaccgctataaggccagtcggactgcgacacagcccatcccctcgaccgctcgcgtcgcatttggccgcctccctaccgctccaagcccagccctcagccatggcatgccccctggatcaggccattggcctcctcgtggccatcttccacaagtactccggcagggagggtgacaagcacaccctgagcaagaaggagctgaaggagctgatccagaaggagctcaccattggctcgaagctgcaggatgctgaaattgcaaggctgatggaagacttggaccggaacaaggaccaggaggtgaacttccaggagtatgtcaccttcctgggggccttggctttgatctacaatgaagccctcaagggctgaaaataaatagggaagatggagacaccctctgggggtcctctctgagtcaaatccagcggtcgacggacgggggatcctgctagagtcgacgcaacaaaaacgcaa

SEQ ID NO: 355907 - DNA, 344 bp, Homo sapiens
ctagccgactctagcaggacccctccctgtactccggcagggagggtgacaagcacaccctgagcaagaaggagctgaaggagctgatccagaaggagctcaccattggctcgaagctgcaggatgctgaaattgcaaggctgatggaagacttggaccggaacaaggaccaggaggtgaacttccaggagtatgtcaccttcctgggggccttggctttgatctacaatgaagccctcaagggctgaaaataaatagggaagatggagacaccctctgggggtcctctctgagtcaaatccagtggtgggtaattgtacaataaattttttttggtcaaattt

SEQ ID NO: 355908 - DNA, 1185 bp, Homo sapiens
agcggaaactgagcaaactgagctgcgcagatgaggggagactcgtcaccaggcgtgcagtgggcactgctgggctcccccatcccgtcctaacccggaacagccccgggcaggaggcgtggaaagtcgagggggtaaaccgcgaatggccagctgccctcacgctgggggtccagccatcccctgcccagttcagccgctggatccagactggggccatctgtggcgctcccccgctggagggatagtcaggagcagcagtgctgtgccaggctccaagcccagccctcagccatggcatgccccctggatcaggccattggcctcctcgtggccatcttccacaagtactccggcagggagggtgacaagcacaccctgagcaagaaggagctgaaggagctgatccagaaggagctcaccattggctcgaagctgcaggatgctgaaattgcaaggctgatggaagacttggaccggaacaaggaccaggaggtgaacttccaggagtatgtcaccttcctgggggccttggctttgatctacaatgaagccctcaagggctgaaaataaatagggaagatggagacaccctctgggggtcctctctgagtcaaatccagtggtgggtaattgtacaataaattttttttggtcaaatttaaaaaaaaaaaaaaaaaaaaaaaaaaacctgcgagaggattttatgttggggtgtggcgaaaaagagagaggttatgtgaaatgtgggccctgtggtccatagggtgttttccggaaccagagttttcttggtgacaagggggtaagaatctggcggagactaccctaataagtggagtcagtaatagaattgacaataaagccagggttaaaccggggcatacaaggaacgcgggagaaagagaaaaacagagaacagaagaagagaagagaaacgagacaagaagagagaagagagaagaagcaaaggaaagaaacaagaaagaacagaaaagcaagaaaaaaaaacagaacagacaaacaaaacaagagagaaaagagagaagagagaggaagaagaacgaaagaggaggaagaagcagaaggaagagaagagacgacagaaaaagagagagacagaaaagaacaagaagagagtgagagaggagaggagaagaaaagagcaagaagatagaaagaaga

SEQ ID NO: 355909 - DNA, 1236 bp, Homo sapiens
  misc_feature (858)..(859): n is a, c, g, or t
agcggaaactgagcaaactgagctgcgcagatgaggggagactcgtcaccaggcgtgcagtgggcactgctgggctcccccatcccgtcctaacccggaacagccccgggcaggaggcgtggaaagtcgagggggtaaaccgcgaatgctccaagcccagccctcagccatggcatgccccctggatcaggccattggcctcctcgtggccatcttccacaagtactccggcagggagggtgacaagcacaccctgagcaagaaggagctgaaggagctgatccagaaggagctcaccattggctcgaagctgcaggatgctgaaattgcaaggctgatggaagacttggaccggaacaaggaccaggaggtgaacttccaggagtatgtcaccttcctgggggccttggctttgatctacaatgaagccctcaagggctgaaaataaatagggaagatggagacaccctctgggggtcctctctgagtcaaatccagtggtgggtaattgtacaataaattttttttggtcaaatttaaaaaaaaaaaaagaaaaaaaaaaaaaaaatttttgggcggccttgggccctagaaaaagtttttaaaacccttcggttgggggcggggccccggtgggtagggacctgggccaaaaggggtcccaaggaaaccgggggccatgagatcagcgggtcggggttcccccacccaaaaaaaaaacgcgcgggggcaccgcgggggggttctggaccaaaccccagaagggagctccgggagggccataaaggggtcctataccaaacagggggccccaagggaggcgctccgataatcaaattatccgcgcgcgcggggggnnaaacacacaccaaccacacaaagaaaaacacaacaaaatagaaaacaacacacgcacgagaaagagacacagaacagaggtgaaggagacaaacagaaaaagacagggagagaggcgaagaaggacagaggagagaggaaaaggagcgagggggagaggacaaaagatcgacgacggaaggacgacgagacagaaagcgacaggacacgcgagaacaagacaacacgcgagcaagggaaagccgcgagaaaggcaaaggagggagggaacagacagagaaagccaagaagaagacagagagaagcggcaaaggaggagaatgcgaaacagagcgaaaaagagagagactggagaaggacgaaaaaggagggagcaac

SEQ ID NO: 355910 - DNA, 1125 bp, Homo sapiens
agcggaaactgagcaaactgagctgcgcagatgaggggagactcgtcaccaggcgtgcagtgggcactgctgggctcccccatcccgtcctaacccggaacagccccgggcaggaggcgtggaaagtcgagggggtaaaccgcgaatgtgcgttgtgtaagccacggcgcagggtggggcgcgggcgggacttgggcgggcggggtgggcttggccgagctggcctccggggcaccgaccgctataaggccagtcggactgcgacacagcccatcccctcgaccgctcgcgtcgcatttggccgcctccctaccgtgagttctctccaggagccctgggtactttccagggccagctgccctcacgctgggggtccagccatcccctgcccagttcagccgctggatccagactggggccatctgtggcgctcccccgctggagggatagtcaggagcagcagtgctgtgccaggcaggccttgggctaagggatcgcaatggggtgtgctcttttggggtgcggaagggagtgccctgggtgtgtcattgccaccatgtgtggccctgtgaagctgtgtttaagctgcctttgcagcctccattcccctcccctgcccagccatactcctcaacttctggatcccctgaaggacagttctcagctgtgcccaaagctactgttcctatatgcttcttagaatccttaagccacctctcttgccttggccctagtgtgctctctccttccccttcaagccctgggctgtctcctgatgccattgtgtgtggcctgagactgggtggttccaaaggaggcggggctagtgcaggcagcattattggggtgtgtgggtgagaagtccttgctcccatggcactgactaggccctctgctgccagctccaagcccagccctcagccatggcatgccccctggatcaggccattggcctcctcgtggccatcttccacaagtactccggcagggagggtgacaagcacaccctgagcaagaaggagctgaaggagctgatccagaaggagctcaccattggctcggtgagtggcctcctccccaggaccccttttgccacccttgtcctttggaagcaggattagggga

SEQ ID NO: 355911 - DNA, 822 bp, Homo sapiens
caaagccaagtatatgatctttattatactgataaaagtgagacacaggcacaccacaattaatagcaaagccagaacaacaacccatatcttgtgaatcttagtttctctattttaccaagcttcctcccctcattagacacatctgttaacaggtaacatttaaccctaatgtgtcaagcattgtcctaggcactttacccacagaaactcatttaccctaatcctttcaacaaccctatgaaatagctgttattaacattttacagatgaggagactgaaccacagagaaattaagtaacttgcgcaaagtcacatagctggagtgtagtttgctgatattcacacccaggcaatctgtctttagagccagtgcccttaatcactctgccatattgctcctgtgaacccagaagacaacatgaaaggttgatgtactttactcatggtggccagtaagcagccaagtgtgatatttctccttacaggcctctcaactcaggccatctggcgccgactctgggatgaactgatgaagacaaggccttccagtttggaagtaagttaaggtatcaggtagaatgctagcctgattttgcatggtaaaagcaggaatagcacacaaacacaagctgggtactgataaagtgcagaggcaatgatggaatggatttgggaggagggctctgatggcttgtcacaaggttttggtccatttggcatttgtcactgaattgcttgctcactgtatttgcaggggacacaaaacagggaaagttagtgatcatggatggcagagccaggattcctagagttcttga

SEQ ID NO: 355912 - DNA, 703 bp, Homo sapiens
ccagctggtacgctcgggttcgggatgacaaccctggtgtgccagggaatgcagggccccctagccacataataggcgatgaggagataccagaaaactgcctggagcagttggagatgggatttccacggggagcccagccagccccactgctgtgctccgttctgaaggcctcgggttctctgcagcagctgtccctggatagtgccacctttgcctctccccaggattttgggcttgttttgcaaacactcaaagagtacaacctagccctgaaaagactgagcttccatgacatgaatctcgctgactgtcagagcgaggtgctctttttgctacagaatctgactctgcaagagattaccttctccttctgccgtctgtttgagaagcgcccagcccaatttctgcctgagatggttgctgctatgaagggcaactccacactgaagggcctccggctgccagggaaccgcctgggtgggggccagaccctggggagggagaggggaaaggagctaggcctttgacctaaaaactcactggataaaggcaaagacctctccactgggaacgtgggagttggaatacagatatttctgtgctggggcttcaggaaccagcagggctggttctgccagccatagttgggttgggatacccttgtcccctgttcttgggtggaggtgataggcgttctccc

SEQ ID NO: 355913 - DNA, 358 bp, Homo sapiens
ttttttttagttatttcactctctctgttaaatttatctgataggattctgcagagaacaaaattcaacagggccctgtggagcaaggagccccttttccctatctccttcctctaagagctacacccagaccagctggttatcagcggaggccccgctgctcctcatgagaacgctggtggaagacgaaggtgatggcagtggaggcagcatcccaggcagcctggagtacctcatcccggagcccccacttatcagtgcagtggttccaccctgccaggtctgaagtgcagtcagaaccatcagggggtggccggatctgacggctgttgacacaacgtcggcagtgcaacctagg

SEQ ID NO: 355914 - DNA, 3107 bp, Homo sapiens
caaagccaagtatatgatctttattatactgataaaagtgagacacaggcacaccacaattaatagcaaagccagaacaacaacccatatcttgtgaatcttagtttctctattttaccaagcttcctcccctcattagacacatctgttaacaggtaacatttaaccctaatgtgtcaagcattgtcctaggcactttacccacagaaactcatttaccctaatcctttcaacaaccctatgaaatagctgttattaacattttacagatgaggagactgaaccacagagaaattaagtaacttgcgcaaagtcacatagctggagtgtagtttgctgatattcacacccaggcaatctgtctttagagccagtgcccttaatcactctgccatattgctcctgtgaacccagaagacaacatgaaaggttgatgtactttactcatggtggccagtaagcagccaagtgtgatatttctccttacaggcctctcaactcaggccatctggcgccgactctgggatgaactgatgaagacaaggccttccagtttggaaagtgtgacatgttggcgagccaagtttatggaggcctttttttcccatgttctacgtgggaccattgatgtgtcttctgacaggcgtctttgtgatcagcggttctcacctcttctgcacagctcccgccatgtccgacagctcaccatctgtaacatgctgcagggtgcaaccgagctggtggctgagcccaaccgcagggttctggagaccctggccagctccctgcacactctcaagttccgccacctgctgttctctgatgtggctgctcagcagtcacttcggcagctgttgcatcagctcattcaccatggggctgtcagtcaagtgtcgctatactcctggcctgtgcctgagtcagcccttttcatccttattctcaccatgagtgctggcttctggcaaccagggcctggtggcccaccctgccgcctctgtggagaggcctcccgaggccgggccccatcccgagatgaagggtccctcttattgggctcacgtcggccccgccgggatgctgctgagcgatgtgctgcagccctgatggccagccggcgtaagagtgaagccaagcagatgcccagagctgcacctgccactcgggtaacacgccggagcacacaggagagcctgacagcaggcggaacagaccttaagagggagctgcaccccccagccacctcccatgaggctcctggcaccaagcggtcaccttctgctccagcagccacctcctctgcctcttcttctacatcctcatacaaacgggcaccagctagctcagccccacagcctaagcccctaaagcgtttcaagcgagctgcagggaagaagggtgctcgcacccgtcaggggcctggtgcagagtctgaagacctgtatgacttcgtttttattgtggctggcgagaaggaggatggcgaagagatggagattggggaagtggcttgtggagctttggatggatcagatcccagctgcctggggcttccagcactggaagcttcacaaagattccgcagcatctccaccttggagctattcacagttccactctccacagaggcagccctgacactatgccacctgctgagctcctgggtgtcactggagagcctcacactctcctacaatggcctgggctctaacatcttccgcctgctagacagcctgcgggccctgtcaggccaggctggatgtcgcctccgtgccctgcatctcagtgacctgttctcaccactgcccatcctggagctgacacgtgctatcgtgcgagcactgcccctgctacgggtcctctctattcgtgttgaccacccaagccagcgggacaaccctggtgtgccagggaatgcagggccccctagccacataataggcgatgaggagataccagaaaactgcctggagcagttggagatgggatttccacggggagcccagccagccccactgctgtgctccgttctgaaggcctcgggttctctgcagcagctgtccctggatagtgccacctttgcctctccccaggattttgggcttgttttgcaaacactcaaagagtacaacctagccctgaaaagactgagcttccatgacatgaatctcgctgactgtcagagcgaggtgctctttttgctacagaatctgactctgcaagagattaccttctccttctgccgtctgtttgagaagcgcccagcccaatttctgcctgagatggttgctgctatgaagggcaactccacactgaagggcctccggctgccagggaaccgcctggggaatgctggcctgctggccttggcagatgttttctcagaggattcatcctcctctctctgtcagctggacatcagttccaactgcatcaagccagatgggcttctggagttcgccaagcggctggagcgctggggccgtggagcctttggtcacctgcgcctcttccaaaactggctggaccaggatgcagtcacagccagggaagccatccggcggctccgggctacctgccatgtggttagcgactcatgggactcatcccaggccttcgcagattatgttagcaccatgtgatggggcccgtacctcacagtctcatgctcggtaccatcagcttgcaggggctgaagcatgggctgcccagaaccccaaccaccagttctatctttctctttctgtcaccttttttctcttttttccttcttcccttgcactgaggtcctggaggccttgatgaggcccagcaaacaggcattctcacagctgggtttatagtctttgggccccttactcagtatcctgggaaccctgggccaggaggttacagtggtcatcataattgctgaagagatcccctcccctgcccctgggttcctgccttccctcctcaagcaggcacccaggctttagagaagtatagggggcttcttccctgctgggcttaccacactgctctcaggcctcaaaccctttcatacctttattcttttttttaaccaaaaaagtttttcttataaaataaattttgggcaaacatca

SEQ ID NO: 355915 - DNA, 3289 bp, Homo sapiens
gcgcacctccccaagatggcggcgcccgaggcctggcgcgcccggagttgctggttctgtgaggtagcggcggcaacgaccatggaggccacgtcccgggaggcggcgccagcgaagagctcggcctcgggccccaacgctccccccgccctgttcgagctgtgcgggcgggcggtgagcgcccatatgggggttctggagagcggggtgtgggccctcccaggcccaatacttcaaagcatcctacctctgctcaatatatattacttggagaggattgaggaaactgccctcaagaaaggcctctcaactcaggccatctggcgccgactctgggatgaactgatgaagacaaggccttccagtttggaaagtgtgacatgttggcgagccaagtttatggaggcctttttttcccatgttctacgtgggaccattgatgtgtcttctgacaggcgtctttgtgatcagcggttctcacctcttctgcacagctcccgccatgtccgacagctcaccatctgtaacatgctgcagggtgcaaccgagctggtggctgagcccaaccgcagggttctggagaccctggccagctccctgcacactctcaagttccgccacctgctgttctctgatgtggctgctcagcagtcacttcggcagctgttgcatcagctcattcaccatggggctgtcagtcaagtgtcgctatactcctggcctgtgcctgagtcagcccttttcatccttattctcaccatgagtgctggcttctggcaaccagggcctggtggcccaccctgccgcctctgtggagaggcctcccgaggccgggccccatcccgagatgaagggtccctcttattgggctcacgtcggccccgccgggatgctgctgagcgatgtgctgcagccctgatggccagccggcgtaagagtgaagccaagcagatgcccagagctgcacctgccactcgggtaacacgccggagcacacaggagagcctgacagcaggcggaacagaccttaagagggagctgcaccccccagccacctcccatgaggctcctggcaccaagcggtcaccttctgctccagcagccacctcctctgcctcttcttctacatcctcatacaaacgggcaccagctagctcagccccacagcctaagcccctaaagcgtttcaagcgagctgcagggaagaagggtgctcgcacccgtcaggggcctggtgcagagtctgaagacctgtatgacttcgtttttattgtggctggcgagaaggaggatggcgaagagatggagattggggaagtggcttgtggagctttggatggatcagatcccagctgcctggggcttccagcactggaagcttcacaaagattccgcagcatctccaccttggagctattcacagttccactctccacagaggcagccctgacactatgccacctgctgagctcctgggtgtcactggagagcctcacactctcctacaatggcctgggctctaacatcttccgcctgctagacagcctgcgggccctgtcaggccaggctggatgtcgcctccgtgccctgcatctcagtgacctgttctcaccactgcccatcctggagctgacacgtgctatcgtgcgagcactgcccctgctacgggtcctctctattcgtgttgaccacccaagccagcgggacaaccctggtgtgccagggaatgcagggccccctagccacataataggcgatgaggagataccagaaaactgcctggagcagttggagatgggatttccacggggagcccagccagccccactgctgtgctccgttctgaaggcctcgggttctctgcagcagctgtccctggatagtgccacctttgcctctccccaggattttgggcttgttttgcaaacactcaaagagtacaacctagccctgaaaagactgagcttccatgacatgaatctcgctgactgtcagagcgaggtgctctttttgctacagaatctgactctgcaagagattaccttctccttctgccgtctgtttgagaagcgcccagcccaatttctgcctgagatggttgctgctatgaagggcaactccacactgaagggcctccggctgccagggaaccgcctggggaatgctggcctgctggccttggcagatgttttctcagaggattcatcctcctctctctgtcagctggacatcagttccaactgcatcaagccagatgggcttctggagttcgccaagcggctggagcgctggggccgtggagcctttggtcacctgcgcctcttccaaaactggctggaccaggatgcagtcacagccagggaagccatccggcggctccgggctacctgccatgtggttagcgactcatgggactcatcccaggccttcgcagattatgttagcaccatgtgatggggcccgtacctcacagtctcatgctcggtaccatcagcttgcaggggctgaagcatgggctgcccagaaccccaaccaccagttctatctttctctttctgtcaccttttttctcttttttccttcttcccttgcactgaggtcctggaggccttgatgaggcccagcaaacaggcattctcacagctgggtttatagtctttgggccccttactcagtatcctgggaaccctgggccaggaggttacagtggtcatcataattgctgaagagatcccctcccctgcccctgggttcctgccttccctcctcaagcaggcacccaggctttagagaagtatagggggcttcttccctgctgggcttaccacactgctctcaggcctcaaaccctttcatacctttattcttttttttaaccaaaaaagtttttcttataaaataaattttgggcaaacatcaaaaaaaaaaccacaacaccaccaccaacacaactccccaccacacccaaaaaattggcgggcgccggcagccacgagaagactaaacaccaaggtaggtgaggcccggagacccagaaagataaaacacaagggccaacagggcccaaaacaaacgtcgcatcgaacgagggatggtctacccaaaaaacggcgggaacgaggtgctgccaaccaagggatcgggcctctaggtacaacgggccaggccttaacaccgcgcagcaggaggggaagacaccaccacccacacgcggcactcagactagcgaatagcacagacgacacagcgatcaacatcacccagtgcaagtagagcaagactccgctca

SEQ ID NO: 355916 - DNA, 3856 bp, Homo sapiens
  misc_feature (3228)..(3228): n is a, c, g, or t
  misc_feature (3263)..(3263): n is a, c, g, or t
  misc_feature (3272)..(3272): n is a, c, g, or t
gcgcacctccccaagatggcggcgcccgaggcctggcgcgcccggagttgctggttctgtgaggtagcggcggcaacgaccatggaggccacgtcccgggaggcggcgccagcgaagagctcggcctcgggccccaacgctccccccgccctgttcgagctgtgcgggcgggcggtgagcgcccatatgggggttctggagagcggggtgtgggccctcccaggcccaatacttcaaagcatcctacctctgctcaatatatattacttggagaggattgaggaaactgccctcaagaaaggcctctcaactcaggccatctggcgccgactctgggatgaactgatgaagacaaggccttccagtttggaaagtgtgacatgttggcgagccaagtttatggaggcctttttttcccatgttctacgtgggaccattgatgtgtcttctgacaggcgtctttgtgatcagcggttctcacctcttctgcacagctcccgccatgtccgacagctcaccatctgtaacatgctgcagggtgcaaccgagctggtggctgagcccaaccgcagggttctggagaccctggccagctccctgcacactctcaagttccgccacctgctgttctctgatgtggctgctcagcagtcacttcggcagctgttgcatcagctcattcaccatggggctgtcagtcaagtgtcgctatactcctggcctgtgcctgagtcagcccttttcatccttattctcaccatgagtgctggcttctggcaaccagggcctggtggcccaccctgccgcctctgtggagaggcctcccgaggccgggccccatcccgagatgaagggtccctcttattgggctcacgtcggccccgccgggatgctgctgagcgatgtgctgcagccctgatggccagccggcgtaagagtgaagccaagcagatgcccagagctgcacctgccactcgggtaacacgccggagcacacaggagagcctgacagcaggcggaacagaccttaagagggagctgcaccccccagccacctcccatgaggctcctggcaccaagcggtcaccttctgctccagcagccacctcctctgcctcttcttctacatcctcatacaaacgggcaccagctagctcagccccacagcctaagcccctaaagcgtttcaagcgagctgcagggaagaagggtgctcgcacccgtcaggggcctggtgcagagtctgaagacctgtatgacttcgtttttattgtggctggcgagaaggaggatggcgaagagatggagattggggaagtggcttgtggagctttggatggatcagatcccagctgcctggggcttccagcactggaagcttcacaaagattccgcagcatctccaccttggagctattcacagttccactctccacagaggcagccctgacactatgccacctgctgagctcctgggtgtcactggagagcctcacactctcctacaatggcctgggctctaacatcttccgcctgctagacagcctgcgggccctgtcaggccaggctggatgtcgcctccgtgccctgcatctcagtgacctgttctcaccactgcccatcctggagctgacacgtgctatcgtgcgagcactgcccctgctacgggtcctctctattcgtgttgaccacccaagccagcgggacaaccctggtgtgccagggaatgcagggccccctagccacataataggcgatgaggagataccagaaaactgcctggagcagttggagatgggatttccacggggagcccagccagccccactgctgtgctccgttctgaaggcctcgggttctctgcagcagctgtccctggatagtgccacctttgcctctccccaggattttgggcttgttttgcaaacactcaaagagtacaacctagccctgaaaagactgagcttccatgacatgaatctcgctgactgtcagagcgaggtgctctttttgctacagaatctgactctgcaagagattaccttctccttctgccgtctgtttgagaagcgcccagcccaatttctgcctgagatggttgctgctatgaagggcaactccacactgaagggcctccggctgccagggaaccgcctggggaatgctggcctgctggccttggcagatgttttctcagaggattcatcctcctctctctgtcagctggacatcagttccaactgcatcaagccagatgggcttctggagttcgccaagcggctggagcgctggggccgtggagcctttggtcacctgcgcctcttccaaaactggctggaccaggatgcagtcacagccagggaagccatccggcggctccgggctacctgccatgtggttagcgactcatgggactcatcccaggccttcgcagattatgttagcaccatgtgatggggcccgtacctcacagtctcatgctcggtaccatcagcttgcaggggctgaagcatgggctgcccagaaccccaaccaccagttctatctttctctttctgtcaccttttttctcttttttccttcttcccttgcactgaggtcctggaggccttgatgaggcccagcaaacaggcattctcacagctgggtttatagtctttgggccccttactcagtatcctgggaaccctgggccaggaggttacagtggtcatcataattgctgaagagatcccctcccctgcccctgggttcctgccttccctcctcaagcaggcacccaggctttagagaagtatagggggcttcttccctgctgggcttaccacactgctctcaggcctcaaaccctttcatacctttattcttttttttaaccaaaaaagtttttcttataaaataaattttgggcaaacatcagaaaaaaaaacaaaaacacaaaaaaaaaaaaaaaatggttgtggggcccgcgccccggccccagggaagaaggttttcttaaccccaatcagtgttggggcggcggcggcgcccgcagtagggttaaacgtgcgaccattgcgccaacgctggtcccaaagggagatctctgggccatggactaggggtcggggttcccccacccaactaaaaaaacggccggggcggaccaccgagcgttcttggaaccactccaagagggggtttcgcggggccgtagcgggtgcctctataaaagaggagggtccnagggggaggcccggaattcaaattattcccgcgcnctgagtggnaaactagcacactataacaaacaaacacaacgagtatcaatactagacaagacgacacgagagacatactacacacaagaacactacacatagacgtaacacacaactaagacacacataacacgtactcatacaacatgactaagcaacaacacatacaaatacacaacaacatcactacacaccaactagtagtagcacagacaacacgagcacacgcaggcacgaacagaccgacagtagtcacacaagacgggagaacagagcagatacgcaacagacgacaaagagaagacacacacacaacaacacaagcacccaacagaacaacacacacccgagcagcaagacgaacaaaacagcaccgaacaagcagacaggcacccaacagaacgcatagagacagaacggcaccaaggagcaaaccaagcaaccaaacacacagagcgagacacacgcaccacaccaacagaacacaggaaacgccacgacagccaaacacgaaaaacgcacgagagaggccaacagcaagaagacgacgagagaaagacagaaccgacagggaaacaacacaccgaacgaca

SEQ ID NO: 355917 - DNA, 2901 bp, Homo sapiens
gcgcacctccccaagatggcggcgcccgaggcctggcgcgcccggagttgctggttctgtgaggtagcggcggcaacgaccatggaggccacgtcccgggaggcggcgccagcgaagagctcggcctcgggccccaacgctccccccgccctgttcgagctgtgcgggcgggcggtgagcgcccatatgggggttctggagagcggggtgtgggccctcccaggcccaatacttcaaagcatcctacctctgctcaatatatattacttggagaggattgaggaaactgccctcaagaaaggcctctcaactcaggccatctggcgccgactctgggatgaactgatgaagacaaggccttccagtttggaaagtgtgacatgttggcgagccaagtttatggaggcctttttttcccatgttctacgtgggaccattgatgtgtcttctgacaggcgtctttgtgatcagcggttctcacctcttctgcacagctcccgccatgtccgacagctcaccatctgtaacatgctgcagggtgcaaccgagctggtggctgagcccaaccgcagggttctggagaccctggccagctccctgcacactctcaagttccgccacctgctgttctctgatgtggctgctcagcagtcacttcggcagctgttgcatcagctcattcaccatggggctgtcagtcaagtgtcgctatactcctggcctgtgcctgagtcagcccttttcatccttattctcaccatgagtgctggcttctggcaaccagggcctggtggcccaccctgccgcctctgtggagaggcctcccgagatgaagggtccctcttattgggctcacgtcggccccgccgggatgctgctgagcgatgtgctgcagccctgatggccagccggcgtaagagtgaagccaagcagatgcccagagctgcacctgccactcgggtaacacgccggagcacacaggagagcctgacagcaggcggaacagaccttaagagggagctgcaccccccagccacctcccatgaggctcctggcaccaagcggtcaccttctgctccagcagccacctcctctgcctcttcttctacatcctcatacaaacgggcaccagctagctcagccccacagcctaagcccctaaagcgtttcaagcgagctgcagggaagaagggtgctcgcacccgtcaggggcctggtgcagagtctgaagacctgtatgacttcgtttttattgtggctggcgagaaggaggatggcgaagagatggagattggggaagtggcttgtggagctttggatggatcagatcccagctgcctggggcttccagcactggaagcttcacaaagattccgcagcatctccaccttggagctattcacagttccactctccacagaggcagccctgacactatgccacctgctgagctcctgggtgtcactggagagcctcacactctcctacaatggcctgggctctaacatcttccgcctgctagacagcctgcgggccctgtcaggccaggctggatgtcgcctccgtgccctgcatctcagtgacctgttctcaccactgcccatcctggagctgacacgtgctatcgtgcgagcactgcccctgctacgggtcctctctattcgtgttgaccacccaagccagcgggacaaccctggtgtgccagggaatgcagggccccctagccacataataggcgatgaggagataccagaaaactgcctggagcagttggagatgggatttccacggggagcccagccagccccactgctgtgctccgttctgaaggcctcgggttctctgcagcagctgtccctggatagtgccacctttgcctctccccaggattttgggcttgttttgcaaacactcaaagagtacaacctagccctgaaaagactgagcttccatgacatgaatctcgctgactgtcagagcgaggtgctctttttgctacagaatctgactctgcaagagattaccttctccttctgccgtctgtttgagaagcgcccagcccaatttctgcctgagatggttgctgctatgaagggcaactccacactgaagggcctccggctgccagggaaccgcctggggaatgctggcctgctggccttggcagatgttttctcagaggattcatcctcctctctctgtcagctggacatcagttccaactgcatcaagccagatgggcttctggagttcgccaagcggctggagcgctggggccgtggagcctttggtcacctgcgcctcttccaaaactggctggaccaggatgcagtcacagccagggaagccatccggcggctccgggctacctgccatgtggttagcgactcatgggactcatcccaggccttcgcagattatgttagcaccatgtgatggggcccgtacctcacagtctcatgctcggtaccatcagcttgcaggggctgaagcatgggctgcccagaaccccaaccaccagttctatctttctctttctgtcaccttttttctcttttttccttcttcccttgcactgaggtcctggaggccttgatgaggcccagcaaacaggcattctcacagctgggtttatagtctttgggccccttactcagtatcctgggaaccctgggccaggaggttacagtggtcatcataattgctgaagagatcccctcccctgcccctgggttcctgccttccctcctcaagcaggcacccaggctttagagaagtatagggggcttcttccctgctgggcttaccacactgctctcaggcctcaaaccctttcatacctttattcttttttttaaccaaaaaagtttttcttataaaataaattttgggcaaacatca

SEQ ID NO: 355918 - DNA, 2058 bp, Homo sapiens
cccacaaatgggccctttatttctgaactgccaccactgcacggataaggccacttgggttgcaggcacactgtggagtgtcaggggacagagaggagaggggctgcacaccaagactgccctgtcctcacggagaggaaaagcggccgcagaagagaatcccgttggtcttgctgtgctggatgaagaaaaggaaggggtggtcggcgcagaagcgggggacgaatctggcacaccgcatcatcatgatggcagctgtggcggctgcagcctccgtgccttcctcattgacctccacaaaagacttgtgcacgaccttggacagagacaggtctgtctgggacattccagagaagtctgccttgcccagctcgaaggcatcagtcatgcccaggttgcgcaggacactctccatgtcgtagctttcctctagtttaaaccgcgggagggacacttccacctcctcttcatccatcatgtccagcctcgtccattctacgaacttctcgtaagtgagttctttctccaccgttctcaagtcagtggtctcgtccggaagcatgatgatcatattcagttccttgccaacatatggaagcaccaagatttgggtaaatatttctcctatataggtcttcttaaaagtagattgcttaaacatcatttgcacaggtttctcctcattcttgctgactttaaacagtctctcctcggtgttctccttgtcaaactgttcatcccagtttcctctgaaatagacagcattcactgacacgtgctatcgtgcgagcactgcccctgctacgggtcctctctattcgtgttgaccacccaagccagcgggacaaccctggtgtgccagggaatgcagggccccctagccacataataggcgatgaggagataccagaaaactgcctggagcagttggagatgggatttccacggggagcccagccagccccactgctgtgctccgttctgaaggcctcgggttctctgcagcagctgtccctggatagtgccacctttgcctctccccaggattttgggcttgttttgcaaacactcaaagagtacaacctagccctgaaaagactgagcttccatgacatgaatctcgctgactgtcagagcgaggtgctctttttgctacagaatctgactctgcaagagattaccttctccttctgccgtctgtttgagaagcgcccagcccaatttctgcctgagatggttgctgctatgaagggcaactccacactgaagggcctccggctgccagggaaccgcctggggaatgctggcctgctggccttggcagatgttttctcagaggattcatcctcctctctctgtcagctggacatcagttccaactgcatcaagccagatgggcttctggagttcgccaagcggctggagcgctggggccgtggagcctttggtcacctgcgcctcttccaaaactggctggaccaggatgcagtcacagccagggaagccatccggcggctccgggctacctgccatgtggttagcgactcatgggactcatcccaggccttcgcagattatgttagcaccatgtgatggggcccgtacctcacagtctcatgctcggtaccatcagcttgcaggggctgaagcatgggctgcccagaaccccaaccaccagttctatctttctctttctgtcaccttttttctcttttttccttcttcccttgcactgaggtcctggaggccttgatgaggcccagcaaacaggcattctcacagctgggtttatagtctttgggccccttactcagtatcctgggaaccctgggccaggaggttacagtggtcatcataattgctgaagagatcccctcccctgcccctgggttcctgccttccctcctcaagcaggcacccaggctttagagaagtatagggggcttcttccctgctgggcttaccacactgctctcaggcctcaaaccctttcatacctttattcttttttttaaccaaaaaagtttttcttataaaataaattttgggcaaacatca

SEQ ID NO: 355919 - DNA, 2707 bp, Homo sapiens
gcgcacctccccaagatggcggcgcccgaggcctggcgcgcccggagttgctggttctgtgaggtagcggcggcaacgaccatggaggccacgtcccgggaggcggcgccagcgaagagctcggcctcgggccccaacgctccccccgccctgttcgagctgtgcgggcgggcggtgagcgcccatatgggggttctggagagcggggtgtgggccctcccaggcccaatacttcaaagcatcctacctctgctcaatatatattacttggagaggattgaggaaactgccctcaagaaaggcctctcaactcaggccatctggcgccgactctgggatgaactgatgaagacaaggccttccagtttggaaagtgtgacatgttggcgagccaagtttatggaggcctttttttcccatgttctacgtgggaccattgatgtgtcttctgacaggcgtctttgtgatcagcggttctcacctcttctgcacagctcccgccatgtccgacagctcaccatctgtaacatgctgcagggtgcaaccgagctggtggctgagcccaaccgcagggttctggagaccctggccagctccctgcacactctcaagttccgccacctgctgttctctgatgtggctgctcagcagtcacttcggcagctgttgcatcagctcattcaccatggggctgtcagtcaagtgtcgctatactcctggcctgtgcctgagtcagcccttttcatccttattctcaccatgagtgctggcttctggcaaccagggcctggtggcccaccctgccgcctctgtggagaggcctcccgaggccgggccccatcccgagatgaagggtccctcttattgggctcacgtcggccccgccgggatgctgctgagcgatgtgctgcagccctgatggccagccggcgtaagagtgaagccaagcagatgcccagagctgcacctgccactcgggtaacacgccggagcacacaggagagcctgacagcaggcggaacagaccttaagagggagctgcaccccccagccacctcccatgaggctcctggcaccaagcggtcaccttctgctccagcagccacctcctctgcctcttcttctacatcctcatacaaacgggcaccagctagctcagccccacagcctaagcccctaaagcgtttcaagcgagctgcagggaagaagggtgctcgcacccgtcaggggcctggtgcagagtctgaagacctgtatgacttcgtttttattgtggctggcgagaaggaggatggcgaagagatggagattggggaagtggcttgtggagctttggatggatcagatcccagctgcctggggcttccagcactggaagcttcacaaagattccgcagcatctccaccttggagctattcacagttccactctccacagaggcagccctgacactatgccacctgctgagctcctgggtgtcactggagagcctcacactctcctacaatggtgagcaccctggagtggcagggattgggcttagattgcctagcagcaccagctgtgtgcctaattctagggaggtgggaggggcaaattgggggtatgatcaggaggttagagaggaaggcttgtatgcctcatagcaggggagactgtcattgctagaagagaggaacataaagtctatacacttgattagttgttgaaagcaggggttcctgaggggcagtgagacaagccagctggaatctgaagaatgaatacattttagatatggaaggcagtccaagggcaggtgggagcagtatagtatatgcatgctcaggcagggctagagtttgacctcaccacctcaccagtcatatcagagtagctgtccagacaaggtgtgggacacaatttcttatcagaccaacaacctgcaaagcagtcctcagtcctcatttccctcctgcttgtgaccagctagcaaaacctcaactctggctaaatccagcaatccgcctaggttgctgagcactgctagagacaaatcatacaactatgcaaatcagtgttactatatgatcactaacctcgtatgaaccttcactgtgcttgcaacatcagctcccattcctaccacttccaaactctccttttcccttctcagggatgacctcacctacttcacagagaaaatagaagccatcacacatgagtttctttagcttgctaagcagcctataaactctccatctgcactcatccttctttaccagaatagaagagaccaccatcctttctaaggctaattctcccacctgtgctctagatgcatagagcttcacaacaaagtatataaaaattaccagtttgagaaacaagcattctaccttcttagggaagcttgtttctcaaactaatttttatatactgcttagtatgtgtctggcatattttaagtattcttgataatttgatctaacaatcctcacaaccctatgagggcaagtgacttcctcaggataacctagcaattatagagctaggattcaaaacccaggcaaccagactgcagattcatgctttcaaacaactatgctactctcctttccaccgtctctctcctatcagcattttaacaggtctccatcaaaaactgccaccaccacctccctctatgccatattaataaactgttatctcctgttcttcacaaac

SEQ ID NO: 355920 - DNA, 1078 bp, Homo sapiens
acaaatccaagctcgttacccttttgggggccttggctagaagagaggaacataaagtctatacacttgattagttgttgaaagcaggggttcctgaggggcagtgagacaagccagctggaatctgaagaatgaatacattttagatatggaaggcagtccaagggcaggtgggagcagtatagtatatgcatgctcaggcagggctagagtttgacctcaccacctcaccagtcatatcagagtagctgtccagacaaggtgtgggacacaatttcttatcagaccaacaacctgcaaagcagtcctcagtcctcatttccctcctgcttgtgaccagctagcaaaacctcaactctggctaaatccagcaatccgcctaggttgctgagcactgctagagacaaatcatacaactatgcaaatcagtgttactatatgatcactaacctcgtatgaaccttcactgtgcttgcaacatcagctcccattcctaccacttccaaactctccttttcccttctcagggatgacctcacctacttcacagagaaaatagaagccatcacacatgagtttctttagcttgctaagcagcctataaactctccatctgcactcatccttctttaccagaatagaagagaccaccatcctttctaaggctaattctcccacctgtgctctagatgcatagagcttcacaacaaagtatataaaaattaccagtttgagaaacaagcattctaccttcttagggaagcttgtttctcaaactaatttttatatactgcttagtatgtgtctggcatattttaagtattcttgataatttgatctaacaatcctcacaaccctatgagggcaagtgacttcctcaggataacctagcaattatagagctaggattcaaaacccaggcaaccagactgcagattcatgctttcaaacaactatgctactctcctttccaccgtctctctcctatcagcattttaacaggtctccatcaaaaactgccaccaccacctccctctatgccatattaataaactgttatctcctgttcttcacaaac

SEQ ID NO: 355921 - DNA, 314 bp, Homo sapiens
atccccggtgccaggtgaaatggagagtgcttagtatgtgtctggcatattttaagtattcttgataatttgatctaacaatcctcacaaccctatgagggcaagtgacttcctcaggataacctagcaattatagagctaggattcaaaacccaggcaaccagactgcagattcatgctttcaaacaactatgctactctcctttccaccgtctctctcctatcagcattttaacaggtctccatcaaaaactgccaccaccacctccctctatgccatattaataaactgttatctcctgttcttcacaaac

SEQ ID NO: 355922 - DNA, 407 bp, Homo sapiens
cagggaatgcagggccccctagccacataataggcgatgaggagataccaggtgaagcactgtgtgtgtgtttgtgtgtgtgcacgcacgtgtatccccacacaaaggtgcagatgcattcgtatggggaaaggggaaggacctcttctatcactcattcctggcttatctggaacctatcccccctttagagcctaccactaagatactcttgagctagacagggcctaaaccaccataagaccagcagagagtgaccaaggcagcttggtctccagaaaaggaaaagaactgatctttagactggattagttcccctgctgtatgttcccttagttcttgtatgtctcctatcccaccactctgcatactttatttgcttgtgtctgggtagcctgtcttcctgg

SEQ ID NO: 355923 - DNA, 2133 bp, Homo sapiens
gcgcacctccccaagatggcggcgcccgaggcctggcgcgcccggagttgctggttctgtgaggtagcggcggcaacgaccatggaggccacgtcccgggaggcggcgccagcgaagagctcggcctcgggccccaacgctccccccgccctgttcgagctgtgcgggcgggcggtgagcgcccatatgggggttctggagagcggggtgtgggccctcccaggcccaatacttcaaagcatcctacctctgctcaatatatattacttggagaggattgaggaaactgccctcaagaaaggcctctcaactcaggccatctggcgccgactctgggatgaactgatgaagacaaggccttccagtttggaaagtgtgacatgttggcgagccaagtttatggaggcctttttttcccatgttctacgtgggaccattgatgtgtcttctgacaggcgtctttgtgatcagcggttctcacctcttctgcacagctcccgccatgtccgacagctcaccatctgtaacatgctgcagggtgcaaccgagctggtggctgagcccaaccgcagggttctggagaccctggccagctccctgcacactctcaagttccgccacctgctgttctctgatgtggctgctcagcagtcacttcggcagctgttgcatcagctcattcaccatggggctgtcagtcaagtgtcgctatactcctggcctgtgcctgagtcagcccttttcatccttattctcaccatgagtgctggcttctggcaaccagggcctggtggcccaccctgccgcctctgtggagaggcctcccgaggccgggccccatcccgagatgaagggtccctcttattgggctcacgtcggccccgccgggatgctgctgagcgatgtgctgcagccctgatggccagccggcgtaagagtgaagccaagcagatgcccagagctgcacctgccactcgggtaacacgccggagcacacaggagagcctgacagcaggcggaacagaccttaagagggagctgcaccccccagccacctcccatgaggctcctggcaccaagcggtcaccttctgctccagcagccacctcctctgcctcttcttctacatcctcatacaaacgggcaccagctagctcagccccacagcctaagcccctaaagcgtttcaagcgagctgcagggaagaagggtgctcgcacccgtcaggggcctggtgcagagtctgaagacctgtatgacttcgtttttattgtggctggcgagaaggaggatggcgaagagatggagattggggaagtggcttgtggagctttggatggatcagatcccagctgcctggggcttccagcactggaagcttcacaaagattccgcagcatctccaccttggagctattcacagttccactctccacagaggcagccctgacactatgccacctgctgagctcctgggtgtcactggagagcctcacactctcctacaatggtgagcaccctggagtggcagggattgggcttagattgcctagcagcaccagctgtgtgcctaattctagggaggtgggaggggcaaattgggggtatgatcaggaggttagagaggaaggcttgtatgcctcatagcaggggagactgtcattgctagaagagaggaacataaagtctatacacttgattagttgttgaaagcaggggttcctgaggggcagtgagacaagccagctggaatctgaagaatgaatacattttagatatggaaggcagtccaagggcaggtgggagcagtatagtatatgcatgctcaggcagggctagagtttgacctcaccacctcaccagtcatattttaagtattcttgataatttgatctaacaatcctcacaaccctatgagggcaagtgacttcctcaggataacctagcaattatagagctaggattcaaaacccaggcaaccagactgcagattcatgctttcaaacaactatgctactctcctttccaccgtctctctcctatcagcattttaacaggtctccatcaaaaactgccaccaccacctccctctatgccatattaataaactgttatctcctgttcttcacaaac

SEQ ID NO: 355924 - DNA, 811 bp, Homo sapiens
  misc_feature (10)..(10): n is a, c, g, or t
  misc_feature (20)..(20): n is a, c, g, or t
  misc_feature (39)..(39): n is a, c, g, or t
  misc_feature (96)..(96): n is a, c, g, or t
  misc_feature (100)..(100): n is a, c, g, or t
  misc_feature (103)..(103): n is a, c, g, or t
tcccggattncaaagggaanccggctttggggaaaatgnttggccatggctgggcctttggaaaaatgtttttttcaaaaggaattcatccctccntctnctnatgtcaaggtgggaacatcaagtttccaactgcatcaagccagatgggcttctggagttcgccaagcggctggagcgctggggccgtggagcctttggtcacctgcgcctcttccaaaactggctggaccaggatgcagtcacagccagggaagccatccggcggctccgggctacctgccatgtggttagcgactcatgggactcatcccaggccttcgcagattatgttagcaccatgtgatggggcccgtacctcacagtctcatgctcggtaccatcagcttgcaggggctgaagcatgggctgcccagaaccccaaccaccagttctatctttctctttctgtcaccttttttctcttttttccttcttcccttgcactgaggtcctggaggccttgatgaggcccagcaaacaggcattctcacagctgggtttatagtctttgggccccttactcagtatcctgggaaccctgggccaggaggttacagtggtcatcataattgctgaagagatcccctcccctgcccctgggttcctgccttccctcctcaagcaggcacccaggctttagagaagtatagggggcttcttccctgctgggcttaccacactgctctcaggcctcaaaccctttcatacctttattcttttttttaaccaaaaaagtttttcttataaaataaattttgggcaaacatca

SEQ ID NO: 355925 - DNA, 2919 bp, Homo sapiens
gcgcacctccccaagatggcggcgcccgaggcctggcgcgcccggagttgctggttctgtgaggtagcggcggcaacgaccatggaggccacgtcccgggaggcggcgccagcgaagagctcggcctcgggccccaacgctccccccgccctgttcgagctgtgcgggcgggcggtgagcgcccatatgggggttctggagagcggggtgtgggccctcccaggcccaatacttcaaagcatcctacctctgctcaatatatattacttggagaggattgaggaaactgccctcaagaaaggcctctcaactcaggccatctggcgccgactctgggatgaactgatgaagacaaggccttccagtttggaaagtgtgacatgttggcgagccaagtttatggaggcctttttttcccatgttctacgtgggaccattgatgtgtcttctgacaggcgtctttgtgatcagcggttctcacctcttctgcacagctcccgccatgtccgacagctcaccatctgtaacatgctgcagggtgcaaccgagctggtggctgagcccaaccgcagggttctggagaccctggccagctccctgcacactctcaagttccgccacctgctgttctctgatgtggctgctcagcagtcacttcggcagctgttgcatcagctcattcaccatggggctgtcagtcaagtgtcgctatactcctggcctgtgcctgagtcagcccttttcatccttattctcaccatgagtgctggcttctggcaaccagggcctggtggcccaccctgccgcctctgtggagaggcctcccgaggccgggccccatcccgagatgaagggtccctcttattgggctcacgtcggccccgccgggatgctgctgagcgatgtgctgcagccctgatggccagccggcgtaagagtgaagccaagcagatgcccagagctgcacctgccactcgggtaacacgccggagcacacaggagagcctgacagcaggcggaacagaccttaagagggagctgcaccccccagccacctcccatgaggctcctggcaccaagcggtcaccttctgctccagcagccacctcctctgcctcttcttctacatcctcatacaaacgggcaccagctagctcagccccacagcctaagcccctaaagcgtttcaagcgagctgcagggaagaagggtgctcgcacccgtcaggggcctggtgcagagtctgaagacctgtatgacttcgtttttattgtggctggcgagaaggaggatggcgaagagatggagattggggaagtggcttgtggagctttggatggatcagatcccagctgcctggggcttccagcactggaagcttcacaaagattccgcagcatctccaccttggagctattcacagttccactctccacagaggcagccctgacactatgccacctgctgagctcctgggtgtcactggagagcctcacactctcctacaatggcctgggctctaacatcttccgcctgctagacagcctgcgggccctgtcaggccaggctggatgtcgcctccgtgccctgcatctcagtgacctgttctcaccactgcccatcctggagctgacacgtgctatcgtgcgagcactgcccctgctacgggtcctctctattcgtgttgaccacccaagccagcgggacaaccctggtgtgccagggaatgcagggccccctagccacataataggcgatgaggagataccagaaaactgcctggagcagttggagatgggatttccacggggagcccagccagccccactgctgtgctccgttctgaaggcctcgggttctctgcagcagctgtccctggatagtgccacctttgcctctccccaggattttgggcttgttttgcaaacactcaaagagtacaacctagccctgaaaagactgagcttccatgacatgaatctcgctgactgtcagagcgaggtgctctttttgctacagaatctgactctgcaagagattaccttctccttctgccgtctgtttgagaagcgcccagcccaatttctgcctgagatggttgctgctatgaagggcaactccacactgaagggcctccggctgccagggaaccgcctggggaatgctggcctgctggccttggcagatgttttctcagaggattcatcctcctctctctgtcagctggacatcagttccaactgcatcaagccagatgggcttctggagttcgccaagcggctggagcgctggggccgtggagcctttggtcacctgcgcctcttccaaaactggctggaccaggatgcagtcacagccagggaagccatccggcggctccgggctacctgccatgtggttagcgactcatgggactcatcccaggccttcgcagattatgttagcaccatgtgatggggcccgtacctcacagtctcatgctcggtaccatcagcttgcaggggctgaagcatgggctgcccagaaccccaaccaccagttctatctttctctttctgtcaccttttttctcttttttccttcttcccttgcactgaggtcctggaggccttgatgaggcccagcaaacaggcattctcacagctgggtttatagtctttgggccccttactcagtatcctgggaaccctgggccaggaggttacagtggtcatcataattgctgaagagatcccctcccctgcccctgggttcctgccttccctcctcaagcaggcacccaggctttagagaagtatagggggcttcttccctgctgggcttaccacactgctctcaggcctcaaaccctttcatacctttattcttttttttaaccaaaaaagtttttcttataaaataaattttgggcaaacatca

SEQ ID NO: 355926 - DNA, 2589 bp, Homo sapiens
atggatatatcatggctgtctggcatgttttctgcgtttcagagtgtgacatgttggcgagccaagtttatggaggcctttttttcccatgttctacgtgggaccattgatgtgtcttctgacaggcgtctttgtgatcagcggttctcacctcttctgcacagctcccgccatgtccgacagctcaccatctgtaacatgctgcagggtgcaaccgagctggtggctgagcccaaccgcagggttctggagaccctggccagctccctgcacactctcaagttccgccacctgctgttctctgatgtggctgctcagcagtcacttcggcagctgttgcatcagctcattcaccatggggctgtcagtcaagtgtcgctatactcctggcctgtgcctgagtcagcccttttcatccttattctcaccatgagtgctggcttctggcaaccagggcctggtggcccaccctgccgcctctgtggagaggcctcccgaggccgggccccatcccgagatgaagggtccctcttattgggctcacgtcggccccgccgggatgctgctgagcgatgtgctgcagccctgatggccagccggcgtaagagtgaagccaagcagatgcccagagctgcacctgccactcgggtaacacgccggagcacacaggagagcctgacagcaggcggaacagaccttaagagggagctgcaccccccagccacctcccatgaggctcctggcaccaagcggtcaccttctgctccagcagccacctcctctgcctcttcttctacatcctcatacaaacgggcaccagctagctcagccccacagcctaagcccctaaagcgtttcaagcgagctgcagggaagaagggtgctcgcacccgtcaggggcctggtgcagagtctgaagacctgtatgacttcgtttttattgtggctggcgagaaggaggatggcgaagagatggagattggggaagtggcttgtggagctttggatggatcagatcccagctgcctggggcttccagcactggaagcttcacaaagattccgcagcatctccaccttggagctattcacagttccactctccacagaggcagccctgacactatgccacctgctgagctcctgggtgtcactggagagcctcacactctcctacaatggcctgggctctaacatcttccgcctgctagacagcctgcgggccctgtcaggccaggctggatgtcgcctccgtgccctgcatctcagtgacctgttctcaccactgcccatcctggagctgacacgtgctatcgtgcgagcactgcccctgctacgggtcctctctattcgtgttgaccacccaagccagcgggacaaccctggtgtgccagggaatgcagggccccctagccacataataggcgatgaggagataccagaaaactgcctggagcagttggagatgggatttccacggggagcccagccagccccactgctgtgctccgttctgaaggcctcgggttctctgcagcagctgtccctggatagtgccacctttgcctctccccaggattttgggcttgttttgcaaacactcaaagagtacaacctagccctgaaaagactgagcttccatgacatgaatctcgctgactgtcagagcgaggtgctctttttgctacagaatctgactctgcaagagattaccttctccttctgccgtctgtttgagaagcgcccagcccaatttctgcctgagatggttgctgctatgaagggcaactccacactgaagggcctccggctgccagggaaccgcctggggaatgctggcctgctggccttggcagatgttttctcagaggattcatcctcctctctctgtcagctggacatcagttccaactgcatcaagccagatgggcttctggagttcgccaagcggctggagcgctggggccgtggagcctttggtcacctgcgcctcttccaaaactggctggaccaggatgcagtcacagccagggaagccatccggcggctccgggctacctgccatgtggttagcgactcatgggactcatcccaggccttcgcagattatgttagcaccatgtgatggggcccgtacctcacagtctcatgctcggtaccatcagcttgcaggggctgaagcatgggctgcccagaaccccaaccaccagttctatctttctctttctgtcaccttttttctcttttttccttcttcccttgcactgaggtcctggaggccttgatgaggcccagcaaacaggcattctcacagctgggtttatagtctttgggccccttactcagtatcctgggaaccctgggccaggaggttacagtggtcatcataattgctgaagagatcccctcccctgcccctgggttcctgccttccctcctcaagcaggcacccaggctttagagaagtatagggggcttcttccctgctgggcttaccacactgctctcaggcctcaaaccctttcatacctttattcttttttttaaccaaaaaagtttttcttataaaataaattttgggcaaacatca

SEQ ID NO: 355927 - DNA, 2571 bp, Homo sapiens
cgcgatctaagacccaggttggaaagtgtgacatgttggcgagccaagtttatggaggcctttttttcccatgttctacgtgggaccattgatgtgtcttctgacaggcgtctttgtgatcagcggttctcacctcttctgcacagctcccgccatgtccgacagctcaccatctgtaacatgctgcagggtgcaaccgagctggtggctgagcccaaccgcagggttctggagaccctggccagctccctgcacactctcaagttccgccacctgctgttctctgatgtggctgctcagcagtcacttcggcagctgttgcatcagctcattcaccatggggctgtcagtcaagtgtcgctatactcctggcctgtgcctgagtcagcccttttcatccttattctcaccatgagtgctggcttctggcaaccagggcctggtggcccaccctgccgcctctgtggagaggcctcccgaggccgggccccatcccgagatgaagggtccctcttattgggctcacgtcggccccgccgggatgctgctgagcgatgtgctgcagccctgatggccagccggcgtaagagtgaagccaagcagatgcccagagctgcacctgccactcgggtaacacgccggagcacacaggagagcctgacagcaggcggaacagaccttaagagggagctgcaccccccagccacctcccatgaggctcctggcaccaagcggtcaccttctgctccagcagccacctcctctgcctcttcttctacatcctcatacaaacgggcaccagctagctcagccccacagcctaagcccctaaagcgtttcaagcgagctgcagggaagaagggtgctcgcacccgtcaggggcctggtgcagagtctgaagacctgtatgacttcgtttttattgtggctggcgagaaggaggatggcgaagagatggagattggggaagtggcttgtggagctttggatggatcagatcccagctgcctggggcttccagcactggaagcttcacaaagattccgcagcatctccaccttggagctattcacagttccactctccacagaggcagccctgacactatgccacctgctgagctcctgggtgtcactggagagcctcacactctcctacaatggcctgggctctaacatcttccgcctgctagacagcctgcgggccctgtcaggccaggctggatgtcgcctccgtgccctgcatctcagtgacctgttctcaccactgcccatcctggagctgacacgtgctatcgtgcgagcactgcccctgctacgggtcctctctattcgtgttgaccacccaagccagcgggacaaccctggtgtgccagggaatgcagggccccctagccacataataggcgatgaggagataccagaaaactgcctggagcagttggagatgggatttccacggggagcccagccagccccactgctgtgctccgttctgaaggcctcgggttctctgcagcagctgtccctggatagtgccacctttgcctctccccaggattttgggcttgttttgcaaacactcaaagagtacaacctagccctgaaaagactgagcttccatgacatgaatctcgctgactgtcagagcgaggtgctctttttgctacagaatctgactctgcaagagattaccttctccttctgccgtctgtttgagaagcgcccagcccaatttctgcctgagatggttgctgctatgaagggcaactccacactgaagggcctccggctgccagggaaccgcctggggaatgctggcctgctggccttggcagatgttttctcagaggattcatcctcctctctctgtcagctggacatcagttccaactgcatcaagccagatgggcttctggagttcgccaagcggctggagcgctggggccgtggagcctttggtcacctgcgcctcttccaaaactggctggaccaggatgcagtcacagccagggaagccatccggcggctccgggctacctgccatgtggttagcgactcatgggactcatcccaggccttcgcagattatgttagcaccatgtgatggggcccgtacctcacagtctcatgctcggtaccatcagcttgcaggggctgaagcatgggctgcccagaaccccaaccaccagttctatctttctctttctgtcaccttttttctcttttttccttcttcccttgcactgaggtcctggaggccttgatgaggcccagcaaacaggcattctcacagctgggtttatagtctttgggccccttactcagtatcctgggaaccctgggccaggaggttacagtggtcatcataattgctgaagagatcccctcccctgcccctgggttcctgccttccctcctcaagcaggcacccaggctttagagaagtatagggggcttcttccctgctgggcttaccacactgctctcaggcctcaaaccctttcatacctttattcttttttttaaccaaaaaagtttttcttataaaataaattttgggcaaacatca

SEQ ID NO: 355928 - DNA, 3252 bp, Homo sapiens
gcgcacctccccaagatggcggcgcccgaggcctggcgcgcccggagttgctggttctgtgaggtagcggcggcaacgaccatggaggccacgtcccgggaggcggcgccagcgaagagctcggcctcgggccccaacgctccccccgccctgttcgagctgtgcgggcgggcggtgagcgcccatatgggggttctggagagcggggtgtgggccctcccaggcccaatacttcaaagcatcctacctctgctcaatatatattacttggagaggattgaggaaactgccctcaagaaaggcctctcaactcaggccatctggcgccgactctgggatgaactgatgaagacaaggccttccagtttggaaagtgtgacatgttggcgagccaagtttatggaggcctttttttcccatgttctacgtgggaccattgatgtgtcttctgacaggcgtctttgtgatcagcggttctcacctcttctgcacagctcccgccatgtccgacagctcaccatctgtaacatgctgcagggtgcaaccgagctggtggctgagcccaaccgcagggttctggagaccctggccagctccctgcacactctcaagttccgccacctgctgttctctgatgtggctgctcagcagtcacttcggcagctgttgcatcagctcattcaccatggggctgtcagtcaagtgtcgctatactcctggcctgtgcctgagtcagcccttttcatccttattctcaccatgagtgctggcttctggcaaccagggcctggtggcccaccctgccgcctctgtggagaggcctcccgaggccgggccccatcccgagatgaagggtccctcttattgggctcacgtcggccccgccgggatgctgctgagcgatgtgctgcagccctgatggccagccggcgtaagagtgaagccaagcagatgcccagagctgcacctgccactcgggtaacacgccggagcacacaggagagcctgacagcaggcggaacagaccttaagagggagctgcaccccccagccacctcccatgaggctcctggcaccaagcggtcaccttctgctccagcagccacctcctctgcctcttcttctacatcctcatacaaacgggcaccagctagctcagccccacagcctaagcccctaaagcgtttcaagcgagctgcagggaagaagggtgctcgcacccgtcaggggcctggtgcagagtctgaagacctgtatgacttcgtttttattgtggctggcgagaaggaggatggcgaagagatggagattggggaagtggcttgtggagctttggatggatcagatcccagctgcctggggcttccagcactggaagcttcacaaagattccgcagcatctccaccttggagctattcacagttccactctccacagaggcagccctgacactatgccacctgctgagctcctgggtgtcactggagagcctcacactctcctacaatggcctgggctctaacatcttccgcctgctagacagcctgcgggccctgtcaggccaggctggatgtcgcctccgtgccctgcatctcagtgacctgttctcaccactgcccatcctggagctgacacgtgctatcgtgcgagcactgcccctgctacgggtcctctctattcgtgttgaccacccaagccagcgggacaaccctggtgtgccagggaatgcagggccccctagccacataataggcgatgaggagataccagaaaactgcctggagcagttggagatgggatttccacggggagcccagccagccccactgctgtgctccgttctgaaggcctcgggttctctgcagcagctgtccctggatagtgccacctttgcctctccccaggattttgggcttgttttgcaaacactcaaagagtacaacctagccctgaaaagactgagcttccatgacatgaatctcgctgactgtcagagcgaggtgctctttttgctacagaatctgactctgcaagagattaccttctccttctgccgtctgtttgagaagcgcccagcccaatttctgcctgagatggttgctgctatgaagggcaactccacactgaagggcctccggctgccagggaaccgcctggggaatgctggcctgctggccttggcagatgttttctcagaggattcatcctcctctctctgtcagctggacatcagttccaactgcatcaagccagatgggcttctggagttcgccaagcggctggagcgctggggccgtggagcctttggtcacctgcgcctcttccaaaactggctggaccaggatgcagtcacagccagggaagccatccggcggctccgggctacctgccatgtggttagcgactcatgggactcatcccaggccttcgcagattatgttagcaccatgtgatggggcccgtacctcacagtctcatgctcggtaccatcagcttgcaggggctgaagcatgggctgcccagaaccccaaccaccagttctatctttctctttctgtcaccttttttctcttttttccttcttcccttgcactgaggtcctggaggccttgatgaggcccagcaaacaggcattctcacagctgggtttatagtctttgggccccttactcagtatcctgggaaccctgggccaggaggttacagtggtcatcataattgctgaagagatcccctcccctgcccctgggttcctgccttccctcctcaagcaggcacccaggctttagagaagtatagggggcttcttccctgctgggcttaccacactgctctcaggcctcaaaccctttcatacctttattcttttttttaaccaaaaaagtttttcttataaaataaattttgggcaaacatcatgcagcccttcttgatgattttctcccagagaacaaaattcaacagggccctgtggagcaaggagccccttttccctatctccttcctctaagagctacacccagaccagctggttatcagcggaggccccgctgctcctcatgagaacgctggtggaagacgaaggtgatggcagtggaggcagcatcccaggcagcctggagtacctcatcccggagcccccacttatcagtgcagtggttccaccctgccaggtctgaagtgcagtcagaaccatcagggggtggccggatctgacggctgttgacacaacgtcggcagtgcaacctagg

SEQ ID NO: 355929 - DNA, 3496 bp, Homo sapiens
gcgcacctccccaagatggcggcgcccgaggcctggcgcgcccggagttgctggttctgtgaggtagcggcggcaacgaccatggaggccacgtcccgggaggcggcgccagcgaagagctcggcctcgggccccaacgctccccccgccctgttcgagctgtgcgggcgggcggtgagcgcccatatgggggttctggagagcggggtgtgggccctcccaggcccaatacttcaaagcatcctacctctgctcaatatatattacttggagaggattgaggaaactgccctcaagaaaggcctctcaactcaggccatctggcgccgactctgggatgaactgatgaagacaaggccttccagtttggaaagtgtgacatgttggcgagccaagtttatggaggcctttttttcccatgttctacgtgggaccattgatgtgtcttctgacaggcgtctttgtgatcagcggttctcacctcttctgcacagctcccgccatgtccgacagctcaccatctgtaacatgctgcagggtgcaaccgagctggtggctgagcccaaccgcagggttctggagaccctggccagctccctgcacactctcaagttccgccacctgctgttctctgatgtggctgctcagcagtcacttcggcagctgttgcatcagctcattcaccatggggctgtcagtcaagtgtcgctatactcctggcctgtgcctgagtcagcccttttcatccttattctcaccatgagtgctggcttctggcaaccagggcctggtggcccaccctgccgcctctgtggagaggcctcccgaggccgggccccatcccgagatgaagggtccctcttattgggctcacgtcggccccgccgggatgctgctgagcgatgtgctgcagccctgatggccagccggcgtaagagtgaagccaagcagatgcccagagctgcacctgccactcgggtaacacgccggagcacacaggagagcctgacagcaggcggaacagaccttaagagggagctgcaccccccagccacctcccatgaggctcctggcaccaagcggtcaccttctgctccagcagccacctcctctgcctcttcttctacatcctcatacaaacgggcaccagctagctcagccccacagcctaagcccctaaagcgtttcaagcgagctgcagggaagaagggtgctcgcacccgtcaggggcctggtgcagagtctgaagacctgtatgacttcgtttttattgtggctggcgagaaggaggatggcgaagagatggagattggggaagtggcttgtggagctttggatggatcagatcccagctgcctggggcttccagcactggaagcttcacaaagattccgcagcatctccaccttggagctattcacagttccactctccacagaggcagccctgacactatgccacctgctgagctcctgggtgtcactggagagcctcacactctcctacaatggcctgggctctaacatcttccgcctgctagacagcctgcgggccctgtcaggccaggctggatgtcgcctccgtgccctgcatctcagtgacctgttctcaccactgcccatcctggagctgacacgtgctatcgtgcgagcactgcccctgctacgggtcctctctattcgtgttgaccacccaagccagcgggacaaccctggtgtgccagggaatgcagggccccctagccacataataggcgatgaggagataccagaaaactgcctggagcagttggagatgggatttccacggggagcccagccagccccactgctgtgctccgttctgaaggcctcgggttctctgcagcagctgtccctggatagtgccacctttgcctctccccaggattttgggcttgttttgcaaacactcaaagagtacaacctagccctgaaaagactgagcttccatgacatgaatctcgctgactgtcagagcgaggtgctctttttgctacagaatctgactctgcaaggtaagttccttattcagaacctggacatttcctgggtcttcactatggttctgccataatctgagtgagcaaaccactgttcctttcttggccttgtgtcctcagctataaaatggatatagaacctgcatgattttccttctaaaagccccaacctcaattcctcctctactaaacatgagaaatcgctcttttagagtgcttcacccaaaagttgctcttacctttcagaggtggacaaaatggtggtggtggggcaaaataaatgtactgtgccaggctcccctcatagacttttctctgatccccacccccgcatagagggtggccagtgttagggaaagaaggaagtgaatggagaattgtccatgcagagaaccttcttatagggaacatttaggttcagtctttagtttggattctgatttagttccagccttgcttggagtctagacaaattccttcctctttttgggcctctataatgttaataccccttgctagggccaactggggcaggaggggcagcaccagtcctaatgcagccatcagaatttactataatttttcttgacagagattaccttctccttctgccgtctgtttgagaagcgcccagcccaatttctgcctgagatggttgctgctatgaagggcaactccacactgaagggcctccggctgccagggaaccgcctggggaatgctggcctgctggccttggcagatgttttctcagaggattcatcctcctctctctgtcagctggacatcagttccaactgcatcaagccagatgggcttctggagttcgccaagcggctggagcgctggggccgtggagcctttggtcacctgcgcctcttccaaaactggctggaccaggatgcagtcacagccagggaagccatccggcggctccgggctacctgccatgtggttagcgactcatgggactcatcccaggccttcgcagattatgttagcaccatgtgatggggcccgtacctcacagtctcatgctcggtaccatcagcttgcaggggctgaagcatgggctgcccagaaccccaaccaccagttctatctttctctttctgtcaccttttttctcttttttccttcttcccttgcactgaggtcctggaggccttgatgaggcccagcaaacaggcattctcacagctgggtttatagtctttgggccccttactcagtatcctgggaaccctgggccaggaggttacagtggtcatcataattgctgaagagatcccctcccctgcccctgggttcctgccttccctcctcaagcaggcacccaggctttagagaagtatagggggcttcttccctgctgggcttaccacactgctctcaggcctcaaaccctttcatacctttattcttttttttaaccaaaaaagtttttcttataaaataaattttgggcaaacatca

SEQ ID NO: 355930 - DNA, 2865 bp, Homo sapiens
gcgcacctccccaagatggcggcgcccgaggcctggcgcgcccggagttgctggttctgtgaggtagcggcggcaacgaccatggaggccacgtcccgggaggcggcgccagcgaagagctcggcctcgggccccaacgctccccccgccctgttcgagctgtgcgggcgggcggtgagcgcccatatgggggttctggagagcggggtgtgggccctcccaggcccaatacttcaaagcatcctacctctgctcaatatatattacttggagaggattgaggaaactgccctcaagaaaggcctctcaactcaggccatctggcgccgactctgggatgaactgatgaagacaaggccttccagtttggaaagtgtgacatgttggcgagccaagtttatggaggcctttttttcccatgttctacgtgggaccattgatgtgtcttctgacaggcgtctttgtgatcagcggttctcacctcttctgcacagctcccgccatgtccgacagctcaccatctgtaacatgctgcagggtgcaaccgagctggtggctgagcccaaccgcagggttctggagaccctggccagctccctgcacactctcaagttccgccacctgctgttctctgatgtggctgctcagcagtcacttcggcagctgttgcatcagctcattcaccatggggctgtcagtcaagtgtcgctatactcctggcctgtgcctgagtcagcccttttcatccttattctcaccatgagtgctggcttctggcaaccagggcctggtggcccaccctgccgcctctgtggagaggcctcccgaggccgggccccatcccgagatgaagggtccctcttattgggctcacgtcggccccgccgggatgctgctgagcgatgtgctgcagccctgatggccagccggcgtaagagtgaagccaagcagatgcccagagctgcacctgccactcgggtaacacgccggagcacacaggagagcctgacagcaggcggaacagaccttaagagggagctgcaccccccagccacctcccatgaggctcctggcaccaagcggtcaccttctgctccagcagccacctcctctgcctcttcttctacatcctcatacaaacgggcaccagctagctcagccccacagcctaagcccctaaagcgtttcaagcgagctgcagggaagaagggtgctcgcacccgtcaggggcctggtgcagagtctgaagacctgtatgacttcgtttttattgtggctggcgagaaggaggatggcgaagagatggagattggggaagtggcttgtggagctttggatggatcagatcccagctgcctggggcttccagcactggaagcttcacaaagattccgcagcatctccaccttggagctattcacagttccactctccacagaggcagccctgacactatgccacctgctgagctcctgggtgtcactggagagcctcacactctcctacaatggcctgggctctaacatcttccgcctgctagacagcctgcgggccctgtcaggccaggctggatgtcgcctccgtgccctgcatctcagtgacctgttctcaccactgcccatcctggagctgacacgtgctatcgtgcgagcactgcccctgctacgggtcctctctattcgtgttgaccacccaagccagcgggacaaccctggtgtgccagggaatgcagggccccctagccacataataggcgatgaggagataccagaaaactgcctggagcagttggagatgggatttccacggggagcccagccagccccactgctgtgctccgttctgaaggcctcgggttctctgcagcagctgtccctggatagtgccacctttgcctctccccaggattttgggcttgttttgcaaacactcaaagagtacaacctagccctgaaaagactgagcttccatgacatgaatctcgctgactgtcagagcgaggtgctctttttgctacagaatctgactctgcaagagattaccttctccttctgccgtctgtttgagaagcgcccagcccaatttctgcctgagatggttgctgctatgaagggcaactccacactgaagggcctccggctgccagggaaccgcctggggaatgctggcctgctggccttggcagatgttttctcagaggattcatcctcctctctctgtcagctggacatcagttccaactgcatcaagccagatgggcttctggagttcgccaagcggctggagcgctggggccgtggagcctttggtcacctgcgcctcttccgggctacctgccatgtggttagcgactcatgggactcatcccaggccttcgcagattatgttagcaccatgtgatggggcccgtacctcacagtctcatgctcggtaccatcagcttgcaggggctgaagcatgggctgcccagaaccccaaccaccagttctatctttctctttctgtcaccttttttctcttttttccttcttcccttgcactgaggtcctggaggccttgatgaggcccagcaaacaggcattctcacagctgggtttatagtctttgggccccttactcagtatcctgggaaccctgggccaggaggttacagtggtcatcataattgctgaagagatcccctcccctgcccctgggttcctgccttccctcctcaagcaggcacccaggctttagagaagtatagggggcttcttccctgctgggcttaccacactgctctcaggcctcaaaccctttcatacctttattcttttttttaaccaaaaaagtttttcttataaaataaattttgggcaaacatca

SEQ ID NO: 355931 - DNA, 2664 bp, Homo sapiens
gcgcacctccccaagatggcggcgcccgaggcctggcgcgcccggagttgctggttctgtgaggtagcggcggcaacgaccatggaggccacgtcccgggaggcggcgccagcgaagagctcggcctcgggccccaacgctccccccgccctgttcgagctgtgcgggcgggcggtgagcgcccatatgggggttctggagagcggggtgtgggccctcccaggcccaatacttcaaagcatcctacctctgctcaatatatattacttggagaggattgaggaaactgccctcaagaaaggcctctcaactcaggccatctggcgccgactctgggatgaactgatgaagacaaggccttccagtttggaaagtgtgacatgttggcgagccaagtttatggaggcctttttttcccatgttctacgtgggaccattgatgtgtcttctgacaggcgtctttgtgatcagcggttctcacctcttctgcacagctcccgccatgtccgacagctcaccatctgtaacatgctgcagggtgcaaccgagctggtggctgagcccaaccgcagggttctggagaccctggccagctccctgcacactctcaagttccgccacctgctgttctctgatgtggctgctcagcagtcacttcggcagctgttgcatcagctcattcaccatggggctgtcagtcaagtgtcgctatactcctggcctgtgcctgagtcagcccttttcatccttattctcaccatgagtgctggcttctggcaaccagggcctggtggcccaccctgccgcctctgtggagaggcctcccgaggccgggccccatcccgagatgaagggtccctcttattgggctcacgtcggccccgccgggatgctgctgagcgatgtgctgcagccctgatggccagccggcgtaagagtgaagccaagcagatgcccagagctgcacctgccactcgggtaacacgccggagcacacaggagagcctgacagcaggcggaacagaccttaagagggagctgcaccccccagccacctcccatgaggctcctggcaccaagcggtcaccttctgctccagcagccacctcctctgcctcttcttctacatcctcatacaaacgggcaccagctagctcagccccacagcctaagcccctaaagcgtttcaagcgagctgcagggaagaagggtgctcgcacccgtcaggggcctggtgcagagtctgaagacctgtatgacttcgtttttattgtggctggcgagaaggaggatggcgaagagatggagattggggaagtggcttgtggagctttggatggatcagatcccagctgcctggggcttccagcactggaagcttcacaaagattccgcagcatctccaccttggagctattcacagttccactctccacagaggcagccctgacactatgccacctgctgagctcctgggtgtcactggagagcctcacactctcctacaatggcctgggctctaacatcttccgcctgctagacagcctgcgggccctgtcaggccaggctggatgtcgcctccgtgccctgcatctcagtgacctgttctcaccactgcccatcctggagctgacacgtgctatcgtgcgagcactgcccctgctacgggtcctctctattcgtgttgaccacccaagccagcgggacaaccctggtgtgccagggaatgcagggccccctagccacataataggcgatgaggagataccagaaaactgcctggagcagttggagatgggatttccacggggagcccagccagccccactgctgtgctccgttctgaaggcctcgggttctctgcagcagctgtccctggatagtgccacctttgcctctccccaggattttgggcttgttttgcaaacactcaaagagtacaacctagccctgaaaagactgagcttccatgacatgaatctcgctgactgtcagagcgaggtgctctttttgctacagaatctgactctgcaagagattaccttctccttctgccgtctgtttgagaagcgcccagcccaatttctgcctgagatggttgctgctatgaagggcaactccacactgaagggcctccggctgccagggaaccgcctggggaatgctggcctgctggccttggcagatgttttctcagaggattcatcctcctctctctgtcagctggacatcagttccaactgcatcaagccagatgggcttctggagttcgccaagcggctggagcgctggggccgtggagcctttggtcacctgcgcctcttccaaaactggctggaccaggatgcagtcacagccagggaagccatccggcggctccgggctacctgccatgtggttagcgactcatgggactcatcccaggccttcgcagattatgttagcaccatgtgatggggcccgtacctcacagtctcatgctcggtaccatcagcttgcaggggctgaagcatgggctgcccagaaccccaaccaccagttctatctttctctttctgtcaccttttttctctttttttttttttttttttttttttttttttttttttttttttttttttttttttttttttttttttttttttttttttttttttttttttt

SEQ ID NO: 355932 - DNA, 2169 bp, Homo sapiens
gcgcacctccccaagatggcggcgcccgaggcctggcgcgcccggagttgctggttctgtgaggtagcggcggcaacgaccatggaggccacgtcccgggaggcggcgccagcgaagagctcggcctcgggccccaacgctccccccgccctgttcgagctgtgcgggcgggcggtgagcgcccatatgggggttctggagagcggggtgtgggccctcccaggcccaatacttcaaagcatcctacctctgctcaatatatattacttggagaggattgaggaaactgccctcaagaaaggcctctcaactcaggccatctggcgccgactctgggatgaactgatgaagacaaggccttccagtttggaaagtgtgacatgttggcgagccaagtttatggaggcctttttttcccatgttctacgtgggaccattgatgtgtcttctgacaggcgtctttgtgatcagcggttctcacctcttctgcacagctcccgccatgtccgacagctcaccatctgtaacatgctgcagggtgcaaccgagctggtggctgagcccaaccgcagggttctggagaccctggccagctccctgcacactctcaagttccgccacctgctgttctctgatgtggctgctcagcagtcacttcggcagctgttgcatcagctcattcaccatggggctgtcagtcaagtgtcgctatactcctggcctgtgcctgagtcagcccttttcatccttattctcaccatgagtgctggcttctggcaaccagggcctggtggcccaccctgccgcctctgtggagaggcctcccgaggccgggccccatcccgagatgaagggtccctcttattgggctcacgtcggccccgccgggatgctgctgagcgatgtgctgcagccctgatggccagccggcgtaagagtgaagccaagcagatgcccagagctgcacctgccactcgggtaacacgccggagcacacaggagagcctgacagcaggcggaacagaccttaagagggagctgcaccccccagccacctcccatgaggctcctggcaccaagcggtcaccttctgctccagcagccacctcctctgcctcttcttctacatcctcatacaaacgggcaccagctagctcagccccacagcctaagcccctaaagcgtttcaagcgagctgcagggaagaagggtgctcgcacccgtcaggggcctggtgcagagtctgaagacctgtatgacttcgtttttattgtggctggcgagaaggaggatggcgaagagatggagattggggaagtggcttgtggagctttggatggatcagatcccagctgcctggggcttccagcactggaagcttcacaaagattccgcagcatctccaccttggagctattcacagttccactctccacagaggcagccctgacactatgccacctgctgagctcctgggtgtcactggagagcctcacactctcctacaatggcctgggctctaacatcttccgcctgctagacagcctgcgggccctgtcaggccaggctggatgtcgcctccgtgccctgcatctcagtgacctgttctcaccactgcccatcctggagctgacacgtgctatcgtgcgagcactgcccctgctacgggtcctctctattcgtgttgaccacccaagccagcgggacaaccctggtgtgccagggaatgcagggccccctagccacataataggcgatgaggagataccagaaaactgcctggagcagttggagatgggatttccacggggagcccagccagccccactgctgtgctccgttctgaaggcctcgggttctctgcagcagctgtccctggatagtgccacctttgcctctccccaggattttgggcccttactcagtatcctgggaaccctgggccaggaggttacagtggtcatcataattgctgaagagatcccctcccctgcccctgggttcctgccttccctcctcaagcaggcacccaggctttagagaagtatagggggcttcttccctgctgggcttaccacactgctctcaggcctcaaaccctttcatacctttattcttttttttaaccaaaaaagtttttcttataaaataaattttgggcaaacatca

SEQ ID NO: 355933 - DNA, 2216 bp, Homo sapiens
gcgcacctccccaagatggcggcgcccgaggcctggcgcgcccggagttgctggttctgtgaggtagcggcggcaacgaccatggaggccacgtcccgggaggcggcgccagcgaagagctcggcctcgggccccaacgctccccccgccctgttcgagctgtgcgggcgggcggtgagcgcccatatgggggttctggagagcggggtgtgggccctcccaggcccaatacttcaaagcatcctacctctgctcaatatatattacttggagaggattgaggaaactgccctcaagaaaggcctctcaactcaggccatctggcgccgactctgggatgaactgatgaagacaaggccttccagtttggaaagtgtgacatgttggcgagccaagtttatggaggcctttttttcccatgttctacgtgggaccattgatgtgtcttctgacaggcgtctttgtgatcagcggttctcacctcttctgcacagctcccgccatgtccgacagctcaccatctgtaacatgctgcagggtgcaaccgagctggtggctgagcccaaccgcagggttctggagaccctggccagctccctgcacactctcaagttccgccacctgctgttctctgatgtggctgctcagcagtcacttcggcagctgttgcatcagctcattcaccatggggctgtcagtcaagtgtcgctatactcctggcctgtgcctgagtcagcccttttcatccttattctcaccatgagtgctggcttctggcaaccagggcctggtggcccaccctgccgcctctgtggagaggcctcccgaggccgggccccatcccgagatgaagggtccctcttattgggctcacgtcggccccgccgggatgctgctgagcgatgtgctgcagccctgatggccagccggcgtaagagtgaagccaagcagatgcccagagctgcacctgccactcgggtaacacgccggagcacacaggagagcctgacagcaggcggaacagaccttaagagggagctgcaccccccagccacctcccatgaggctcctggcaccaagcggtcaccttctgctccagcagccacctcctctgcctcttcttctacatcctcatacaaacgggcaccagctagctcagccccacagcctaagcccctaaagcgtttcaagcgagctgcagggaagaagggtgctcgcacccgtcaggggcctggtgcagagtctgaagacctgtatgacttcgtttttattgtggctggcgagaaggaggatggcgaagagatggagattggggaagtggcttgtggagctttggatggatcagatcccagctgcctggggcttccagcactggaagcttcacaaagattccgcagcatctccaccttggagctattcacagttccactctccacagaggcagccctgacactatgccacctgctgagctcctgggtgtcactggagagcctcacactctcctacaatggcctgggctctaacatcttccgcctgctagacagcctgcgggccctgtcaggccaggctggatgtcgcctccgtgccctgcatctcagtgacctgttctcaccactgcccatcctggagctgacacgtgctatcgtgcgagcactgcccctgctacgggtcctctctattcgtgttgaccacccaagccagcgggacaaccctggtgtgccagggaatgcagggccccctagccacataataggcgatgaggagataccagagtacaacctagccctgaaaagactgagcttccatgacatgaatctcgctgactgtcagagcgaggtgctctttttgctacagaatctgactctgcaagagattaccttctccttctgccgtctgtttgagaagcgcccagcccaatttctgcctgagatggttgctgctatgaagggcaactccacactgaagggcctccggctgccagggaaccgcctgggtgggggccagaccctggggagggagaggggaaaggagctaggcctttgacctaaaaactcactggataaaggcaaagacctctccactgggaacgtgggagttggaatacagatatttctgtgctggggcttcaggaaccagcagggctggttctgccagccatagttgggttgggatacccttgtcccctgttcttgggtggaggtgataggcgttctccc

SEQ ID NO: 355934 - DNA, 810 bp, Homo sapiens
gcgcacctccccaagatggcggcgcccgaggcctggcgcgcccggagttgctggttctgtgaggtagcggcggcaacgaccatggaggccacgtcccgggaggcggcgccagcgaagagctcggcctcgggccccaacgctccccccgccctgttcgagctgtgcgggcgggcggtgagcgcccatatgggggttctggagagcggggtgtgggccctcccaggcccaatacttcaaagcatcctacctctgctcaatatatattacttggagaggattgaggaaactgccctcaagaaaggcctctcaactcaggccatctggcgccgactctgggatgaactgatgaagacaaggccttccagtttggaaagtgtgacatgttggcgagccaagtttatggaggcctttttttcccatgttctacgtgggaccattgatgtgtcttctgacaggcgtctttgtgatcagcggttctcacctcttctgcacagctcccgccatgtccgacagctcaccatctgtaacatgctgcagggtgcaaccgagctggtggctgagcccaaccgcagggttctggagaccctggccagctccctgcacactctcaagttccgccacctgctgttctctgatgtggctgctcagcagtcacttcggcagctgttgcatcagctcattcaccatggggctgtcagtcaagtgtcgctatactcctggcctgtgcctgagtcagcccttttcatccttattctcaccacctccctctatgccatattaataaactgttatctcctgttcttcacaaac

SEQ ID NO: 355935 - DNA, 679 bp, Homo sapiens
gcggccgccgcggctgcggccgtggcaaagaaacaggctgcgggcggcaggaagggctgctggggctgcggctggggctgctggccggcgccgccgctctccatcttggcagagctttccatgcgcagcggcggccaaggagtcgcggaatcagagcgatccgggacgcgaggtgcggggcccgcgagggggacacagagagaacttgggtgcaggaacagagagggaaagaaaaggaaatatgaagcgggagccctgacggaagttaaaaaatatatacaaaatccccgggagacttcttagagtgggagcaaaaaaagtgaaaatgctttttctcctccctgcacgccgcctcctcctccctcccctcctcccttcgcgggttggcttcgggagcctcgcgtggcgctcgcgtgtgaggctgccgctggcgccttcttgtttctaagaaaaaaaaaagcagaagcagcagcaaaagtcagtgctgaacgcgctctgccgcgtctcgcgttcctctcctactaaggctgcgctctcttgcgccgggtctcggtctctccagccgtggctcaggctgtttttattattttgttaactcccttcctttctgatttccttctttcactcgccctccctggccggatccctgtcggtgcgccttccacgttccctggccaga

SEQ ID NO: 355936 - DNA, 2685 bp, Homo sapiens
cagctgggggtaaggggggcggattattcatataattgttataccagacggtcgcaggcttagtccaattgcagagaactcgcttcccaggcttctgagagtcccggaagtgcctaaacctgtctaatcgacggggcttgggtggcccgtcgctccctggcttcttccctttacccagggcgggcagcgaagtggtgcctcctgcgtcccccacaccctccctcagcccctcccctccggcccgtcctgggcaggtgacctggagcatccggcaggctgccctggcctcctgcgtcaggacaagcccacgaggggcgttactgtgcggagatgcaccacgcaagagacaccctttgtaactctcttctcctccctagtgcgaggttaaaaccttcagccccacgtgctgtttgcaaacctgcctgtacctgaggccctaaaaagccagagacctcactcccggggagccagcatgtccactgcggtcctggaaaacccaggcttgggcaggaaactctctgactttggacaggaaacaagctatattgaagacaactgcaatcaaaatggtgccatatcactgatcttctcactcaaagaagaagttggtgcattggccaaagtattgcgcttatttgaggagaatgatgtaaacctgacccacattgaatctagaccttctcgtttaaagaaagatgagtatgaatttttcacccatttggataaacgtagcctgcctgctctgacaaacatcatcaagatcttgaggcatgacattggtgccactgtccatgagctttcacgagataagaagaaagacacagtgccctggttcccaagaaccattcaagagctggacagatttgccaatcagattctcagctatggagcggaactggatgctgaccaccctggttttaaagatcctgtgtaccgtgcaagacggaagcagtttgctgacattgcctacaactaccgccatgggcagcccatccctcgagtggaatacatggaggaagaaaagaaaacatggggcacagtgttcaagactctgaagtccttgtataaaacccatgcttgctatgagtacaatcacatttttccacttcttgaaaagtactgtggcttccatgaagataacattccccagctggaagacgtttctcagttcctgcagacttgcactggtttccgcctccgacctgtagctggcctgctttcctctcgggatttcttgggtggcctggccttccgagtcttccactgcacacagtacatcagacatggatccaagcccatgtatacccccgaacctgacatctgccatgagctgttgggacatgtgcccttgttttcagatcgcagctttgcccagttttcccaggaaattggccttgcctctctgggtgcacctgatgaatacattgaaaagctcgccacaatttactggtttactgtggagtttgggctctgcaaacaaggagactccataaaggcatatggtgctgggctcctgtcatcctttggtgaattacagtactgcttatcagagaagccaaagcttctccccctggagctggagaagacagccatccaaaattacactgtcacggagttccagcccctgtattacgtggcagagagttttaatgatgccaaggagaaagtaaggaactttgctgccacaatacctcggcccttctcagttcgctacgacccatacacccaaaggattgaggtcttggacaatacccagcagcttaagattttggctgattccattaacagtgaaattggaatcctttgcagtgccctccagaaaataaagtaaagccatggacagaatgtggtctgtcagctgtgaatctgttgatggagatccaactatttctttcatcagaaaaagtccgaaaagcaaaccttaatttgaaataacagccttaaatcctttacaagatggagaaacaacaaataagtcaaaataatctgaaatgacaggatatgagtacatactcaagagcataatggtaaatcttttggggtcatctttgatttagagatgataatcccatactctcaattgagttaaatcagtaatctgtcgcatttcatcaagattaattaaaatttgggacctgcttcattcaagcttcatatatgctttgcagagaactcataaaggagcatataaggctaaatgtaaaacacaagactgtcattagaattgaattattgggcttaatataaatcgtaacctatgaagtttattttctattttagttaactatgattccaattactactttgttattgtacctaagtaaattttctttaagtcagaagcccattaaaatagttacaagcattgaacttctttagtattatattaatataaaaacatttttgtatgttttattgtaatcataaatactgctgtataaggtaataaaactctgcacctaatccccataacttccagtatcattttccaattaattatcaagtctgttttgggaaacactttgaggacatttatgatgcagcagatgttgactaaaggcttggttggtagatattcaggaaatgttcactgaataaataagtaaatacattattgaaaagcaaatctgtataaatgtgaaatttttatttgtattagtaataaaacattagtagtttaaacaa

SEQ ID NO: 355937 - DNA, 421 bp, Homo sapiens
gcggccgccgcggctgcggccgtggcaaagaaacaggctgcgggcggcaggaagggctgctggggctgcggctggggctgctggccggcgccgccgctctccatcttggcagagctttccatgcgcagcggcggccaaggagtcgcggaatcagagcgatccgggacgcgaggtgcggggcccgcgagggggacacagagagaacttgggtgcaggaacagagagggaaagaaaaggaaatatgaagcgggagccctgacggaagttaaaaaatatatacaaaatccccgggagacttcttagagtgggagcaaaaaaagtgaaaatgctttttctcctcccttcctttctgatttccttctttcactcgccctccctggccggatccctgtcggtgcgccttccacgttccctggccaga

SEQ ID NO: 355938 - DNA, 509 bp, Homo sapiens
  misc_feature (1)..(1): n is a, c, g, or t
naagagaacctctggggtccccagggaccaaaagaagggagaaagaaaaaggagaaatactgaaccccgggaagcccctgacacggagaagttataaaaaaaatatatacaaaatccccgggagacttcttagagtgggagcaaaaaaagtgaaaatgctttttctcctccctgcacgccgcctcctcctccctcccctcctcccttcgcgggttggcttcgggagcctcgcgtggcgctcgcgtgtgaggctgccgctggcgccttcttgtttctaagaaaaaaaaaagcagaagcagcagcaaaagtcagtgctgaacgcgctctgccgcgtctcgcgttcctctcctactaaggctgcgctctcttgcgccgggtctcggtctctccagccgtggctcaggctgtttttattattttgttaactcccttcctttctgatttccttctttcactcgccctccctggccggatccctgtcggtgcgccttccacgttccctggccaga

SEQ ID NO: 355939 - DNA, 2619 bp, Homo sapiens
cagctgggggtaaggggggcggattattcatataattgttataccagacggtcgcaggcttagtccaattgcagagaactcgcttcccaggcttctgagagtcccggaagtgcctaaacctgtctaatcgacggggcttgggtggcccgtcgctccctggcttcttccctttacccagggcgggcagcgaagtggtgcctcctgcgtcccccacaccctccctcagcccctcccctccggcccgtcctgggcaggtgacctggagcatccggcaggctgccctggcctcctgcgtcaggacaagcccacgaggggcgttactgtgcggagatgcaccacgcaagagacaccctttgtaactctcttctcctccctagtgcgaggttaaaaccttcagccccacgtgctgtttgcaaacctgcctgtacctgaggccctaaaaagccagagacctcactcccggggagccagcatgtccactgcggtcctggaaaacccaggcttgggcaggaaactctctgactttggacaggaaacaagctatattgaagacaactgcaatcaaaatggtgccatatcactgatcttctcactcaaagaagaagttggtgcattggccaaagtattgcgcttatttgaggagaatgatgtaaacctgacccacattgaatctagaccttctcgtttaaagaaagatgagtatgaatttttcacccatttggataaacgtagcctgcctgctctgacaaacatcatcaagatcttgaggcatgacattggtgccactgtccatgagctttcacgagataagaagaaagacacagtgccctggttcccaagaaccattcaagagctggacagatttgccaatcagattctcagctatggagcggaactggatgctgaccaccctggttttaaagatcctgtgtaccgtgcaagacggaagcagtttgctgacattgcctacaactaccgccatgggcagcccatccctcgagtggaatacatggaggaagaaaagaaaacatggggcacagtgttcaagactctgaagtccttgtataaaacccatgcttgctatgagtacaatcacatttttccacttcttgcttgcactggtttccgcctccgacctgtagctggcctgctttcctctcgggatttcttgggtggcctggccttccgagtcttccactgcacacagtacatcagacatggatccaagcccatgtatacccccgaacctgacatctgccatgagctgttgggacatgtgcccttgttttcagatcgcagctttgcccagttttcccaggaaattggccttgcctctctgggtgcacctgatgaatacattgaaaagctcgccacaatttactggtttactgtggagtttgggctctgcaaacaaggagactccataaaggcatatggtgctgggctcctgtcatcctttggtgaattacagtactgcttatcagagaagccaaagcttctccccctggagctggagaagacagccatccaaaattacactgtcacggagttccagcccctgtattacgtggcagagagttttaatgatgccaaggagaaagtaaggaactttgctgccacaatacctcggcccttctcagttcgctacgacccatacacccaaaggattgaggtcttggacaatacccagcagcttaagattttggctgattccattaacagtgaaattggaatcctttgcagtgccctccagaaaataaagtaaagccatggacagaatgtggtctgtcagctgtgaatctgttgatggagatccaactatttctttcatcagaaaaagtccgaaaagcaaaccttaatttgaaataacagccttaaatcctttacaagatggagaaacaacaaataagtcaaaataatctgaaatgacaggatatgagtacatactcaagagcataatggtaaatcttttggggtcatctttgatttagagatgataatcccatactctcaattgagttaaatcagtaatctgtcgcatttcatcaagattaattaaaatttgggacctgcttcattcaagcttcatatatgctttgcagagaactcataaaggagcatataaggctaaatgtaaaacacaagactgtcattagaattgaattattgggcttaatataaatcgtaacctatgaagtttattttctattttagttaactatgattccaattactactttgttattgtacctaagtaaattttctttaagtcagaagcccattaaaatagttacaagcattgaacttctttagtattatattaatataaaaacatttttgtatgttttattgtaatcataaatactgctgtataaggtaataaaactctgcacctaatccccataacttccagtatcattttccaattaattatcaagtctgttttgggaaacactttgaggacatttatgatgcagcagatgttgactaaaggcttggttggtagatattcaggaaatgttcactgaataaataagtaaatacattattgaaaagcaaatctgtataaatgtgaaatttttatttgtattagtaataaaacattagtagtttaaacaa

SEQ ID NO: 355940 - DNA, 2646 bp, Homo sapiens
cagctgggggtaaggggggcggattattcatataattgttataccagacggtcgcaggcttagtccaattgcagagaactcgcttcccaggcttctgagagtcccggaagtgcctaaacctgtctaatcgacggggcttgggtggcccgtcgctccctggcttcttccctttacccagggcgggcagcgaagtggtgcctcctgcgtcccccacaccctccctcagcccctcccctccggcccgtcctgggcaggtgacctggagcatccggcaggctgccctggcctcctgcgtcaggacaagcccacgaggggcgttactgtgcggagatgcaccacgcaagagacaccctttgtaactctcttctcctccctagtgcgaggttaaaaccttcagccccacgtgctgtttgcaaacctgcctgtacctgaggccctaaaaagccagagacctcactcccggggagccagcatgtccactgcggtcctggaaaacccaggcttgggcaggaaactctctgactttggacaggaaacaagctatattgaagacaactgcaatcaaaatggtgccatatcactgatcttctcactcaaagaagaagttggtgcattggccaaagtattgcgcttatttgaggagaatgatgtaaacctgacccacattgaatctagaccttctcgtttaaagaaagatgagtatgaatttttcacccatttggataaacgtagcctgcctgctctgacaaacatcatcaagatcttgaggcatgacattggtgccactgtccatgagctttcacgagataagaagaaagacacagtgccctggttcccaagaaccattcaagagctggacagatttgccaatcagattctcagctatggagcggaactggatgctgaccaccctggttttaaagatcctgtgtaccgtgcaagacggaagcagtttgctgacattgcctacaactaccgccatgggcagcccatccctcgagtggaatacatggaggaagaaaagaaaacatggggcacagtgttcaagactctgaagtccttgtataaaacccatgcttgctatgagtacaatcacatttttccacttcttgaaaagtactgtggcttccatgaagataacattccccagctggaagacgtttctcagttcctgcagacttgcactggtttccgcctccgacctgtagctggcctgctttcctctcgggatttcttgggtggcctggccttccgagtcttccactgcacacagtacatcagacatggatccaagcccatgtatacccccgaacctgacatctgccatgagctgttgggacatgtgcccttgttttcagatcgcagctttgcccagttttcccaggaaattggccttgcctctctgggtgcacctgatgaatacattgaaaagctcgccacaggagactccataaaggcatatggtgctgggctcctgtcatcctttggtgaattacagtactgcttatcagagaagccaaagcttctccccctggagctggagaagacagccatccaaaattacactgtcacggagttccagcccctgtattacgtggcagagagttttaatgatgccaaggagaaagtaaggaactttgctgccacaatacctcggcccttctcagttcgctacgacccatacacccaaaggattgaggtcttggacaatacccagcagcttaagattttggctgattccattaacagtgaaattggaatcctttgcagtgccctccagaaaataaagtaaagccatggacagaatgtggtctgtcagctgtgaatctgttgatggagatccaactatttctttcatcagaaaaagtccgaaaagcaaaccttaatttgaaataacagccttaaatcctttacaagatggagaaacaacaaataagtcaaaataatctgaaatgacaggatatgagtacatactcaagagcataatggtaaatcttttggggtcatctttgatttagagatgataatcccatactctcaattgagttaaatcagtaatctgtcgcatttcatcaagattaattaaaatttgggacctgcttcattcaagcttcatatatgctttgcagagaactcataaaggagcatataaggctaaatgtaaaacacaagactgtcattagaattgaattattgggcttaatataaatcgtaacctatgaagtttattttctattttagttaactatgattccaattactactttgttattgtacctaagtaaattttctttaagtcagaagcccattaaaatagttacaagcattgaacttctttagtattatattaatataaaaacatttttgtatgttttattgtaatcataaatactgctgtataaggtaataaaactctgcacctaatccccataacttccagtatcattttccaattaattatcaagtctgttttgggaaacactttgaggacatttatgatgcagcagatgttgactaaaggcttggttggtagatattcaggaaatgttcactgaataaataagtaaatacattattgaaaagcaaatctgtataaatgtgaaatttttatttgtattagtaataaaacattagtagtttaaacaa

SEQ ID NO: 355941 - DNA, 2631 bp, Homo sapiens
cagctgggggtaaggggggcggattattcatataattgttataccagacggtcgcaggcttagtccaattgcagagaactcgcttcccaggcttctgagagtcccggaagtgcctaaacctgtctaatcgacggggcttgggtggcccgtcgctccctggcttcttccctttacccagggcgggcagcgaagtggtgcctcctgcgtcccccacaccctccctcagcccctcccctccggcccgtcctgggcaggtgacctggagcatccggcaggctgccctggcctcctgcgtcaggacaagcccacgaggggcgttactgtgcggagatgcaccacgcaagagacaccctttgtaactctcttctcctccctagtgcgaggttaaaaccttcagccccacgtgctgtttgcaaacctgcctgtacctgaggccctaaaaagccagagacctcactcccggggagccagcatgtccactgcggtcctggaaaacccaggcttgggcaggaaactctctgactttggacaggaaacaagctatattgaagacaactgcaatcccaaagtattgcgcttatttgaggagaatgatgtaaacctgacccacattgaatctagaccttctcgtttaaagaaagatgagtatgaatttttcacccatttggataaacgtagcctgcctgctctgacaaacatcatcaagatcttgaggcatgacattggtgccactgtccatgagctttcacgagataagaagaaagacacagtgccctggttcccaagaaccattcaagagctggacagatttgccaatcagattctcagctatggagcggaactggatgctgaccaccctggttttaaagatcctgtgtaccgtgcaagacggaagcagtttgctgacattgcctacaactaccgccatgggcagcccatccctcgagtggaatacatggaggaagaaaagaaaacatggggcacagtgttcaagactctgaagtccttgtataaaacccatgcttgctatgagtacaatcacatttttccacttcttgaaaagtactgtggcttccatgaagataacattccccagctggaagacgtttctcagttcctgcagacttgcactggtttccgcctccgacctgtagctggcctgctttcctctcgggatttcttgggtggcctggccttccgagtcttccactgcacacagtacatcagacatggatccaagcccatgtatacccccgaacctgacatctgccatgagctgttgggacatgtgcccttgttttcagatcgcagctttgcccagttttcccaggaaattggccttgcctctctgggtgcacctgatgaatacattgaaaagctcgccacaatttactggtttactgtggagtttgggctctgcaaacaaggagactccataaaggcatatggtgctgggctcctgtcatcctttggtgaattacagtactgcttatcagagaagccaaagcttctccccctggagctggagaagacagccatccaaaattacactgtcacggagttccagcccctgtattacgtggcagagagttttaatgatgccaaggagaaagtaaggaactttgctgccacaatacctcggcccttctcagttcgctacgacccatacacccaaaggattgaggtcttggacaatacccagcagcttaagattttggctgattccattaacagtgaaattggaatcctttgcagtgccctccagaaaataaagtaaagccatggacagaatgtggtctgtcagctgtgaatctgttgatggagatccaactatttctttcatcagaaaaagtccgaaaagcaaaccttaatttgaaataacagccttaaatcctttacaagatggagaaacaacaaataagtcaaaataatctgaaatgacaggatatgagtacatactcaagagcataatggtaaatcttttggggtcatctttgatttagagatgataatcccatactctcaattgagttaaatcagtaatctgtcgcatttcatcaagattaattaaaatttgggacctgcttcattcaagcttcatatatgctttgcagagaactcataaaggagcatataaggctaaatgtaaaacacaagactgtcattagaattgaattattgggcttaatataaatcgtaacctatgaagtttattttctattttagttaactatgattccaattactactttgttattgtacctaagtaaattttctttaagtcagaagcccattaaaatagttacaagcattgaacttctttagtattatattaatataaaaacatttttgtatgttttattgtaatcataaatactgctgtataaggtaataaaactctgcacctaatccccataacttccagtatcattttccaattaattatcaagtctgttttgggaaacactttgaggacatttatgatgcagcagatgttgactaaaggcttggttggtagatattcaggaaatgttcactgaataaataagtaaatacattattgaaaagcaaatctgtataaatgtgaaatttttatttgtattagtaataaaacattagtagtttaaacaa

SEQ ID NO: 355942 - DNA, 2639 bp, Homo sapiens
cagctgggggtaaggggggcggattattcatataattgttataccagacggtcgcaggcttagtccaattgcagagaactcgcttcccaggcttctgagagtcccggaagtgcctaaacctgtctaatcgacggggcttgggtggcccgtcgctccctggcttcttccctttacccagggcgggcagcgaagtggtgcctcctgcgtcccccacaccctccctcagcccctcccctccggcccgtcctgggcaggtgacctggagcatccggcaggctgccctggcctcctgcgtcaggacaagcccacgaggggcgttactgtgcggagatgcaccacgcaagagacaccctttgtaactctcttctcctccctagtgcgaggttaaaaccttcagccccacgtgctgtttgcaaacctgcctgtacctgaggccctaaaaagccagagacctcactcccggggagccagcatgtccactgcggtcctggaaaacccaggcttgggcaggaaactctctgactttggacaggaaacaagctatattgaagacaactgcaatcaaaatggtgccatatcactgatcttctcactcaaagaagaagttggtgcattggccaaagtattgcgcttatttgaggagaatgatgtaaacctgacccacattgaatctagaccttctcgtttaaagaaagatgagtatgaatttttcacccatttggataaacgtagcctgcctgctctgacaaacatcatcaagatcttgaggcatgacattggtgccactgtccatgagctttcacgagataagaagaaagacacagtgccctggttcccaagaaccattcaagagctggacagatttgccaatcagattctcagctatggagcggaactggatgctgaccaccctggttttaaagatcctgtgtaccgtgcaagacggaagcagtttgctgacattgcctacaactaccgccatgggcagcccatccctcgagtggaatacatggaggaagaaaagaaaacatggggcacagtgttcaagactctgaagtccttgtataaaagtactgtggcttccatgaagataacattccccagctggaagacgtttctcagttcctgcagacttgcactggtttccgcctccgacctgtagctggcctgctttcctctcgggatttcttgggtggcctggccttccgagtcttccactgcacacagtacatcagacatggatccaagcccatgtatacccccgaacctgacatctgccatgagctgttgggacatgtgcccttgttttcagatcgcagctttgcccagttttcccaggaaattggccttgcctctctgggtgcacctgatgaatacattgaaaagctcgccacaatttactggtttactgtggagtttgggctctgcaaacaaggagactccataaaggcatatggtgctgggctcctgtcatcctttggtgaattacagtactgcttatcagagaagccaaagcttctccccctggagctggagaagacagccatccaaaattacactgtcacggagttccagcccctgtattacgtggcagagagttttaatgatgccaaggagaaagtaaggaactttgctgccacaatacctcggcccttctcagttcgctacgacccatacacccaaaggattgaggtcttggacaatacccagcagcttaagattttggctgattccattaacagtgaaattggaatcctttgcagtgccctccagaaaataaagtaaagccatggacagaatgtggtctgtcagctgtgaatctgttgatggagatccaactatttctttcatcagaaaaagtccgaaaagcaaaccttaatttgaaataacagccttaaatcctttacaagatggagaaacaacaaataagtcaaaataatctgaaatgacaggatatgagtacatactcaagagcataatggtaaatcttttggggtcatctttgatttagagatgataatcccatactctcaattgagttaaatcagtaatctgtcgcatttcatcaagattaattaaaatttgggacctgcttcattcaagcttcatatatgctttgcagagaactcataaaggagcatataaggctaaatgtaaaacacaagactgtcattagaattgaattattgggcttaatataaatcgtaacctatgaagtttattttctattttagttaactatgattccaattactactttgttattgtacctaagtaaattttctttaagtcagaagcccattaaaatagttacaagcattgaacttctttagtattatattaatataaaaacatttttgtatgttttattgtaatcataaatactgctgtataaggtaataaaactctgcacctaatccccataacttccagtatcattttccaattaattatcaagtctgttttgggaaacactttgaggacatttatgatgcagcagatgttgactaaaggcttggttggtagatattcaggaaatgttcactgaataaataagtaaatacattattgaaaagcaaatctgtataaatgtgaaatttttatttgtattagtaataaaacattagtagtttaaacaa

SEQ ID NO: 355943 - DNA, 2926 bp, Homo sapiens
cagctgggggtaaggggggcggattattcatataattgttataccagacggtcgcaggcttagtccaattgcagagaactcgcttcccaggcttctgagagtcccggaagtgcctaaacctgtctaatcgacggggcttgggtggcccgtcgctccctggcttcttccctttacccagggcgggcagcgaagtggtgcctcctgcgtcccccacaccctccctcagcccctcccctccggcccgtcctgggcaggtgacctggagcatccggcaggctgccctggcctcctgcgtcaggacaagcccacgaggggcgttactgtgcggagatgcaccacgcaagagacaccctttgtaactctcttctcctccctagtgcgaggttaaaaccttcagccccacgtgctgtttgcaaacctgcctgtacctgaggccctaaaaagccagagacctcactcccggggagccagcatgtccactgcggtcctggaaaacccaggcttgggcaggaaactctctgactttggacaggaaacaagctatattgaagacaactgcaatcaaaatggtgccatatcactgatcttctcactcaaagaagaagttggtgcattggccaaagtattgcgcttatttgaggagaatgatgtaaacctgacccacattgaatctagaccttctcgtttaaagaaagatgagtatgaatttttcacccatttggataaacgtagcctgcctgctctgacaaacatcatcaagatcttgaggcatgacattggtgccactgtccatgagctttcacgagataagaagaaagacacagtgccctggttcccaagaaccattcaagagctggacagatttgccaatcagattctcagctatggagcggaactggatgctgaccaccctggttttaaagatcctgtgtaccgtgcaagacggaagcagtttgctgacattgcctacaactaccgccatgggcagcccatccctcgagtggaatacatggaggaagaaaagaaaacatggggcacagtgttcaagactctgaagtccttgtataaaacccatgcttgctatgagtacaatcacatttttccacttcttgaaaagtactgtggcttccatgaagataacattccccagctggaagacgtttctcagttcctgcagacttgcactggtttccgcctccgacctgtagctggcctgctttcctctcgggatttcttgggtggcctggccttccgagtcttccactgcacacagtacatcagacatggatccaagcccatgtatacccccgaacctgacatctgccatgagctgttgggacatgtgcccttgttttcagatcgcagctttgcccagttttcccaggaaattggccttgcctctctgggtgcacctgatgaatacattgaaaagctcgccacaatttactggtttactgtggagtttgggctctgcaaacaaggagactccataaaggcatatggtgctgggctcctgtcatcctttggtgaattacagtactgcttatcagagaagccaaagcttctccccctggagctggagaagacagccatccaaaattacactgtcacggagttccagcccctgtattacgtggcagagagttttaatgatgccaaggagaaagtaaggaactttgctgccacaatacctcggcccttctcagttcgctacgacccatacacccaaaggattgaggtcttggacaatacccagcagcttaagattttggctgattccattaacagtgaaattggaatcctttgcagtgccctccagaaaataaagtaaagccatggacagaatgtggtctgtcagctgtgaatctgttgatggagatccaactatttctttcatcagaaaaagtccgaaaagcaaaccttaatttgaaataacagccttaaatcctttacaagatggagaaacaacaaataagtcaaaataatctgaaatgacaggatatgagtacatactcaagagcataatggtaaatcttttggggtcatctttgatttagagatgataatcccatactctcaattgagttaaatcagtaatctgtcgcatttcatcaagattaattaaaatttgggacctgcttcattcaagcttcatatatgctttgcagagaactcataaaggagcatataaggctaaatgtaaaacacaagactgtcattagaattgaattattgggcttaatataaatcgtaacctatgaagtttattttctattttagttaactatgattccaattactactttgttattgtacctaagtaaattttctttaagtcagaagcccattaaaatagttacaagcattgaacttctttagtattatattaatataaaaacatttttgtatgttttattgtaatcataaatactgctgtataaggtaataaaactctgcacctaatccccataacttccagtatcattttccaattaattatcaagtctgttttgggaaacactttgaggacatttatgatgcagcagatgttgactaaaggcttggttggtagatattcaggaaatgttcactgaataaataagtaaatacattattgaaaagcaaatctgtataaatgtgaaatttttatttgtattagtaataaaacattagtagtttaaacaaaaaaaaaaaaaaaaaaaaaaaaaaaaaaaaagttaaagacaacacccgaaccaataacgcatgatactaacacctttagggggtccacgcgcctctaatttgacctacaatgatcaaaatatgcgggcgtggagcgggcttcccctggagagccgttataactcaggtggcccgctcaatgggtgcaggaaccaacggactctccttgagttcggattatgtatgcggacatctcttttgg

SEQ ID NO: 355944 - DNA, 2605 bp, Homo sapiens
cagctgggggtaaggggggcggattattcatataattgttataccagacggtcgcaggcttagtccaattgcagagaactcgcttcccaggcttctgagagtcccggaagtgcctaaacctgtctaatcgacggggcttgggtggcccgtcgctccctggcttcttccctttacccagggcgggcagcgaagtggtgcctcctgcgtcccccacaccctccctcagcccctcccctccggcccgtcctgggcaggtgacctggagcatccggcaggctgccctggcctcctgcgtcaggacaagcccacgaggggcgttactgtgcggagatgcaccacgcaagagacaccctttgtaactctcttctcctccctagtgcgaggttaaaaccttcagccccacgtgctgtttgcaaacctgcctgtacctgaggccctaaaaagccagagacctcactcccggggagccagcatgtccactgcggtcctggaaaacccaggcttgggcaggaaactctctgactttggacaggaaacaagctatattgaagacaactgcaatcccaaagtattgcgcttatttgaggagaatgatgtaaacctgacccacattgaatctagaccttctcgtttaaagaaagatgagtatgaatttttcacccatttggataaacgtagcctgcctgctctgacaaacatcatcaagatcttgaggcatgacattggtgccactgtccatgagctttcacgagataagaagaaccattcaagagctggacagatttgccaatcagattctcagctatggagcggaactggatgctgaccaccctggttttaaagatcctgtgtaccgtgcaagacggaagcagtttgctgacattgcctacaactaccgccatgggcagcccatccctcgagtggaatacatggaggaagaaaagaaaacatggggcacagtgttcaagactctgaagtccttgtataaaacccatgcttgctatgagtacaatcacatttttccacttcttgaaaagtactgtggcttccatgaagataacattccccagctggaagacgtttctcagttcctgcagacttgcactggtttccgcctccgacctgtagctggcctgctttcctctcgggatttcttgggtggcctggccttccgagtcttccactgcacacagtacatcagacatggatccaagcccatgtatacccccgaacctgacatctgccatgagctgttgggacatgtgcccttgttttcagatcgcagctttgcccagttttcccaggaaattggccttgcctctctgggtgcacctgatgaatacattgaaaagctcgccacaatttactggtttactgtggagtttgggctctgcaaacaaggagactccataaaggcatatggtgctgggctcctgtcatcctttggtgaattacagtactgcttatcagagaagccaaagcttctccccctggagctggagaagacagccatccaaaattacactgtcacggagttccagcccctgtattacgtggcagagagttttaatgatgccaaggagaaagtaaggaactttgctgccacaatacctcggcccttctcagttcgctacgacccatacacccaaaggattgaggtcttggacaatacccagcagcttaagattttggctgattccattaacagtgaaattggaatcctttgcagtgccctccagaaaataaagtaaagccatggacagaatgtggtctgtcagctgtgaatctgttgatggagatccaactatttctttcatcagaaaaagtccgaaaagcaaaccttaatttgaaataacagccttaaatcctttacaagatggagaaacaacaaataagtcaaaataatctgaaatgacaggatatgagtacatactcaagagcataatggtaaatcttttggggtcatctttgatttagagatgataatcccatactctcaattgagttaaatcagtaatctgtcgcatttcatcaagattaattaaaatttgggacctgcttcattcaagcttcatatatgctttgcagagaactcataaaggagcatataaggctaaatgtaaaacacaagactgtcattagaattgaattattgggcttaatataaatcgtaacctatgaagtttattttctattttagttaactatgattccaattactactttgttattgtacctaagtaaattttctttaagtcagaagcccattaaaatagttacaagcattgaacttctttagtattatattaatataaaaacatttttgtatgttttattgtaatcataaatactgctgtataaggtaataaaactctgcacctaatccccataacttccagtatcattttccaattaattatcaagtctgttttgggaaacactttgaggacatttatgatgcagcagatgttgactaaaggcttggttggtagatattcaggaaatgttcactgaataaataagtaaatacattattgaaaagcaaatctgtataaatgtgaaatttttatttgtattagtaataaaacattagtagtttaaacaa

SEQ ID NO: 355945 - DNA, 2775 bp, Homo sapiens
tgtgggggcaatgagccagggaaattacttggcaggaagggaagttgtagccaggacagtttgggggtgagttagatgaccttttgggtcccttccattagaaagtctttgcttcttagataaagaagggagtaagggtccaagcagagtgtgcttcagcctgaagacacagagaacatgggggcaagaggcaaggggatctcaaagacttctttagctaattacttccattgccatggccaataataagaataataaaacagtaatactagcagttgggaagctacataatagtaattaagagaacagactttgaagctagactgcctgtggctgtgaccttgaataaaacctttaacctatctctgtctcagctttcccatcggtaaagtgggcataataaaagtgtctacttcatagggctattgtggggattagtagcatatctaaagtagcttaaaacagtgtcttacatacagtaggtcaaatatagtgttagctattattaccattatcactgtcactatccttatcctccaaagtttgcaacaaactgagagacagatacaggaaccatagagatggtgatcagaggtcagctttaatattttaccccttaattaggtaaacttacctgccaattcatagagcatagtccattgcatggccaagagcagactggaatgaggtcctctgtgaacaatcaagagagaaagagcagtacagaaagagttaaattgacaatattcatattctcttcccaaatgctccagtcagacaggtcactgctacttatggggtagactgtgtgaggtgcagtacagaagctggaagcactctatccatactcttcccttctgggaaatgaggttcaaattccctcttcactctagaagcaggagaagtagggaatcattgttccaccctaacaaatggtaatgaaagctaaatttattgcatgtttccaatgtgctaggctctgtgctaagtactttgtattcattagctctttttattcttggaacatttctaagaagtatctatccacattatgcagatgaggaaactgaggctcagaaatgggaatttacttgatccagatcacctagctagaaagcagcgaggcagacatctgaagccaagtctgcctagcgtcaaagcctatgtccctgggcagttatgtgtactactccactacctaaaggtctcctagtgcctctgactcagtggtgatgagctttgagttttctttcttcttttcatcccagcttgcactggtttccgcctccgacctgtagctggcctgctttcctctcgggatttcttgggtggcctggccttccgagtcttccactgcacacagtacatcagacatggatccaagcccatgtatacccccgaacctgacatctgccatgagctgttgggacatgtgcccttgttttcagatcgcagctttgcccagttttcccaggaaattggccttgcctctctgggtgcacctgatgaatacattgaaaagctcgccacaatttactggtttactgtggagtttgggctctgcaaacaaggagactccataaaggcatatggtgctgggctcctgtcatcctttggtgaattacagtactgcttatcagagaagccaaagcttctccccctggagctggagaagacagccatccaaaattacactgtcacggagttccagcccctgtattacgtggcagagagttttaatgatgccaaggagaaagtaaggaactttgctgccacaatacctcggcccttctcagttcgctacgacccatacacccaaaggattgaggtcttggacaatacccagcagcttaagattttggctgattccattaacagtgaaattggaatcctttgcagtgccctccagaaaataaagtaaagccatggacagaatgtggtctgtcagctgtgaatctgttgatggagatccaactatttctttcatcagaaaaagtccgaaaagcaaaccttaatttgaaataacagccttaaatcctttacaagatggagaaacaacaaataagtcaaaataatctgaaatgacaggatatgagtacatactcaagagcataatggtaaatcttttggggtcatctttgatttagagatgataatcccatactctcaattgagttaaatcagtaatctgtcgcatttcatcaagattaattaaaatttgggacctgcttcattcaagcttcatatatgctttgcagagaactcataaaggagcatataaggctaaatgtaaaacacaagactgtcattagaattgaattattgggcttaatataaatcgtaacctatgaagtttattttctattttagttaactatgattccaattactactttgttattgtacctaagtaaattttctttaagtcagaagcccattaaaatagttacaagcattgaacttctttagtattatattaatataaaaacatttttgtatgttttattgtaatcataaatactgctgtataaggtaataaaactctgcacctaatccccataacttccagtatcattttccaattaattatcaagtctgttttgggaaacactttgaggacatttatgatgcagcagatgttgactaaaggcttggttggtagatattcaggaaatgttcactgaataaataagtaaatacattattgaaaagcaaatctgtataaatgtgaaatttttatttgtattagtaataaaacattagtagtttaaacaa

SEQ ID NO: 355946 - DNA, 2829 bp, Homo sapiens
tgtgggggcaatgagccagggaaattacttggcaggaagggaagttgtagccaggacagtttgggggtgagttagatgaccttttgggtcccttccattagaaagtctttgcttcttagataaagaagggagtaagggtccaagcagagtgtgcttcagcctgaagacacagagaacatgggggcaagaggcaaggggatctcaaagacttctttagctaattacttccattgccatggccaataataagaataataaaacagtaatactagcagttgggaagctacataatagtaattaagagaacagactttgaagctagactgcctgtggctgtgaccttgaataaaacctttaacctatctctgtctcagctttcccatcggtaaagtgggcataataaaagtgtctacttcatagggctattgtggggattagtagcatatctaaagtagcttaaaacagtgtcttacatacagtaggtcaaatatagtgttagctattattaccattatcactgtcactatccttatcctccaaagtttgcaacaaactgagagacagatacaggaaccatagagatggtgatcagaggtcagctttaaaattgagcgatttagagaatgtgatatagatatgcacacaaatggacttgctaatattttaccccttaattaggtaaacttacctgccaattcatagagcatagtccattgcatggccaagagcagactggaatgaggtcctctgtgaacaatcaagagagaaagagcagtacagaaagagttaaattgacaatattcatattctcttcccaaatgctccagtcagacaggtcactgctacttatggggtagactgtgtgaggtgcagtacagaagctggaagcactctatccatactcttcccttctgggaaatgaggttcaaattccctcttcactctagaagcaggagaagtagggaatcattgttccaccctaacaaatggtaatgaaagctaaatttattgcatgtttccaatgtgctaggctctgtgctaagtactttgtattcattagctctttttattcttggaacatttctaagaagtatctatccacattatgcagatgaggaaactgaggctcagaaatgggaatttacttgatccagatcacctagctagaaagcagcgaggcagacatctgaagccaagtctgcctagcgtcaaagcctatgtccctgggcagttatgtgtactactccactacctaaaggtctcctagtgcctctgactcagtggtgatgagctttgagttttctttcttcttttcatcccagcttgcactggtttccgcctccgacctgtagctggcctgctttcctctcgggatttcttgggtggcctggccttccgagtcttccactgcacacagtacatcagacatggatccaagcccatgtatacccccgaacctgacatctgccatgagctgttgggacatgtgcccttgttttcagatcgcagctttgcccagttttcccaggaaattggccttgcctctctgggtgcacctgatgaatacattgaaaagctcgccacaatttactggtttactgtggagtttgggctctgcaaacaaggagactccataaaggcatatggtgctgggctcctgtcatcctttggtgaattacagtactgcttatcagagaagccaaagcttctccccctggagctggagaagacagccatccaaaattacactgtcacggagttccagcccctgtattacgtggcagagagttttaatgatgccaaggagaaagtaaggaactttgctgccacaatacctcggcccttctcagttcgctacgacccatacacccaaaggattgaggtcttggacaatacccagcagcttaagattttggctgattccattaacagtgaaattggaatcctttgcagtgccctccagaaaataaagtaaagccatggacagaatgtggtctgtcagctgtgaatctgttgatggagatccaactatttctttcatcagaaaaagtccgaaaagcaaaccttaatttgaaataacagccttaaatcctttacaagatggagaaacaacaaataagtcaaaataatctgaaatgacaggatatgagtacatactcaagagcataatggtaaatcttttggggtcatctttgatttagagatgataatcccatactctcaattgagttaaatcagtaatctgtcgcatttcatcaagattaattaaaatttgggacctgcttcattcaagcttcatatatgctttgcagagaactcataaaggagcatataaggctaaatgtaaaacacaagactgtcattagaattgaattattgggcttaatataaatcgtaacctatgaagtttattttctattttagttaactatgattccaattactactttgttattgtacctaagtaaattttctttaagtcagaagcccattaaaatagttacaagcattgaacttctttagtattatattaatataaaaacatttttgtatgttttattgtaatcataaatactgctgtataaggtaataaaactctgcacctaatccccataacttccagtatcattttccaattaattatcaagtctgttttgggaaacactttgaggacatttatgatgcagcagatgttgactaaaggcttggttggtagatattcaggaaatgttcactgaataaataagtaaatacattattgaaaagcaaatctgtataaatgtgaaatttttatttgtattagtaataaaacattagtagtttaaacaa

SEQ ID NO: 355947 - DNA, 2551 bp, Homo sapiens
  misc_feature (2420)..(2420): n is a, c, g, or t
  misc_feature (2423)..(2424): n is a, c, g, or t
  misc_feature (2428)..(2429): n is a, c, g, or t
  misc_feature (2434)..(2434): n is a, c, g, or t
  misc_feature (2454)..(2454): n is a, c, g, or t
  misc_feature (2461)..(2461): n is a, c, g, or t
  misc_feature (2466)..(2466): n is a, c, g, or t
  misc_feature (2469)..(2469): n is a, c, g, or t
  misc_feature (2483)..(2483): n is a, c, g, or t
  misc_feature (2486)..(2486): n is a, c, g, or t
  misc_feature (2488)..(2488): n is a, c, g, or t
  misc_feature (2505)..(2505): n is a, c, g, or t
  misc_feature (2509)..(2509): n is a, c, g, or t
cagctgggggtaaggggggcggattattcatataattgttataccagacggtcgcaggcttagtccaattgcagagaactcgcttcccaggcttctgagagtcccggaagtgcctaaacctgtctaatcgacggggcttgggtggcccgtcgctccctggcttcttccctttacccagggcgggcagcgaagtggtgcctcctgcgtcccccacaccctccctcagcccctcccctccggcccgtcctgggcaggtgacctggagcatccggcaggctgccctggcctcctgcgtcaggacaagcccacgaggggcgttactgtgcggagatgcaccacgcaagagacaccctttgtaactctcttctcctccctagtgcgaggttaaaaccttcagccccacgtgctgtttgcaaacctgcctgtacctgaggccctaaaaagccagagacctcactcccggggagccagcatgtccactgcggtcctggaaaacccaggcttgggcaggaaactctctgactttggacaggaaacaagctatattgaagacaactgcaatcaaaatggtgccatatcactgatcttctcactcaaagaagaagttggtgcattggccaaagtattgcgcttatttgaggagaatgatgtaaacctgacccacattgaatctagaccttctcgtttaaagaaagatgagtatgaatttttcacccatttggataaacgtagcctgcctgctctgacaaacatcatcaagatcttgaggcatgacattggtgccactgtccatgagctttcacgagataagaagaaagacacagtgccctggttcccaagaaccattcaagagctggacagatttgccaatcagattctcagctatggagcggaactggatgctgaccaccctggttttaaagatcctgtgtaccgtgcaagacggaagcagtttgctgacattgcctacaactaccgccatgggcagcccatccctcgagtggaatacatggaggaagaaaagaaaacatggggcacagtgttcaagactctgaagtccttgtataaaacccatgcttgctatgagtacaatcacatttttccacttcttgaaaagtactgtggcttccatgaagataacattccccagctggaagacgtttctcagttcctgcagacttgcactggtttccgcctccgacctgtagctggcctgctttcctctcgggatttcttgggtggcctggccttccgagtcttccactgcacacagtacatcagacatggatccaagcccatgtatacccccgaacctgacatctgccatgagctgttgggacatgtgcccttgttttcagatcgcagctttgcccagttttcccaggaaattggccttgcctctctgggtgcacctgatgaatacattgaaaagctcgccacaatttactggtttactgtggagtttgggctctgcaaacaaggagactccataaaggcatatggtgctgggctcctgtcatcctttggtgaattacagtactgcttatcagagaagccaaagcttctccccctggagctggagaagacagccatccaaaattacactgtcacggagttccagcccctgtattacgtggcagagagttttaatgatgccaaggagaaagtaaggaactttgctgccacaatacctcggcccttctcagttcgctacgacccatacacccaaaggattgaggtcttggacaatacccagcagcttaagattttggctgattccattaacagtgaaattggaatcctttgcagtgccctccagaaaataaagtaaagccatggacagaatgtggtctgtcagctgtgaatctgttgatggagatccaactatttctttcatcagaaaaagtccgaaaagcaaaccttaatttgaaataacagccttaaatcctttacaagatggagaaacaacaaataagtcaaaataatctgaaatgacaggatatgagtacatactcaagagcataatggtaaatcttttggggtcatctttgatttagagatgataatcccatactctcaattgagttaaatcagtaatctgtcgcatttcatcaagattaattaaaatttgggacctgcttcattcaagcttcatatatgctttgcagagaactcataaaggagcatataaggctaaatgtaaaacacaagactgtcattagaattgaattattgggcttaatataaatcgtaacctatgaagtttattttctattttagttaactatgattccaattactactttgttattgtacctaagtaaattttctttaagtcagaagcccattaaaatagttacaagcattgaacttctttagtattatattaatatctattcaaaaccatttcgtatgtctantgnnatcnntaatnctggtgtataaggtataaantctgacntaatnccnataattcagtatcnttncnattaatatcaagtctgntggngaaaaccttgagggacttatgatggcggcgatttcgactaag

SEQ ID NO: 355948 - DNA, 2631 bp, Homo sapiens
cagctgggggtaaggggggcggattattcatataattgttataccagacggtcgcaggcttagtccaattgcagagaactcgcttcccaggcttctgagagtcccggaagtgcctaaacctgtctaatcgacggggcttgggtggcccgtcgctccctggcttcttccctttacccagggcgggcagcgaagtggtgcctcctgcgtcccccacaccctccctcagcccctcccctccggcccgtcctgggcaggtgacctggagcatccggcaggctgccctggcctcctgcgtcaggacaagcccacgaggggcgttactgtgcggagatgcaccacgcaagagacaccctttgtaactctcttctcctccctagtgcgaggttaaaaccttcagccccacgtgctgtttgcaaacctgcctgtacctgaggccctaaaaagccagagacctcactcccggggagccagcatgtccactgcggtcctggaaaacccaggcttgggcaggaaactctctgactttggacaggaaacaagctatattgaagacaactgcaatcaaaatggtgccatatcactgatcttctcactcaaagaagaagttggtgcattggccaaagtattgcgcttatttgaggagaatgatgtaaacctgacccacattgaatctagaccttctcgtttaaagaaagatgagtatgaatttttcacccatttggataaacgtagcctgcctgctctgacaaacatcatcaagatcttgaggcatgacattggtgccactgtccatgagctttcacgagataagaagaaagacacagtgccctggttcccaagaaccattcaagagctggacagatttgccaatcagattctcagctatggagcggaactggatgctgaccaccctggttttaaagatcctgtgtaccgtgcaagacggaagcagtttgctgacattgcctacaactaccgccatgggcagcccatccctcgagtggaatacatggaggaagaaaagaaaacatggggcacagtgttcaagactctgaagtccttgtataaaacccatgcttgctatgagtacaatcacatttttccacttcttgaaaagtactgtggcttccatgaagataacattccccagctggaagacgtttctcagttcctgcagacttgcactggtttccgcctccgacctgtagctggcctgctttcctctcgggatttcttgggtggcctggccttccgagtcttccactgcacacagtacatcagacatggatccaagcccatgtatacccccgaacctgacatctgccatgagctgttgggacatgtgcccttgttttcagatcgcagctttgcccagttttcccaggaaattggccttgcctctctgggtgcacctgatgaatacattgaaaagctcgccacaatttactggtttactgtggagtttgggctctgcaaacaaggagactccataaaggcatatggtgctgggctcctgtcatcctttggtgaattacagtactgcttatcagagaagccaaagcttctccccctggagctggagaagacagccatccaaaattacactgtcacggagttccagcccctgtattacgtggcagagagttttaatgatgccaaggagaaagtaaggaactttgctgccacaatacctcggcccttctcagttcgctacgacccatacacccaaaggattgaggtcttggacaatacccagcagcttaagattttggctgattccattaacagtgaaattggaatcctttgcagtgccctccagaaaataaagtaaagccatggacagaatgtggtctgtcagctgtgaatctgttgatggagatccaactatttctttcatcagaaaaagtccgaaaagcaaaccttaatttgaaataacagccttaaatcctttacaagatggagaaacaacaaataagtcaaaataatctgaaatgacaggatatgagtacatactcaagagcataatggtaaatcttttggggtcatctttgatttagagatgataatcccatactctcaattgagttaaatcagtaatctgtcgcatttcatcaagattaattaaaggagcatataaggctaaatgtaaaacacaagactgtcattagaattgaattattgggcttaatataaatcgtaacctatgaagtttattttctattttagttaactatgattccaattactactttgttattgtacctaagtaaattttctttaagtcagaagcccattaaaatagttacaagcattgaacttctttagtattatattaatataaaaacatttttgtatgttttattgtaatcataaatactgctgtataaggtaataaaactctgcacctaatccccataacttccagtatcattttccaattaattatcaagtctgttttgggaaacactttgaggacatttatgatgcagcagatgttgactaaaggcttggttggtagatattcaggaaatgttcactgaataaataagtaaatacattattgaaaagcaaatctgtataaatgtgaaatttttatttgtattagtaataaaacattagtagtttaaacaa

SEQ ID NO: 355949 - DNA, 1875 bp, Homo sapiens
ggacatagcacatacagtgttaaataaatgtaggttttcttccctcactgctgtccacctccagactaacagaagagcagcactgtttttgttttagttcccagtggaatagctgagcatattgtatctgcccagggaagtcaataccagggagaagacaggatgagaagtgttcatgactcatagctcacttaggtatatgggagcatgtccacaggaatattagctcttctgcctggtaccccactggggatactcttaagacccttggctgctgtgccctaccctgcacctgtctcttatttttccttccttttcttctttttaccttgtaccctgccttttatgatcccaacctctgcatatcacttattcctgggagagggatcataagcctaaaagagttatttccattctttctgcccattcctcatgtagaaagactgagtctggcttggcttaaacctcctcccctccgagctctctgtgctttctgtctttcagtgacatctgccatgagctgttgggacatgtgcccttgttttcagatcgcagctttgcccagttttcccaggaaattggccttgcctctctgggtgcacctgatgaatacattgaaaagctcgccacaatttactggtttactgtggagtttgggctctgcaaacaaggagactccataaaggcatatggtgctgggctcctgtcatcctttggtgaattacagtactgcttatcagagaagccaaagcttctccccctggagctggagaagacagccatccaaaattacactgtcacggagttccagcccctgtattacgtggcagagagttttaatgatgccaaggagaaagtaaggaactttgctgccacaatacctcggcccttctcagttcgctacgacccatacacccaaaggattgaggtcttggacaatacccagcagcttaagattttggctgattccattaacagtgaaattggaatcctttgcagtgccctccagaaaataaagtaaagccatggacagaatgtggtctgtcagctgtgaatctgttgatggagatccaactatttctttcatcagaaaaagtccgaaaagcaaaccttaatttgaaataacagccttaaatcctttacaagatggagaaacaacaaataagtcaaaataatctgaaatgacaggatatgagtacatactcaagagcataatggtaaatcttttggggtcatctttgatttagagatgataatcccatactctcaattgagttaaatcagtaatctgtcgcatttcatcaagattaattaaaatttgggacctgcttcattcaagcttcatatatgctttgcagagaactcataaaggagcatataaggctaaatgtaaaacacaagactgtcattagaattgaattattgggcttaatataaatcgtaacctatgaagtttattttctattttagttaactatgattccaattactactttgttattgtacctaagtaaattttctttaagtcagaagcccattaaaatagttacaagcattgaacttctttagtattatattaatataaaaacatttttgtatgttttattgtaatcataaatactgctgtataaggtaataaaactctgcacctaatccccataacttccagtatcattttccaattaattatcaagtctgttttgggaaacactttgaggacatttatgatgcagcagatgttgactaaaggcttggttggtagatattcaggaaatgttcactgaataaataagtaaatacattattgaaaagcaaatctgtataaatgtgaaatttttatttgtattagtaataaaacattagtagtttaaacaa

SEQ ID NO: 355950 - DNA, 2721 bp, Homo sapiens
tgtgggggcaatgagccagggaaattacttggcaggaagggaagttgtagccaggacagtttgggggtgagttagatgaccttttgggtcccttccattagaaagtctttgcttcttagataaagaagggagtaagggtccaagcagagtgtgcttcagcctgaagacacagagaacatgggggcaagaggcaaggggatctcaaagacttctttagctaattacttccattgccatggccaataataagaataataaaacagtaatactagcagttgggaagctacataatagtaattaagagaacagactttgaagctagactgcctgtggctgtgaccttgaataaaacctttaacctatctctgtctcagctttcccatcggtaaagtgggcataataaaagtgtctacttcatagggctattgtggggattagtagcatatctaaagtagcttaaaacagtgtcttacatacagtaggtcaaatatagtgttagctattattaccattatcactgtcactatccttatcctccaaagtttgcaacaaactgagagacagatacaggaaccatagagatggtgatcagaggtcagctttaatattttaccccttaattaggtaaacttacctgccaattcatagagcatagtccattgcatggccaagagcagactggaatgaggtcctctgtgaacaatcaagagagaaagagcagtacagaaagagttaaattgacaatattcatattctcttcccaaatgctccagtcagacaggtcactgctacttatggggtagactgtgtgaggtgcagtacagaagctggaagcactctatccatactcttcccttctgggaaatgaggttcaaattccctcttcactctagaagcaggagaagtagggaatcattgttccaccctaacaaatggtaatgaaagctaaatttattgcatgtttccaatgtgctaggctctgtgctaagtactttgtattcattagctctttttattcttggaacatttctaagaagtatctatccacattatgcagatgaggaaactgaggctcagaaatgggaatttacttgatccagatcacctagctagaaagcagcgaggcagacatctgaagccaagtctgcctagcgtcaaagcctatgtccctgggcagttatgtgtactactccactacctaaaggtctcctagtgcctctgactcagtggtgatgagctttgagttttctttcttcttttcatcccagcttgcactggtttccgcctccgacctgtagctggcctgctttcctctcgggatttcttgggtggcctggccttccgagtcttccactgcacacagtacatcagacatggatccaagcccatgtatacccccgaacctgacatctgccatgagctgttgggacatgtgcccttgttttcagatcgcagctttgcccagttttcccaggaaattggccttgcctctctgggtgcacctgatgaatacattgaaaagctcgccacaatttactggtttactgtggagtttgggctctgcaaacaaggagactccataaaggcatatggtgctgggctcctgtcatcctttggtgaattacagtactgcttatcagagaagccaaagcttctccccctggagctggagaagacagccatccatgatgccaaggagaaagtaaggaactttgctgccacaatacctcggcccttctcagttcgctacgacccatacacccaaaggattgaggtcttggacaatacccagcagcttaagattttggctgattccattaacagtgaaattggaatcctttgcagtgccctccagaaaataaagtaaagccatggacagaatgtggtctgtcagctgtgaatctgttgatggagatccaactatttctttcatcagaaaaagtccgaaaagcaaaccttaatttgaaataacagccttaaatcctttacaagatggagaaacaacaaataagtcaaaataatctgaaatgacaggatatgagtacatactcaagagcataatggtaaatcttttggggtcatctttgatttagagatgataatcccatactctcaattgagttaaatcagtaatctgtcgcatttcatcaagattaattaaaatttgggacctgcttcattcaagcttcatatatgctttgcagagaactcataaaggagcatataaggctaaatgtaaaacacaagactgtcattagaattgaattattgggcttaatataaatcgtaacctatgaagtttattttctattttagttaactatgattccaattactactttgttattgtacctaagtaaattttctttaagtcagaagcccattaaaatagttacaagcattgaacttctttagtattatattaatataaaaacatttttgtatgttttattgtaatcataaatactgctgtataaggtaataaaactctgcacctaatccccataacttccagtatcattttccaattaattatcaagtctgttttgggaaacactttgaggacatttatgatgcagcagatgttgactaaaggcttggttggtagatattcaggaaatgttcactgaataaataagtaaatacattattgaaaagcaaatctgtataaatgtgaaatttttatttgtattagtaataaaacattagtagtttaaacaa

SEQ ID NO: 355951 - DNA, 1903 bp, Homo sapiens
ctaaaactcacaagatgtctttactgattttatacactgcctggcacatcaaatgaacttaataaatattttgagagtgaattaatatatacagtaggaaagacacatacacacaaggcaggctgcagtaagtgctgttaatctatgatgtgttagactctccagctatatatatgcctggaccgatgtcaccacttatctgcagttctcctgtgatgtttccagggtacatgattaagactcatttaacattccaggaatattctgctgatgaataatcactgagctggagtcaagagaagaagctttagatactaaccgaccctgtgatcatgagcaagtcacttcccttctctgtgcctcaatttcctcacttataaagtgaaaacaaagggccaagtgagggtggaaggatccccctaccctggagatctgtgattctataacatatgggcaggaaagacttgataacacactcagggtctatgtgggctgttctgaaggcatctggccacccatcacctttttatggccaagtactaggttggttctgtggttccaattacaggaacagaacaggttctattttcccccaattacaggaaattggccttgcctctctgggtgcacctgatgaatacattgaaaagctcgccacaatttactggtttactgtggagtttgggctctgcaaacaaggagactccataaaggcatatggtgctgggctcctgtcatcctttggtgaattacagtactgcttatcagagaagccaaagcttctccccctggagctggagaagacagccatccaaaattacactgtcacggagttccagcccctgtattacgtggcagagagttttaatgatgccaaggagaaagtaaggaactttgctgccacaatacctcggcccttctcagttcgctacgacccatacacccaaaggattgaggtcttggacaatacccagcagcttaagattttggctgattccattaacagtgaaattggaatcctttgcagtgccctccagaaaataaagtaaagccatggacagaatgtggtctgtcagctgtgaatctgttgatggagatccaactatttctttcatcagaaaaagtccgaaaagcaaaccttaatttgaaataacagccttaaatcctttacaagatggagaaacaacaaataagtcaaaataatctgaaatgacaggatatgagtacatactcaagagcataatggtaaatcttttggggtcatctttgatttagagatgataatcccatactctcaattgagttaaatcagtaatctgtcgcatttcatcaagattaattaaaatttgggacctgcttcattcaagcttcatatatgctttgcagagaactcataaaggagcatataaggctaaatgtaaaacacaagactgtcattagaattgaattattgggcttaatataaatcgtaacctatgaagtttattttctattttagttaactatgattccaattactactttgttattgtacctaagtaaattttctttaagtcagaagcccattaaaatagttacaagcattgaacttctttagtattatattaatataaaaacatttttgtatgttttattgtaatcataaatactgctgtataaggtaataaaactctgcacctaatccccataacttccagtatcattttccaattaattatcaagtctgttttgggaaacactttgaggacatttatgatgcagcagatgttgactaaaggcttggttggtagatattcaggaaatgttcactgaataaataagtaaatacattattgaaaagcaaatctgtataaatgtgaaatttttatttgtattagtaataaaacattagtagtttaaacaa

SEQ ID NO: 355952 - DNA, 1903 bp, Homo sapiens
ctaaaactcacaagatgtctttactgattttatacactgcctggcacatcaaatgaacttaataaatattttgagagtgaattaatatatacagtaggaaagacacatacacacaaggcaggctgcagtaagtgctgtaaaagagacaatgagacagtagaggaattctgcaacagaagctgtggtgagaattaatctatgatgtgttagactctccagctatatatatgcctggaccgatgtcaccacttatctgcagttctcctgtgatgtttccagggtacatgattaagactcatttaacattccaggaatattctgctgatgaataatcactgagctggagtcaagagaagaagctttagatactaaccgaccctgtgatcatgagcaagtcacttcccttctctgtgcctcaatttcctcacttataaagtgttctataacatatgggcaggaaagacttgataacacactcagggtctatgtgggctgttctgaaggcatctggccacccatcacctttttatggccaagtactaggttggttctgtggttccaattacaggaacagaacaggttctattttcccccaattacaggaaattggccttgcctctctgggtgcacctgatgaatacattgaaaagctcgccacaatttactggtttactgtggagtttgggctctgcaaacaaggagactccataaaggcatatggtgctgggctcctgtcatcctttggtgaattacagtactgcttatcagagaagccaaagcttctccccctggagctggagaagacagccatccaaaattacactgtcacggagttccagcccctgtattacgtggcagagagttttaatgatgccaaggagaaagtaaggaactttgctgccacaatacctcggcccttctcagttcgctacgacccatacacccaaaggattgaggtcttggacaatacccagcagcttaagattttggctgattccattaacagtgaaattggaatcctttgcagtgccctccagaaaataaagtaaagccatggacagaatgtggtctgtcagctgtgaatctgttgatggagatccaactatttctttcatcagaaaaagtccgaaaagcaaaccttaatttgaaataacagccttaaatcctttacaagatggagaaacaacaaataagtcaaaataatctgaaatgacaggatatgagtacatactcaagagcataatggtaaatcttttggggtcatctttgatttagagatgataatcccatactctcaattgagttaaatcagtaatctgtcgcatttcatcaagattaattaaaatttgggacctgcttcattcaagcttcatatatgctttgcagagaactcataaaggagcatataaggctaaatgtaaaacacaagactgtcattagaattgaattattgggcttaatataaatcgtaacctatgaagtttattttctattttagttaactatgattccaattactactttgttattgtacctaagtaaattttctttaagtcagaagcccattaaaatagttacaagcattgaacttctttagtattatattaatataaaaacatttttgtatgttttattgtaatcataaatactgctgtataaggtaataaaactctgcacctaatccccataacttccagtatcattttccaattaattatcaagtctgttttgggaaacactttgaggacatttatgatgcagcagatgttgactaaaggcttggttggtagatattcaggaaatgttcactgaataaataagtaaatacattattgaaaagcaaatctgtataaatgtgaaatttttatttgtattagtaataaaacattagtagtttaaacaa

SEQ ID NO: 355953 - DNA, 1836 bp, Homo sapiens
ggacatagcacatacagtgttaaataaatgtaggttttcttccctcactgctgtccacctccagactaacagaagagcagcactgtttttgttttagttcccagtggaatagctgagcatattgtatctgcccagggaagtcaataccagggagaagacaggatgagaagtgttcatgactcatagctcacttaggtatatgggagcatgtccacaggaatattagctcttctgcctggtaccccactggggatactcttaagacccttggctgctgtgccctaccctgcacctgtctcttatttttccttccttttcttctttttaccttgtaccctgccttttatgatcccaacctctgcatatcacttattcctgggagagggatcataagcctaaaagagttatttccattctttctgcccattcctcatgtagaaagactgagtctggcttggcttaaacctcctcccctccgagctctctgtgctttctgtctttcagtgacatctgccatgagctgttgggacatgtgcccttgttttcagatcgcagctttgcccagttttcccaggaaattggccttgcctctctgggtgcacctgatgaatacattgaaaagctcgccacaggagactccataaaggcatatggtgctgggctcctgtcatcctttggtgaattacagtactgcttatcagagaagccaaagcttctccccctggagctggagaagacagccatccaaaattacactgtcacggagttccagcccctgtattacgtggcagagagttttaatgatgccaaggagaaagtaaggaactttgctgccacaatacctcggcccttctcagttcgctacgacccatacacccaaaggattgaggtcttggacaatacccagcagcttaagattttggctgattccattaacagtgaaattggaatcctttgcagtgccctccagaaaataaagtaaagccatggacagaatgtggtctgtcagctgtgaatctgttgatggagatccaactatttctttcatcagaaaaagtccgaaaagcaaaccttaatttgaaataacagccttaaatcctttacaagatggagaaacaacaaataagtcaaaataatctgaaatgacaggatatgagtacatactcaagagcataatggtaaatcttttggggtcatctttgatttagagatgataatcccatactctcaattgagttaaatcagtaatctgtcgcatttcatcaagattaattaaaatttgggacctgcttcattcaagcttcatatatgctttgcagagaactcataaaggagcatataaggctaaatgtaaaacacaagactgtcattagaattgaattattgggcttaatataaatcgtaacctatgaagtttattttctattttagttaactatgattccaattactactttgttattgtacctaagtaaattttctttaagtcagaagcccattaaaatagttacaagcattgaacttctttagtattatattaatataaaaacatttttgtatgttttattgtaatcataaatactgctgtataaggtaataaaactctgcacctaatccccataacttccagtatcattttccaattaattatcaagtctgttttgggaaacactttgaggacatttatgatgcagcagatgttgactaaaggcttggttggtagatattcaggaaatgttcactgaataaataagtaaatacattattgaaaagcaaatctgtataaatgtgaaatttttatttgtattagtaataaaacattagtagtttaaacaa

SEQ ID NO: 355954 - DNA, 2107 bp, Homo sapiens
gccatttgttcttcatgaaagatagcaactaacactcatagggcacttacaccatagtataacagcatttgctgcaaccccctgaggcaggtaccactaatgccccaattttacagaggaaattggggtacagaagagtggtcccctgtgcccatggtcacaagggccataatagacagaggcagggtttcagcccaggcagcttgacttggaacttggggagccactcttgccaaacttggaggtccctactgtctcccgtaacattgtattttcagtacagcagcttataggttcaccagaggccaacttagaaatctgtgattactttgcaacatcttgttaatggtattgcatgatgtccctcatagaggccctcatggtggatttctcccagatccaggagtaaggcactgggaaggcaggaaagcaaagggtccaggccagtgtcagactgcctgggttccttcccagctgcataacttactgacagtatggccttagtagtcacgcagccttcccaagcctgtttcctcatccataggaaggatatttgtaaagagcattggacagttagaacttaacatagttcttggaacatagaaggtactccatcaatgttaaatttcattattaacatagtgctttcttcaccacttgagagctatttccctctgcattgattgtcaaccatttcagagcttttttccctctatatagcattctttagctagattttacttactcttgattttatttaatgataggagtttgtggctttattgtattcagtagtttcattgtaagctatctctgtcttcttggagccaggggactaaataaacatgtgtatatatgtgtttgtacatacacaatacacacacacagaggcttccccaagaagactcattaaaactcccattccccccggcctcagcccctggctgttgaagaccctgctctagggaggtgtccgtgttcctaaaaaagaagtaaaatgcccactgagaactctcttaagactacctttctccaaatggtgcccttcactcaagcctgtggttttggtctttgatgccaaggagaaagtaaggaactttgctgccacaatacctcggcccttctcagttcgctacgacccatacacccaaaggattgaggtcttggacaatacccagcagcttaagattttggctgattccattaacagtgaaattggaatcctttgcagtgccctccagaaaataaagtaaagccatggacagaatgtggtctgtcagctgtgaatctgttgatggagatccaactatttctttcatcagaaaaagtccgaaaagcaaaccttaatttgaaataacagccttaaatcctttacaagatggagaaacaacaaataagtcaaaataatctgaaatgacaggatatgagtacatactcaagagcataatggtaaatcttttggggtcatctttgatttagagatgataatcccatactctcaattgagttaaatcagtaatctgtcgcatttcatcaagattaattaaaatttgggacctgcttcattcaagcttcatatatgctttgcagagaactcataaaggagcatataaggctaaatgtaaaacacaagactgtcattagaattgaattattgggcttaatataaatcgtaacctatgaagtttattttctattttagttaactatgattccaattactactttgttattgtacctaagtaaattttctttaagtcagaagcccattaaaatagttacaagcattgaacttctttagtattatattaatataaaaacatttttgtatgttttattgtaatcataaatactgctgtataaggtaataaaactctgcacctaatccccataacttccagtatcattttccaattaattatcaagtctgttttgggaaacactttgaggacatttatgatgcagcagatgttgactaaaggcttggttggtagatattcaggaaatgttcactgaataaataagtaaatacattattgaaaagcaaatctgtataaatgtgaaatttttatttgtattagtaataaaacattagtagtttaaacaa

SEQ ID NO: 355955 - DNA, 1562 bp, Homo sapiens
cagctgggggtaaggggggcggattattcatataattgttataccagacggtcgcaggcttagtccaattgcagagaactcgcttcccaggcttctgagagtcccggaagtgcctaaacctgtctaatcgacggggcttgggtggcccgtcgctccctggcttcttccctttacccagggcgggcagcgaagtggtgcctcctgcgtcccccacaccctccctcagcccctcccctccggcccgtcctgggcaggtgacctggagcatccggcaggctgccctggcctcctgcgtcaggacaagcccacgaggggcgttactgtgcggagatgcaccacgcaagagacaccctttgtaactctcttctcctccctagtgcgaggttaaaaccttcagccccacgtgctgtttgcaaacctgcctgtacctgaggccctaaaaagccagagacctcactcccggggagccagcatgtccactgcggtcctggaaaacccaggcttgggcaggaaactctctgactttggacaggaaacaagctatattgaagacaactgcaatcaaaatggtgccatatcactgatcttctcactcaaagaagaagttggtgcattggccaaagtattgcgcttatttgaggagaatgatgtaaacctgacccacattgaatctagaccttctcgtttaaagaaagatgagtatgaatttttcacccatttggataaacgtagcctgcctgctctgacaaacatcatcaagatcttgaggcatgacattggtgccactgtccatgagctttcacgagataagaagaaagacacagtgccctggttcccaagaaccattcaagagctggacagatttgccaatcagattctcagctatggagcggaactggatgctgaccaccctggttttaaagatcctgtgtaccgtgcaagacggaagcagtttgctgacattgcctacaactaccgccatgggcagcccatccctcgagtggaatacatggaggaagaaaagaaaacatggggcacagtgttcaagactctgaagtccttgtataaaacccatgcttgctatgagtacaatcacatttttccacttcttgaaaagtactgtggcttccatgaagataacattccccagctggaagacgtttctcagttcctgcagagtaagtccacatcagggtcaatggccctgcagaaagttgggggaggattgaggcagaggagagggaaggggaagacaagtatgtggaggcaagtatgaaagcatgtgcttgtaggaatgcatgcaggttgattcctccaggaagaactaaatttcactgtgctctgccttccctccagcccctactgtgtttatccactttcattcaatcaaacacctgaggctgtggattttgccgtgtacctgtccctgtgttttgttttgttttgtttgccctgtagttcctgctgtgttatgagttaggagtgtgtgtttgtgtaagaaatgtgctattttcggggatggtgccaagagccctgagctctgagtctgtgcatctggtatg

SEQ ID NO: 355956 - DNA, 1035 bp, Homo sapiens
cagctgggggtaaggggggcggattattcatataattgttataccagacggtcgcaggcttagtccaattgcagagaactcgcttcccaggcttctgagagtcccggaagtgcctaaacctgtctaatcgacggggcttgggtggcccgtcgctccctggcttcttccctttacccagggcgggcagcgaagtggtgcctcctgcgtcccccacaccctccctcagcccctcccctccggcccgtcctgggcaggtgacctggagcatccggcaggctgccctggcctcctgcgtcaggacaagcccacgaggggcgttactgtgcggagatgcaccacgcaagagacaccctttgtaactctcttctcctccctagtgcgaggttaaaaccttcagccccacgtgctgtttgcaaacctgcctgtacctgaggccctaaaaagccagagacctcactcccggggagccagcatgtccactgcggtcctggaaaacccaggcttgggcaggaaactctctgactttggacaggaaacaagctatattgaagacaactgcaatcccaaagtattgcgcttatttgaggagaatgatgtaaacctgacccacattgaatctagaccttctcgtttaaagaaagatgagtatgaatttttcacccatttggataaacgtagcctgcctgctctgacaaacatcatcaagatcttgaggcatgacattggtgccactgtccatgagctttcacgagataagaagaaagacacagtgccctggttcccaagaaccattcaagagctggacagatttgccaatcagattctcagctatggagcggaactggatgctgaccaccctgtgagtccatggcccgtaggatgagattttttcagtgcctctcctccactcccctcccttcctcttaccttctctacttggagcaatgtacttgttcacttgttcaacaaacacttattgtgttcctatttacacgagggctgggaaaaattagcaagactttattgtcatcatca

SEQ ID NO: 355957 - DNA, 1283 bp, Homo sapiens
gccatttgttcttcatgaaagatagcaactaacactcatagggcacttacaccatagtataacagcatttgctgcaaccccctgaggcaggtaccactaatgccccaattttacagaggaaattggggtacagaagagtggtcccctgtgcccatggtcacaagggccataatagacagaggcagggtttcagcccaggcagcttgacttggaacttggggagccactcttgccaaacttggaggtccctactgtctcccgtaacattgtattttcagtacagcagcttataggttcaccagaggccaacttagaaatctgtgattactttgcaacatcttgttaatggtattgcatgatgtccctcatagaggccctcatggtggatttctcccagatccaggagtaaggcactgggaaggcaggaaagcaaagggtccaggccagtgtcagactgcctgggttccttcccagctgcataacttactgacagtatggccttagtagtcacgcagccttcccaagcctgtttcctcatccataggaaggatatttgtaaagagcattggacagttagaacttaacatagttcttggaacatagaaggtactccatcaatgttaaatttcattattaacatagtgctttcttcaccacttgagagctatttccctctgcattgattgtcaaccatttcagagcttttttccctctatatagcattctttagctagattttacttactcttgattttatttaatgataggagtttgtggctttattgtattcagtagtttcattgtaagctatctctgtcttcttggagccaggggactaaataaacatgtgtatatatgtgtttgtacatacacaatacacacacacagaggcttccccaagaagactcattaaaactcccattccccccggcctcagcccctggctgttgaagaccctgctctagggaggtgtccgtgttcctaaaaaagaagtaaaatgcccactgagaactctcttaagactacctttctccaaatggtgcccttcactcaagcctgtggttttggtctttgatgccaaggagaaagtaaggaactttgctgccacaatacctcggcccttctcagttcgctacgacccatacacccaaaggattgaggtcttggacaatacccagcagcttaagattttggctgattccattaacagtaagtaatttacaccttacgaggccactcggtttctcagtaatcgaagactgtctttccctaccatcgccata

SEQ ID NO: 355958 - DNA, 498 bp, Homo sapiens
agccagcatgtccactgcggtcctggaaaacccaggcttgggcaggaaactctctgactttggacaggtgagccacggcagcctgagctgctcagttaggggaatttgggcctccagagaaagagatccgaagactgctggtgcttcctggtttcataagctcagtaagaagtctgaattcgttggaagctgatgagaatatccaggaagtcaacagacaaatgtcctcaacaattgtttctaagtaggagaacatctgtcctcggtggctttcacaggaatgaatgaccattgctttagggggttggggatctggcctccagaactgccaccaattagctgtgtgtctttggacaagttactgtccctctctgttgtctgtttactcttctgtacactgaaggggctggtccctaatgatctgggatgggatgtggaatccttctagatttcttttgtaatatttataaagtgctctcagcaaggtatcaaaatggc

SEQ ID NO: 355959 - DNA, 699 bp, Homo sapiens
gatttgaaattctcatactactttacattttattttggaaatagttaagtcttaaagaatttgcatagtgtttctttgagtttagttctcagaacagctgtagtatcatcaacagcaaattctgggtaccttcccagctccacccaatttgaatctctgaagataaggcccagagacctgtatttttaagtaccccatttttttaattattcatagccaaattctatcaggtacattcagtttgagaaaacctgatttgtggtggtcagtctgccactgccaatgatgtcaatgtggataagctgtttcccttctttagacctcagtgtcactctaacaatgagggagttaaactttataaaccaaggtccattgcagccttgaaatatgattcaagtgttcatatgtgtctttatatagctatgcctgatccactgatggggtgttacaatacctgcttatatatgccagctgggaggaaagaggaatttactgaatgtgtctgaagtttcattgttttgaagttggaattttatgcctgtatctatgtttatgcctttgtaaaacccactgattttaaaagtgaaaaaggacttttttctctgcttttactctaaacaccaaacaatccctgcaaagggattattctgatgtttcttcatttcacatgaaaagttaattattgactctggaacttaa

SEQ ID NO: 355960 - DNA, 766 bp, Homo sapiens
ggagagggaaggggaagacaagtatgtggaggcaagtatgaaagcatgtgcttgtaggaatgcatgcaggttgattcctccaggaagaactaaatttcactgtgctctgccttccctccagcccctactgtgtttatccactttcattcaatcaaacacctgaggctgtggattttgccgtgtacctgtccctgaaaagtattttctttcacacttaaagcccaaggtgcttcactgaggtttttttttgttttgttttgttttgtttgccctgtagttcctgctgtgttatgagttaggagtgtgtgtttgtgtaagaaatgtgctattttcggggatggtgccaagagccctgagctctgagtctgtgcatctggtatgaatcctgccttcaatcctctccagctgagtaaacctgcctcagttttgtcatctgtcaaatggacactgtatcaactctttagcttttcccatagggaaattatgagaatgaagtaaggtgctgcatatggaaacaaccagcacagtcttgcatatacagcaggtattcagtgaatttggactgaattgaaatctgagtagcttaataggtaagtacattgagtcgcaagcctctctgtacagtatatccaggtgaaatgggtgttactctttctgtcaagaggatgttaatttagcaaaaacaaaataatgaactagcacatattgaacacctactgtgtgccaggtagaataagcagaagtggggagacagactacaggttac

SEQ ID NO: 355961 - DNA, 2435 bp, Homo sapiens
cttcatcgtcgtccaactgaccttgagtgttagtttcgcggtaagtttgggtataagtgccaccaccagtgccggcagtgtagtcagtagtttgttgctggaagtcgttaccgccaaactgcgtgttaccgcctagattagactgtggctgctggcgttgagggaaacctgcctgtacctgaggccctaaaaagccagagacctcactcccggggagccagcatgtccactgcggtcctggaaaacccaggcttgggcaggaaactctctgactttggacaggaaacaagctatattgaagacaactgcaatcaaaatggtgccatatcactgatcttctcactcaaagaagaagttggtgcattggccaaagtattgcgcttatttgaggagaatgatgtaaacctgacccacattgaatctagaccttctcgtttaaagaaagatgagtatgaatttttcacccatttggataaacgtagcctgcctgctctgacaaacatcatcaagatcttgaggcatgacattggtgccactgtccatgagctttcacgagataagaagaaagacacagtgccctggttcccaagaaccattcaagagctggacagatttgccaatcagattctcagctatggagcggaactggatgctgaccaccctggttttaaagatcctgtgtaccgtgcaagacggaagcagtttgctgacattgcctacaactaccgccatgggcagcccatccctcgagtggaatacatggaggaagaaaagaaaacatggggcacagtgttcaagactctgaagtccttgtataaaacccatgcttgctatgagtacaatcacatttttccacttcttgaaaagtactgtggcttccatgaagataacattccccagctggaagacgtttctcagttcctgcagacttgcactggtttccgcctccgacctgtagctggcctgctttcctctcgggatttcttgggtggcctggccttccgagtcttccactgcacacagtacatcagacatggatccaagcccatgtatacccccgaacctgacatctgccatgagctgttgggacatgtgcccttgttttcagatcgcagctttgcccagttttcccaggaaattggccttgcctctctgggtgcacctgatgaatacattgaaaagctcgccacaatttactggtttactgtggagtttgggctctgcaaacaaggagactccataaaggcatatggtgctgggctcctgtcatcctttggtgaattacagtactgcttatcagagaagccaaagcttctccccctggagctggagaagacagccatccaaaattacactgtcacggagttccagcccctgtattacgtggcagagagttttaatgatgccaaggagaaagtaaggaactttgctgccacaatacctcggcccttctcagttcgctacgacccatacacccaaaggattgaggtcttggacaatacccagcagcttaagattttggctgattccattaacagtgaaattggaatcctttgcagtgccctccagaaaataaagtaaagccatggacagaatgtggtctgtcagctgtgaatctgttgatggagatccaactatttctttcatcagaaaaagtccgaaaagcaaaccttaatttgaaataacagccttaaatcctttacaagatggagaaacaacaaataagtcaaaataatctgaaatgacaggatatgagtacatactcaagagcataatggtaaatcttttggggtcatctttgatttagagatgataatcccatactctcaattgagttaaatcagtaatctgtcgcatttcatcaagattaattaaaatttgggacctgcttcattcaagcttcatatatgctttgcagagaactcataaaggagcatataaggctaaatgtaaaacacaagactgtcattagaattgaattattgggcttaatataaatcgtaacctatgaagtttattttctattttagttaactatgattccaattactactttgttattgtacctaagtaaattttctttaagtcagaagcccattaaaatagttacaagcattgaacttctttagtattatattaatataaaaacatttttgtatgttttattgtaatcataaatactgctgtataaggtaataaaactctgcacctaatccccataacttccagtatcattttccaattaattatcaagtctgttttgggaaacactttgaggacatttatgatgcagcagatgttgactaaaggcttggttggtagatattcaggaaatgttcactgaataaataagtaaatacattattgaaaagcaaatctgtataaatgtgaaatttttatttgtattagtaataaaacattagtagtttaaacaa

SEQ ID NO: 355962 - DNA, 1043 bp, Homo sapiens
  misc_feature (638)..(638): n is a, c, g, or t
agcgggagggcgtcctggcgagtctcagcccccaagcgggtggaacgcaccaagggtctcatccgcgaggaagggctttaacgctcagggtcaggaacctctgagagctcttggggacttgcgcgcccttggatgctcttgcgttcaacagggctaggagactaccggctggggcgaggaatgcaggcgcctagagccttggagctcctgaaacgttcctgccgcctccggaaagcaagggcagtttaccgaagtgactgaggccaagtatttgcagcacgggcagggaccagtaactgattttcaggccttttgagaggaagaggaagagagaggaagagaaggatttctaatagtagatattcactctcatggactctttaggaaacagcaacaaagacaagattaagaacaccaaattgtgtgactatccacacaaaaaagcatcttcataagaaccaaaaatcaggtaagccatcacagtacgctattttagttttatatcactgaaagggacacctaagaaggtagaaaagacagtcttgaattgctgatgcaactcctcccccatcaccccaacactccagcagcagtggacgcatggcatggacagagaatctgtgtgcttcggacacatnctgggcgcaagaagaagaaccccaataaccttgaagggagagcgcccccgccctgggaagaacacctggggcgcggaatgagtccggaacaagggacaaggtccaaagagcacccagagggtggagagccatcaccgggggggagcaggggtgcacacaccaacagcggccgggggcaccaaaagattttcggcgtgtcttcaccgcgccacaagggggctcgtgatttgtaaagccccatatttggtgggtggcccttcaggaaggcgcatggaacggggggacacatataaatagggcgtcgatcagtgccacgggtgatgaatatgcaccagcacacagtgatgaccagcacacacgtcaatatgagcataggcataacataaaataacgatacgagtgaga

SEQ ID NO: 355963 - DNA, 2480 bp, Homo sapiens
gcggccgccgcggctgcggccgtggcaaagaaacaggctgcgggcggcaggaagggctgctggggctgcggctggggctgctggccggcgccgccgctctccatcttggcagagctttccatgcgcagcggcggccaaggagtcgcggaatcagagcgatccgggacgcgagtgcgaggttaaaaccttcagccccacgtgctgtttgcaaacctgcctgtacctgaggccctaaaaagccagagacctcactcccggggagccagcatgtccactgcggtcctggaaaacccaggcttgggcaggaaactctctgactttggacaggaaacaagctatattgaagacaactgcaatcaaaatggtgccatatcactgatcttctcactcaaagaagaagttggtgcattggccaaagtattgcgcttatttgaggagaatgatgtaaacctgacccacattgaatctagaccttctcgtttaaagaaagatgagtatgaatttttcacccatttggataaacgtagcctgcctgctctgacaaacatcatcaagatcttgaggcatgacattggtgccactgtccatgagctttcacgagataagaagaaagacacagtgccctggttcccaagaaccattcaagagctggacagatttgccaatcagattctcagctatggagcggaactggatgctgaccaccctggttttaaagatcctgtgtaccgtgcaagacggaagcagtttgctgacattgcctacaactaccgccatgggcagcccatccctcgagtggaatacatggaggaagaaaagaaaacatggggcacagtgttcaagactctgaagtccttgtataaaacccatgcttgctatgagtacaatcacatttttccacttcttgaaaagtactgtggcttccatgaagataacattccccagctggaagacgtttctcagttcctgcagacttgcactggtttccgcctccgacctgtagctggcctgctttcctctcgggatttcttgggtggcctggccttccgagtcttccactgcacacagtacatcagacatggatccaagcccatgtatacccccgaacctgacatctgccatgagctgttgggacatgtgcccttgttttcagatcgcagctttgcccagttttcccaggaaattggccttgcctctctgggtgcacctgatgaatacattgaaaagctcgccacaatttactggtttactgtggagtttgggctctgcaaacaaggagactccataaaggcatatggtgctgggctcctgtcatcctttggtgaattacagtactgcttatcagagaagccaaagcttctccccctggagctggagaagacagccatccaaaattacactgtcacggagttccagcccctgtattacgtggcagagagttttaatgatgccaaggagaaagtaaggaactttgctgccacaatacctcggcccttctcagttcgctacgacccatacacccaaaggattgaggtcttggacaatacccagcagcttaagattttggctgattccattaacagtgaaattggaatcctttgcagtgccctccagaaaataaagtaaagccatggacagaatgtggtctgtcagctgtgaatctgttgatggagatccaactatttctttcatcagaaaaagtccgaaaagcaaaccttaatttgaaataacagccttaaatcctttacaagatggagaaacaacaaataagtcaaaataatctgaaatgacaggatatgagtacatactcaagagcataatggtaaatcttttggggtcatctttgatttagagatgataatcccatactctcaattgagttaaatcagtaatctgtcgcatttcatcaagattaattaaaatttgggacctgcttcattcaagcttcatatatgctttgcagagaactcataaaggagcatataaggctaaatgtaaaacacaagactgtcattagaattgaattattgggcttaatataaatcgtaacctatgaagtttattttctattttagttaactatgattccaattactactttgttattgtacctaagtaaattttctttaagtcagaagcccattaaaatagttacaagcattgaacttctttagtattatattaatataaaaacatttttgtatgttttattgtaatcataaatactgctgtataaggtaataaaactctgcacctaatccccataacttccagtatcattttccaattaattatcaagtctgttttgggaaacactttgaggacatttatgatgcagcagatgttgactaaaggcttggttggtagatattcaggaaatgttcactgaataaataagtaaatacattattgaaaagcaaatctgtataaatgtgaaatttttatttgtattagtaataaaacattagtagtttaaacaa

SEQ ID NO: 355964 - DNA, 2570 bp, Homo sapiens
agcgggagggcgtcctggcgagtctcagcccccaagcgggtggaacgcaccaagggtctcatccgcgaggaagggctttaacgctcagggtcaggaacctctgagagctcttggggacttgcgcgcccttggatgctcttgcgttcaacagggctaggagactaccggctggggcgaggaatgcaggcgcctagagccttggagctcctgaaacgttcctgccgcctccggaaagcaagggcagtttaccgaagtgactgagtgcgaggttaaaaccttcagccccacgtgctgtttgcaaacctgcctgtacctgaggccctaaaaagccagagacctcactcccggggagccagcatgtccactgcggtcctggaaaacccaggcttgggcaggaaactctctgactttggacaggaaacaagctatattgaagacaactgcaatcaaaatggtgccatatcactgatcttctcactcaaagaagaagttggtgcattggccaaagtattgcgcttatttgaggagaatgatgtaaacctgacccacattgaatctagaccttctcgtttaaagaaagatgagtatgaatttttcacccatttggataaacgtagcctgcctgctctgacaaacatcatcaagatcttgaggcatgacattggtgccactgtccatgagctttcacgagataagaagaaagacacagtgccctggttcccaagaaccattcaagagctggacagatttgccaatcagattctcagctatggagcggaactggatgctgaccaccctggttttaaagatcctgtgtaccgtgcaagacggaagcagtttgctgacattgcctacaactaccgccatgggcagcccatccctcgagtggaatacatggaggaagaaaagaaaacatggggcacagtgttcaagactctgaagtccttgtataaaacccatgcttgctatgagtacaatcacatttttccacttcttgaaaagtactgtggcttccatgaagataacattccccagctggaagacgtttctcagttcctgcagacttgcactggtttccgcctccgacctgtagctggcctgctttcctctcgggatttcttgggtggcctggccttccgagtcttccactgcacacagtacatcagacatggatccaagcccatgtatacccccgaacctgacatctgccatgagctgttgggacatgtgcccttgttttcagatcgcagctttgcccagttttcccaggaaattggccttgcctctctgggtgcacctgatgaatacattgaaaagctcgccacaatttactggtttactgtggagtttgggctctgcaaacaaggagactccataaaggcatatggtgctgggctcctgtcatcctttggtgaattacagtactgcttatcagagaagccaaagcttctccccctggagctggagaagacagccatccaaaattacactgtcacggagttccagcccctgtattacgtggcagagagttttaatgatgccaaggagaaagtaaggaactttgctgccacaatacctcggcccttctcagttcgctacgacccatacacccaaaggattgaggtcttggacaatacccagcagcttaagattttggctgattccattaacagtgaaattggaatcctttgcagtgccctccagaaaataaagtaaagccatggacagaatgtggtctgtcagctgtgaatctgttgatggagatccaactatttctttcatcagaaaaagtccgaaaagcaaaccttaatttgaaataacagccttaaatcctttacaagatggagaaacaacaaataagtcaaaataatctgaaatgacaggatatgagtacatactcaagagcataatggtaaatcttttggggtcatctttgatttagagatgataatcccatactctcaattgagttaaatcagtaatctgtcgcatttcatcaagattaattaaaatttgggacctgcttcattcaagcttcatatatgctttgcagagaactcataaaggagcatataaggctaaatgtaaaacacaagactgtcattagaattgaattattgggcttaatataaatcgtaacctatgaagtttattttctattttagttaactatgattccaattactactttgttattgtacctaagtaaattttctttaagtcagaagcccattaaaatagttacaagcattgaacttctttagtattatattaatataaaaacatttttgtatgttttattgtaatcataaatactgctgtataaggtaataaaactctgcacctaatccccataacttccagtatcattttccaattaattatcaagtctgttttgggaaacactttgaggacatttatgatgcagcagatgttgactaaaggcttggttggtagatattcaggaaatgttcactgaataaataagtaaatacattattgaaaagcaaatctgtataaatgtgaaatttttatttgtattagtaataaaacattagtagtttaaacaa

SEQ ID NO: 355965 - DNA, 2631 bp, Homo sapiens
cagctgggggtaaggggggcggattattcatataattgttataccagacggtcgcaggcttagtccaattgcagagaactcgcttcccaggcttctgagagtcccggaagtgcctaaacctgtctaatcgacggggcttgggtggcccgtcgctccctggcttcttccctttacccagggcgggcagcgaagtggtgcctcctgcgtcccccacaccctccctcagcccctcccctccggcccgtcctgggcaggtgacctggagcatccggcaggctgccctggcctcctgcgtcaggacaagcccacgaggggcgttactgtgcggagatgcaccacgcaagagacaccctttgtaactctcttctcctccctagtgcgaggttaaaaccttcagccccacgtgctgtttgcaaacctgcctgtacctgaggccctaaaaagccagagacctcactcccggggagccagcatgtccactgcggtcctggaaaacccaggcttgggcaggaaactctctgactttggacaggaaacaagctatattgaagacaactgcaatcaaaatggtgccatatcactgatcttctcactcaaagaagaagttggtgcattggccaaagtattgcgcttatttgaggagaatgatgtaaacctgacccacattgaatctagaccttctcgtttaaagaaagatgagtatgaatttttcacccatttggataaacgtagcctgcctgctctgacaaacatcatcaagatcttgaggcatgacattggtgccactgtccatgagctttcacgagataagaagaaagacacagtgccctggttcccaagaaccattcaagagctggacagatttgccaatcagattctcagctatggagcggaactggatgctgaccaccctggttttaaagatcctgtgtaccgtgcaagacggaagcagtttgctgacattgcctacaactaccgccatgggcagcccatccctcgagtggaatacatggaggaagaaaagaaaacatggggcacagtgttcaagactctgaagtccttgtataaaacccatgcttgctatgagtacaatcacatttttccacttcttgaaaagtactgtggcttccatgaagataacattccccagctggaagacgtttctcagttcctgcagacttgcactggtttccgcctccgacctgtagctggcctgctttcctctcgggatttcttgggtggcctggccttccgagtcttccactgcacacagtacatcagacatggatccaagcccatgtatacccccgaacctgacatctgccatgagctgttgggacatgtgcccttgttttcagatcgcagctttgcccagttttcccaggaaattggccttgcctctctgggtgcacctgatgaatacattgaaaagctcgccacaatttactggtttactgtggagtttgggctctgcaaacaaggagactccataaaggcatatggtgctgggctcctgtcatcctttggtgaattacagtactgcttatcagagaagccaaagcttctccccctggagctggagaagacagccatccatgatgccaaggagaaagtaaggaactttgctgccacaatacctcggcccttctcagttcgctacgacccatacacccaaaggattgaggtcttggacaatacccagcagcttaagattttggctgattccattaacagtgaaattggaatcctttgcagtgccctccagaaaataaagtaaagccatggacagaatgtggtctgtcagctgtgaatctgttgatggagatccaactatttctttcatcagaaaaagtccgaaaagcaaaccttaatttgaaataacagccttaaatcctttacaagatggagaaacaacaaataagtcaaaataatctgaaatgacaggatatgagtacatactcaagagcataatggtaaatcttttggggtcatctttgatttagagatgataatcccatactctcaattgagttaaatcagtaatctgtcgcatttcatcaagattaattaaaatttgggacctgcttcattcaagcttcatatatgctttgcagagaactcataaaggagcatataaggctaaatgtaaaacacaagactgtcattagaattgaattattgggcttaatataaatcgtaacctatgaagtttattttctattttagttaactatgattccaattactactttgttattgtacctaagtaaattttctttaagtcagaagcccattaaaatagttacaagcattgaacttctttagtattatattaatataaaaacatttttgtatgttttattgtaatcataaatactgctgtataaggtaataaaactctgcacctaatccccataacttccagtatcattttccaattaattatcaagtctgttttgggaaacactttgaggacatttatgatgcagcagatgttgactaaaggcttggttggtagatattcaggaaatgttcactgaataaataagtaaatacattattgaaaagcaaatctgtataaatgtgaaatttttatttgtattagtaataaaacattagtagtttaaacaa

SEQ ID NO: 355966 - DNA, 4066 bp, Homo sapiens
cagctgggggtaaggggggcggattattcatataattgttataccagacggtcgcaggcttagtccaattgcagagaactcgcttcccaggcttctgagagtcccggaagtgcctaaacctgtctaatcgacggggcttgggtggcccgtcgctccctggcttcttccctttacccagggcgggcagcgaagtggtgcctcctgcgtcccccacaccctccctcagcccctcccctccggcccgtcctgggcaggtgacctggagcatccggcaggctgccctggcctcctgcgtcaggacaagcccacgaggggcgttactgtgcggagatgcaccacgcaagagacaccctttgtaactctcttctcctccctagtgcgaggttaaaaccttcagccccacgtgctgtttgcaaacctgcctgtacctgaggccctaaaaagccagagacctcactcccggggagccagcatgtccactgcggtcctggaaaacccaggcttgggcaggaaactctctgactttggacaggaaacaagctatattgaagacaactgcaatcaaaatggtgccatatcactgatcttctcactcaaagaagaagttggtgcattggccaaagtattgcgcttatttgaggagaatgatgtaaacctgacccacattgaatctagaccttctcgtttaaagaaagatgagtatgaatttttcacccatttggataaacgtagcctgcctgctctgacaaacatcatcaagatcttgaggcatgacattggtgccactgtccatgagctttcacgagataagaagaaagacacagtgccctggttcccaagaaccattcaagagctggacagatttgccaatcagattctcagctatggagcggaactggatgctgaccaccctggttttaaagatcctgtgtaccgtgcaagacggaagcagtttgctgacattgcctacaactaccgccatgggcagcccatccctcgagtggaatacatggaggaagaaaagaaaacatggggcacagtgttcaagactctgaagtccttgtataaaacccatgcttgctatgagtacaatcacatttttccacttcttgaaaagtactgtggcttccatgaagataacattccccagctggaagacgtttctcagttcctgcagacttgcactggtttccgcctccgacctgtagctggcctgctttcctctcgggatttcttgggtggcctggccttccgagtcttccactgcacacagtacatcagacatggatccaagcccatgtatacccccgaacctgacatctgccatgagctgttgggacatgtgcccttgttttcagatcgcagctttgcccagttttcccaggaaattggccttgcctctctgggtgcacctgatgaatacattgaaaagctcgccacaatttactggtttactgtggagtttgggctctgcaaacaaggagactccataaaggcatatggtgctgggctcctgtcatcctttggtgaattacagtactgcttatcagagaagccaaagcttctccccctggagctggagaagacagccatccaaaattacactgtcacggagttccagcccctgtattacgtggcagagagttttaatgatgccaaggagaaagtaaggaactttgctgccacaatacctcggcccttctcagttcgctacgacccatacacccaaaggattgaggtcttggacaatacccagcagcttaagattttggctgattccattaacagtgaaattggaatcctttgcagtgccctccagaaaataaagtaaagccatggacagaatgtggtctgtcagctgtgaatctgttgatggagatccaactatttctttcatcagaaaaagtccgaaaagcaaaccttaatttgaaataacagccttaaatcctttacaagatggagaaacaacaaataagtcaaaataatctgaaatgacaggatatgagtacatactcaagagcataatggtaaatcttttggggtcatctttgatttagagatgataatcccatactctcaattgagttaaatcagtaatctgtcgcatttcatcaagattaattaaaatttgggacctgcttcattcaagcttcatatatgctttgcagagaactcataaaggagcatataaggctaaatgtaaaacacaagactgtcattagaattgaattattgggcttaatataaatcgtaacctatgaagtttattttctattttagttaactatgattccaattactactttgttattgtacctaagtaaattttctttaagtcagaagcccattaaaatagttacaagcattgaacttctttagtattatattaatataaaaacatttttgtatgttttattgtaatcataaatactgctgtataaggtaataaaactctgcacctaatccccataacttccagtatcattttccaattaattatcaagtctgttttgggaaacactttgaggacatttatgatgcagcagatgttgactaaaggcttggttggtagatattcaggaaatgttcactgaataaataagtaaatacattattgaaaagcaaatctgtataaatgtgaaatttttatttgtattagtaataaaacattagtagtttaaacaatttcactgtttcagttatttcctggaatgaaatattcctctcactgccttagaaatacattagctagatagttttgtaacatgagaaaatggccagaggctcatatctccaaccctttgcaggggctccttgtgacactcaaagtcatgcctggacagtcaacggactttgacttttgttgattgtgtgtttgccatgaaaacatgaatatctgagaagcagtggggagaaaaaattttggaaatagttaagtcttaaagaatttgcatagtgtttctttgagtttagttctcagaacagctgtagtatcatcaacagcaaattctgggtaccttcccagctccacccaatttgaatctctgaagataaggcccagagacctgtatttttaagtaccccatttttttaattattcatagccaaattctatcaggtacattcagtttgagaaaacctgatttgtggtggtcagtctgccactgccaatgatgtcaatgtggataagctgtttcccttctttagacctcagtgtcactctaacaatgagggagttaaactttataaaccaaggtccattgcagccttgaaatatgattcaagtgttcatatgtgtctttatatagctatgcctgatccactgatggggtgttacaatacctgcttatatatgccagctgggaggaaagaggaatttactgaatgtgtctgaagtttcattgttttgaagttggaattttatgcctgtatctatgtttatgcctttgtaaaacccactgattttaaaagtgaaaaaggacttttttctctgcttttactctaaacaccaaacaatccctgcaaagggattattctgatgtttcttcatttcacatgaaaagttaattattgactctggaacttaaatattagataatatttttgacaatattgaagagtgagttttagtccagtaaagatgttttaatgagcttgaaggtaaagtttcggttaagttatgattttcacaggaagttacatactgaatgaaagataatatttgtatttttggtaatgtgctactcagttcttagctcttttttatccagatataaaagcccagtctatagctatgggatttaataaatttccaatatgtaagtgtttttatttgtttaatttctagtaaatgagcaatattttagaaacagtatcagtctttactgacagatgatcttgctgagtacaatcaaaataaatacataaaaaattctaagcatgtggcattgatgtttaataagtttctgaaagtaggaatctgaattttaactgtaggtttctaagttatataatttagttgtgtttcaaaaaatccaccaataaaatgtcagctttataaaaacag

SEQ ID NO: 355967 - DNA, 2271 bp, Homo sapiens
gggctgcaggattcggcacgagctaaaaagccagagacctcactcccggggagccagcatgtccactgcggtcctggaaaacccaggcttgggcaggaaactctctgactttggacaggaaacaagctatattgaagacaactgcaatcaaaatggtgccatatcactgatcttctcactcaaagaagaagttggtgcattggccaaagtattgcgcttatttgaggagaatgatgtaaacctgacccacattgaatctagaccttctcgtttaaagaaagatgagtatgaatttttcacccatttggataaacgtagcctgcctgctctgacaaacatcatcaagatcttgaggcatgacattggtgccactgtccatgagctttcacgagataagaagaaagacacagtgccctggttcccaagaaccattcaagagctggacagatttgccaatcagattctcagctatggagcggaactggatgctgaccaccctggttttaaagatcctgtgtaccgtgcaagacggaagcagtttgctgacattgcctacaactaccgccatgggcagcccatccctcgagtggaatacatggaggaagaaaagaaaacatggggcacagtgttcaagactctgaagtccttgtataaaacccatgcttgctatgagtacaatcacatttttccacttcttgaaaagtactgtggcttccatgaagataacattccccagctggaagacgtttctcagttcctgcagacttgcactggtttccgcctccgacctgtagctggcctgctttcctctcgggatttcttgggtggcctggccttccgagtcttccactgcacacagtacatcagacatggatccaagcccatgtatacccccgaacctgacatctgccatgagctgttgggacatgtgcccttgttttcagatcgcagctttgcccagttttcccaggaaattggccttgcctctctgggtgcacctgatgaatacattgaaaagctcgccacaatttactggtttactgtggagtttgggctctgcaaacaaggagactccataaaggcatatggtgctgggctcctgtcatcctttggtgaattacagtactgcttatcagagaagccaaagcttctccccctggagctggagaagacagccatccaaaattacactgtcacggagttccagcccctgtattacgtggcagagagttttaatgatgccaaggagaaagtaaggaactttgctgccacaatacctcggcccttctcagttcgctacgacccatacacccaaaggattgaggtcttggacaatacccagcagcttaagattttggctgattccattaacagtgaaattggaatcctttgcagtgccctccagaaaataaagtaaagccatggacagaatgtggtctgtcagctgtgaatctgttgatggagatccaactatttctttcatcagaaaaagtccgaaaagcaaaccttaatttgaaataacagccttaaatcctttacaagatggagaaacaacaaataagtcaaaataatctgaaatgacaggatatgagtacatactcaagagcataatggtaaatcttttggggtcatctttgatttagagatgataatcccatactctcaattgagttaaatcagtaatctgtcgcatttcatcaagattaattaaaatttgggacctgcttcattcaagcttcatatatgctttgcagagaactcataaaggagcatataaggctaaatgtaaaacacaagactgtcattagaattgaattattgggcttaatataaatcgtaacctatgaagtttattttctattttagttaactatgattccaattactactttgttattgtacctaagtaaattttctttaagtcagaagcccattaaaatagttacaagcattgaacttctttagtattatattaatataaaaacatttttgtatgttttattgtaatcataaatactgctgtataaggtaataaaactctgcacctaatccccataacttccagtatcattttccaattaattatcaagtctgttttgggaaacactttgaggacatttatgatgcagcagatgttgactaaaggcttggttggtagatattcaggaaatgttcactgaataaataagtaaatacattattgaaaagcaaatctgtataaatgtgaaatttttatttgtattagtaataaaacattagtagtttaaacaa

SEQ ID NO: 355968 - DNA, 3251 bp, Homo sapiens
cagctgggggtaaggggggcggattattcatataattgttataccagacggtcgcaggcttagtccaattgcagagaactcgcttcccaggcttctgagagtcccggaagtgcctaaacctgtctaatcgacggggcttgggtggcccgtcgctccctggcttcttccctttacccagggcgggcagcgaagtggtgcctcctgcgtcccccacaccctccctcagcccctcccctccggcccgtcctgggcaggtgacctggagcatccggcaggctgccctggcctcctgcgtcaggacaagcccacgaggggcgttactgtgcggagatgcaccacgcaagagacaccctttgtaactctcttctcctccctagtgcgaggttaaaaccttcagccccacgtgctgtttgcaaacctgcctgtacctgaggccctaaaaagccagagacctcactcccggggagccagcatgtccactgcggtcctggaaaacccaggcttgggcaggaaactctctgactttggacaggaaacaagctatattgaagacaactgcaatcaaaatggtgccatatcactgatcttctcactcaaagaagaagttggtgcattggccaaagtattgcgcttatttgaggagaatgatgtaaacctgacccacattgaatctagaccttctcgtttaaagaaagatgagtatgaatttttcacccatttggataaacgtagcctgcctgctctgacaaacatcatcaagatcttgaggcatgacattggtgccactgtccatgagctttcacgagataagaagaaagacacagtgccctggttcccaagaaccattcaagagctggacagatttgccaatcagattctcagctatggagcggaactggatgctgaccaccctggttttaaagatcctgtgtaccgtgcaagacggaagcagtttgctgacattgcctacaactaccgccatgggcagcccatccctcgagtggaatacatggaggaagaaaagaaaacatggggcacagtgttcaagactctgaagtccttgtataaaacccatgcttgctatgagtacaatcacatttttccacttcttgaaaagtactgtggcttccatgaagataacattccccagctggaagacgtttctcagttcctgcagacttgcactggtttccgcctccgacctgtagctggcctgctttcctctcgggatttcttgggtggcctggccttccgagtcttccactgcacacagtacatcagacatggatccaagcccatgtatacccccgaacctgacatctgccatgagctgttgggacatgtgcccttgttttcagatcgcagctttgcccagttttcccaggaaattggccttgcctctctgggtgcacctgatgaatacattgaaaagctcgccacaatttactggtttactgtggagtttgggctctgcaaacaaggagactccataaaggcatatggtgctgggctcctgtcatcctttggtgaattacagtactgcttatcagagaagccaaagcttctccccctggagctggagaagacagccatccaaaattacactgtcacggagttccagcccctgtattacgtggcagagagttttaatgatgccaaggagaaagtaaggaactttgctgccacaatacctcggcccttctcagttcgctacgacccatacacccaaaggattgaggtcttggacaatacccagcagcttaagattttggctgattccattaacagtgaaattggaatcctttgcagtgccctccagaaaataaagtaaagccatggacagaatgtggtctgtcagctgtgaatctgttgatggagatccaactatttctttcatcagaaaaagtccgaaaagcaaaccttaatttgaaataacagccttaaatcctttacaagatggagaaacaacaaataagtcaaaataatctgaaatgacaggatatgagtacatactcaagagcataatggtaaatcttttggggtcatctttgatttagagatgataatcccatactctcaattgagttaaatcagtaatctgtcgcatttcatcaagattaattaaaatttgggacctgcttcattcaagcttcatatatgctttgcagagaactcataaaggagcatataaggctaaatgtaaaacacaagactgtcattagaattgaattattgggcttaatataaatcgtaacctatgaagtttattttctattttagttaactatgattccaattactactttgttattgtacctaagtaaattttctttaagtcagaagcccattaaaatagttacaagcattgaacttctttagtattatattaatataaaaacatttttgtatgttttattgtaatcataaatactgctgtataaggtaataaaactctgcacctaatccccataacttccagtatcattttccaattaattatcaagtctgttttgggaaacactttgaggacatttatgatgcagcagatgttgactaaaggcttggttggtagatattcaggaaatgttcactgaataaataagtaaatacattattgaaaagcaaatctgtataaatgtgaaatttttatttgtattagtaataaaacattagtagtttaaacaaaaaaaaaaaaaaaaaaaaaaaaaaaaaaaaaaaactaaagggggggccaagaacaacaaataaacctataaagagacgaataacaaataaactggccgccatttaacaacgaaataaactggttaaaggggggcccctgcccccttaatccccttgcgggccatccttcattcgccaggtggcgttttatacaaataggcccgtgggaaacccccttgctaaccaaagataaccctgattggcgaatggccaattgtacgcgtgggtgttttgccaaaaagcccgctaaatattcgtttattcaactaattctttacccaatgggccgaaggcaatctgaaccccttataattttgggcaaaacaccgataaatggttgaaaagtcgcccaattttgaacacaaaggcgctaatttggaacatggcctttaaagttaaaggggttaaaccccttttgtcttggcggatggcccactcgtgaaccaataacccttattaaaaaaccgggggcccaatcgccagagggcatcggtactccggggggaggcccccctttcctgtcccct

SEQ ID NO: 355969 - DNA, 2565 bp, Homo sapiens
cagctgggggtaaggggggcggattattcatataattgttataccagacggtcgcaggcttagtccaattgcagagaactcgcttcccaggcttctgagagtcccggaagtgcctaaacctgtctaatcgacggggcttgggtggcccgtcgctccctggcttcttccctttacccagggcgggcagcgaagtggtgcctcctgcgtcccccacaccctccctcagcccctcccctccggcccgtcctgggcaggtgacctggagcatccggcaggctgccctggcctcctgcgtcaggacaagcccacgaggggcgttactgtgcggagatgcaccacgcaagagacaccctttgtaactctcttctcctccctagtgcgaggttaaaaccttcagccccacgtgctgtttgcaaacctgcctgtacctgaggccctaaaaagccagagacctcactcccggggagccagcatgtccactgcggtcctggaaaacccaggcttgggcaggaaactctctgactttggacaggaaacaagctatattgaagacaactgcaatcaaaatggtgccatatcactgatcttctcactcaaagaagaagttggtgcattggccaaagtattgcgcttatttgaggagaatgatgtaaacctgacccacattgaatctagaccttctcgtttaaagaaagatgagtatgaatttttcacccatttggataaacgtagcctgcctgctctgacaaacatcatcaagatcttgaggcatgacattggtgccactgtccatgagctttcacgagataagaagaaagacacagtgccctggttcccaagaaccattcaagagctggacagatttgccaatcagattctcagctatggagcggaactggatgctgaccaccctggttttaaagatcctgtgtaccgtgcaagacggaagcagtttgctgacattgcctacaactaccgccatgggcagcccatccctcgagtggaatacatggaggaagaaaagaaaacatggggcacagtgttcaagactctgaagtccttgtataaaacccatgcttgctatgagtacaatcacatttttccacttcttgcttgcactggtttccgcctccgacctgtagctggcctgctttcctctcgggatttcttgggtggcctggccttccgagtcttccactgcacacagtacatcagacatggatccaagcccatgtatacccccgaacctgacatctgccatgagctgttgggacatgtgcccttgttttcagatcgcagctttgcccagttttcccaggaaattggccttgcctctctgggtgcacctgatgaatacattgaaaagctcgccacaatttactggtttactgtggagtttgggctctgcaaacaaggagactccataaaggcatatggtgctgggctcctgtcatcctttggtgaattacagtactgcttatcagagaagccaaagcttctccccctggagctggagaagacagccatccatgatgccaaggagaaagtaaggaactttgctgccacaatacctcggcccttctcagttcgctacgacccatacacccaaaggattgaggtcttggacaatacccagcagcttaagattttggctgattccattaacagtgaaattggaatcctttgcagtgccctccagaaaataaagtaaagccatggacagaatgtggtctgtcagctgtgaatctgttgatggagatccaactatttctttcatcagaaaaagtccgaaaagcaaaccttaatttgaaataacagccttaaatcctttacaagatggagaaacaacaaataagtcaaaataatctgaaatgacaggatatgagtacatactcaagagcataatggtaaatcttttggggtcatctttgatttagagatgataatcccatactctcaattgagttaaatcagtaatctgtcgcatttcatcaagattaattaaaatttgggacctgcttcattcaagcttcatatatgctttgcagagaactcataaaggagcatataaggctaaatgtaaaacacaagactgtcattagaattgaattattgggcttaatataaatcgtaacctatgaagtttattttctattttagttaactatgattccaattactactttgttattgtacctaagtaaattttctttaagtcagaagcccattaaaatagttacaagcattgaacttctttagtattatattaatataaaaacatttttgtatgttttattgtaatcataaatactgctgtataaggtaataaaactctgcacctaatccccataacttccagtatcattttccaattaattatcaagtctgttttgggaaacactttgaggacatttatgatgcagcagatgttgactaaaggcttggttggtagatattcaggaaatgttcactgaataaataagtaaatacattattgaaaagcaaatctgtataaatgtgaaatttttatttgtattagtaataaaacattagtagtttaaacaa

SEQ ID NO: 355970 - DNA, 4012 bp, Homo sapiens
cagctgggggtaaggggggcggattattcatataattgttataccagacggtcgcaggcttagtccaattgcagagaactcgcttcccaggcttctgagagtcccggaagtgcctaaacctgtctaatcgacggggcttgggtggcccgtcgctccctggcttcttccctttacccagggcgggcagcgaagtggtgcctcctgcgtcccccacaccctccctcagcccctcccctccggcccgtcctgggcaggtgacctggagcatccggcaggctgccctggcctcctgcgtcaggacaagcccacgaggggcgttactgtgcggagatgcaccacgcaagagacaccctttgtaactctcttctcctccctagtgcgaggttaaaaccttcagccccacgtgctgtttgcaaacctgcctgtacctgaggccctaaaaagccagagacctcactcccggggagccagcatgtccactgcggtcctggaaaacccaggcttgggcaggaaactctctgactttggacaggaaacaagctatattgaagacaactgcaatcaaaatggtgccatatcactgatcttctcactcaaagaagaagttggtgcattggccaaagtattgcgcttatttgaggagaatgatgtaaacctgacccacattgaatctagaccttctcgtttaaagaaagatgagtatgaatttttcacccatttggataaacgtagcctgcctgctctgacaaacatcatcaagatcttgaggcatgacattggtgccactgtccatgagctttcacgagataagaagaaagacacagtgccctggttcccaagaaccattcaagagctggacagatttgccaatcagattctcagctatggagcggaactggatgctgaccaccctggttttaaagatcctgtgtaccgtgcaagacggaagcagtttgctgacattgcctacaactaccgccatgggcagcccatccctcgagtggaatacatggaggaagaaaagaaaacatggggcacagtgttcaagactctgaagtccttgtataaaacccatgcttgctatgagtacaatcacatttttccacttcttgaaaagtactgtggcttccatgaagataacattccccagctggaagacgtttctcagttcctgcagacttgcactggtttccgcctccgacctgtagctggcctgctttcctctcgggatttcttgggtggcctggccttccgagtcttccactgcacacagtacatcagacatggatccaagcccatgtatacccccgaacctgacatctgccatgagctgttgggacatgtgcccttgttttcagatcgcagctttgcccagttttcccaggaaattggccttgcctctctgggtgcacctgatgaatacattgaaaagctcgccacaatttactggtttactgtggagtttgggctctgcaaacaaggagactccataaaggcatatggtgctgggctcctgtcatcctttggtgaattacagtactgcttatcagagaagccaaagcttctccccctggagctggagaagacagccatccaaaattacactgtcacggagttccagcccctgtattacgtggcagagagttttaatgatgccaaggagaaagtaaggaactttgctgccacaatacctcggcccttctcagttcgctacgacccatacacccaaaggattgaggtcttggacaatacccagcagcttaagattttggctgattccattaacagtgaaattggaatcctttgcagtgccctccagaaaataaagtaaagccatggacagaatgtggtctgtcagctgtgaatctgttgatggagatccaactatttctttcatcagaaaaagtccgaaaagcaaaccttaatttgaaataacagccttaaatcctttacaagatggagaaacaacaaataagtcaaaataatctgaaatgacaggatatgagtacatactcaagagcataatggtaaatcttttggggtcatctttgatttagagatgataatcccatactctcaattgagttaaatcagtaatctgtcgcatttcatcaagattaattaaaatttgggacctgcttcattcaagcttcatatatgctttgcagagaactcataaaggagcatataaggctaaatgtaaaacacaagactgtcctattttagttaactatgattccaattactactttgttattgtacctaagtaaattttctttaagtcagaagcccattaaaatagttacaagcattgaacttctttagtattatattaatataaaaacatttttgtatgttttattgtaatcataaatactgctgtataaggtaataaaactctgcacctaatccccataacttccagtatcattttccaattaattatcaagtctgttttgggaaacactttgaggacatttatgatgcagcagatgttgactaaaggcttggttggtagatattcaggaaatgttcactgaataaataagtaaatacattattgaaaagcaaatctgtataaatgtgaaatttttatttgtattagtaataaaacattagtagtttaaacaatttcactgtttcagttatttcctggaatgaaatattcctctcactgccttagaaatacattagctagatagttttgtaacatgagaaaatggccagaggctcatatctccaaccctttgcaggggctccttgtgacactcaaagtcatgcctggacagtcaacggactttgacttttgttgattgtgtgtttgccatgaaaacatgaatatctgagaagcagtggggagaaaaaattttggaaatagttaagtcttaaagaatttgcatagtgtttctttgagtttagttctcagaacagctgtagtatcatcaacagcaaattctgggtaccttcccagctccacccaatttgaatctctgaagataaggcccagagacctgtatttttaagtaccccatttttttaattattcatagccaaattctatcaggtacattcagtttgagaaaacctgatttgtggtggtcagtctgccactgccaatgatgtcaatgtggataagctgtttcccttctttagacctcagtgtcactctaacaatgagggagttaaactttataaaccaaggtccattgcagccttgaaatatgattcaagtgttcatatgtgtctttatatagctatgcctgatccactgatggggtgttacaatacctgcttatatatgccagctgggaggaaagaggaatttactgaatgtgtctgaagtttcattgttttgaagttggaattttatgcctgtatctatgtttatgcctttgtaaaacccactgattttaaaagtgaaaaaggacttttttctctgcttttactctaaacaccaaacaatccctgcaaagggattattctgatgtttcttcatttcacatgaaaagttaattattgactctggaacttaaatattagataatatttttgacaatattgaagagtgagttttagtccagtaaagatgttttaatgagcttgaaggtaaagtttcggttaagttatgattttcacaggaagttacatactgaatgaaagataatatttgtatttttggtaatgtgctactcagttcttagctcttttttatccagatataaaagcccagtctatagctatgggatttaataaatttccaatatgtaagtgtttttatttgtttaatttctagtaaatgagcaatattttagaaacagtatcagtctttactgacagatgatcttgctgagtacaatcaaaataaatacataaaaaattctaagcatgtggcattgatgtttaataagtttctgaaagtaggaatctgaattttaactgtaggtttctaagttatataatttagttgtgtttcaaaaaatccaccaataaaatgtcagctttataaaaacag

SEQ ID NO: 355971 - DNA, 1619 bp, Homo sapiens
cagctgggggtaaggggggcggattattcatataattgttataccagacggtcgcaggcttagtccaattgcagagaactcgcttcccaggcttctgagagtcccggaagtgcctaaacctgtctaatcgacggggcttgggtggcccgtcgctccctggcttcttccctttacccagggcgggcagcgaagtggtgcctcctgcgtcccccacaccctccctcagcccctcccctccggcccgtcctgggcaggtgacctggagcatccggcaggctgccctggcctcctgcgtcaggacaagcccacgaggggcgttactgtgcggagatgcaccacgcaagagacaccctttgtaactctcttctcctccctagtgcgaggttaaaaccttcagccccacgtgctgtttgcaaacctgcctgtacctgaggccctaaaaagccagagacctcactcccggggagccagcatgtccactgcggtcctggaaaacccaggcttgggcaggaaactctctgactttggacaggaaacaagctatattgaagacaactgcaatcaaaatggtgccatatcactgatcttctcactcaaagaagaagttggtgcattggccaaagtattgcgcttatttgaggagaatgatgtaaacctgacccacattgaatctagaccttctcgtttaaagaaagatgagtatgaatttttcacccatttggataaacgtagcctgcctgctctgacaaacatcatcaagatcttgaggcatgacattggtgccactgtccatgagctttcacgagataagaagaaagacacagtgccctggttcccaagaaccattcaagagctggacagatttgccaatcagattctcagctatggagcggaactggatgctgaccaccctggttttaaagatcctgtgtaccgtgcaagacggaagcagtttgctgacattgcctacaactaccgccatgggcagcccatccctcgagtggaatacatggaggaagaaaagaaaacatggggcacagtgttcaagactctgaagtccttgtataaaacccatgcttgctatgagtacaatcacatttttccacttcttgaaaagtactgtggcttccatgaagataacattccccagctggaagacgtttctcagttcctgcagacttgcactggtttccgcctccgacctgtagctggcctgctttcctctcgggatttcttgggtggcctggccttccgagtcttccactgcacacagtacatcagacatggatccaagcccatgtatacccccgaaccgtgagtactgtcctccagctaccagttgccaggcacaatgagcgccatcttttcctgctgcaagaatgaggtttgggttcattgctggctggtccacaggactagttgtctagactgtttgctggtagtactagattggagatttggtcatcctgtgatccaataactcagaactcccttggcagtgagaatgagagatcccaatcaagttccaaagtcaaagctacgaagttgcaaatgagaacaggaacaagtggcagccaagctatctcaatacttcctaagtatacatctagattactctt

SEQ ID NO: 355972 - DNA, 884 bp, Homo sapiens
gcggccgccgcggctgcggccgtggcaaagaaacaggctgcgggcggcaggaagggctgctggggctgcggctggggctgctggccggcgccgccgctctccatcttggcagagctttccatgcgcagcggcggccaaggagtcgcggaatcagagcgatccgggacgcgagtgcgaggttaaaaccttcagccccacgtgctgtttgcaaacctgcctgtacctgaggccctaaaaagccagagacctcactcccggggagccagcatgtccactgcggtcctggaaaacccaggcttgggcaggaaactctctgactttggacaggaaacaagctatattgaagacaactgcaatcaaaatggtgccatatcactgatcttctcactcaaagaagaagttggtgcattggccaaagtattgcgcttatttgaggagaatgatgtaaacctgacccacattgaatctagaccttctcgtttaaagaaagatgagtatgaatttttcacccatttggataaacgtagcctgcctgctctgacaaacatcatcaagatcttgaggcatgacattggtgccactgtccatgagctttcacgagataagaagaaagacacagtgccctggttcccaagaaccattcaagagctggacagatttgccaatcagattctcagctatggagcggaactggatgctgaccaccctgtgagtccatggcccgtaggatgagattttttcagtgcctctcctccactcccctcccttcctcttaccttctctacttggagcaatgtacttgttcacttgttcaacaaacacttattgtgttcctatttacacgagggctgggaaaaattagcaagactttattgtcatcatca

SEQ ID NO: 355973 - DNA, 1817 bp, Homo sapiens
cgctgccgagggcagggcagggcaggcaggcggggtggggcggggcggggatcaagcaggggcagggctggcgctgcggcgggagatgctgtcgggccgcggcggcgcttggcagccaggagctctgcattgaaggcactggggtaaagtgaatgccgaagacagaagatttggatgatacaccactgactttctttgtttggaatacacgttatgaaccctttctggagcatgtctacaagctctgtacgcaaacgatctgaaggtgaagagaagacattaacaggggacgtgaaaaccagtcctccacgaactgcaccaaagaaacagctgccttctattcccaaaaatgctttgcccataactaagcctacatctcctgccccagcagcacagtcaacaaatggcacgcatgcgtcctatggacccttctacctggaatactctcttcttgcagaatttaccttggttgtgaagcagaagctaccaggcgtctatgtgcagccatcttatcgctctgcattaatgtggtttggagtaatattcatacggcatggactttaccaagatggcgtatttaagtttacagtttacatccctgataactatccagatggtgactgtccacgcttggtgttcgatattcctgtctttcacccgctagttgatcccacctcaggtgagctggatgtgaagagagcatttgcaaaatggaggcggaaccataatcatatttggcaggtattaatgtatgcaaggagagttttctacaagattgatacagcaagccccctgaacccagaggctgcagtactgtatgaaaaagatattcagctttttaaaagtaaagttgttgacagtgttaaggtgtgcactgctcgtttgtttgaccaacctaaaatagaagacccctatgcaattagcttttctccatggaatccttctgtacatgatgaagccagagaaaagatgctgactcagaaaaagaagcctgaagaacagcacaataaaagtgttcatgttgctggcctgtcatgggtaaagcctggctcagtacagcctttcagtaaagaagagaaaacagtggcgacttaagagatggtgaatctggtgcaccatgcactttcctgctagactctggcctagttcaagctgaccaatggcagaggactgcctgaagagtaaaactgtgtgaacaatgactgactgccagtgttttccatgtatgcataggttctaacagcagggtttggaaacctgtctctaagtaatgcattacttctgtcagaagtgtcttagggtggttatctagttcagtactccaaattattggggaccttgaggcttaagtaagtatttttctgaatataatgctaaaggtaagttgcattcatttaaactaatagagcagacagaattcagcactacttaatagtttataaatcagtggtttcagttgtatatatgttaggaaatggagaggtatagagagagcaggttccatagctcagcacttttaagtggaagatcatttgaatctcagtcttcagcctgcactgatttgtagcctgcactgtcttactgatttacaaactgaaatcactgagaaatgtctttagttcagtgagaagaaaccagaacacttgttcctagtgttgtgttgttttttttaagcaaattacttactgtatttttatggcaggagggagaaaaagtgttacaacggtttctaatgaagtccggtatttaaatgataaatgactaatgtgtttagtagagacaaaataaaccaataaatgattgttctttgccattta

SEQ ID NO: 355974 - DNA, 1046 bp, Homo sapiens
  misc_feature (768)..(768): n is a, c, g, or t
  misc_feature (1046)..(1046): n is a, c, g, or t
cgctgccgagggcagggcagggcaggcaggcggggtggggcggggcggggatcaagcaggggcagggctggcgctgcggcgggagatgctgtcgggccgcggcggcgcttggcagccaggagctctgcattgaaggcactggggtgaggcttactgcccggcaggctggtgggtaaagtgaatgccgaagacagaagatttggatgatacaccactgactttctttgtttggaatacacgttatgaaccctttctggagcatgtctacaagctctgtacgcaaacgatctgaaggtgaagagaagacattaacaggggacgtgaaaaccagtcctccacgaactgcaccaaagaaacagctgccttctattcccaaaaatgctttgcccataactaagcctacatctcctgccccagcagcacagtcaacaaatggcacgcatgcgtcctatggacccttctacctggaatactctcttcttgcagaatttaccttggttgtgaagcagaagctaccaggcgtctatgtgcagccatcttatcgctctgcattaatgtggtttggagtaatattcatacggcatggactttaccaagatggcgtatttaagtttacagtttacatccctgataactatccagatggtgactgtccacgcttggtgttcgatattcctgtctttcacccgctagttgatcccacctcaggtgagctggatgtgaagagagcatttgcaaaatggagaggcggaaccatatcatattggngggtgttatgcttgccgcgaggttcttaccgagttcgttacgaagcccctgaacccaagctgagtctggttgaaagatttccgttttaggggaaggtggtggacgttaggggcggcctgttggcccttcataagaccctggagtagtctccgggatcctgtgttagggcgagatgtccaaccggaagacaaatattgtgggcgtggtgcaccccaaaaaggagaggagtgtgccctcctcagggaggagaagagagacacagcgagtagctcaggggn

SEQ ID NO: 355975 - DNA, 1846 bp, Homo sapiens
cgctgccgagggcagggcagggcaggcaggcggggtggggcggggcggggatcaagcaggggcagggctggcgctgcggcgggagatgctgtcgggccgcggcggcgcttggcagccaggagctctgcattgaaggcactggggtgaggcttactgcccggcaggctggtgggtaaagtgaatgccgaagacagaagatttggatgatacaccactgactttctttgtttggaatacacgttatgaaccctttctggagcatgtctacaagctctgtacgcaaacgatctgaaggtgaagagaagacattaacaggggacgtgaaaaccagtcctccacgaactgcaccaaagaaacagctgccttctattcccaaaaatgctttgcccataactaagcctacatctcctgccccagcagcacagtcaacaaatggcacgcatgcgtcctatggacccttctacctggaatactctcttcttgcagaatttaccttggttgtgaagcagaagctaccaggcgtctatgtgcagccatcttatcgctctgcattaatgtggtttggagtaatattcatacggcatggactttaccaagatggcgtatttaagtttacagtttacatccctgataactatccagatggtgactgtccacgcttggtgttcgatattcctgtctttcacccgctagttgatcccacctcaggtgagctggatgtgaagagagcatttgcaaaatggaggcggaaccataatcatatttggcaggtattaatgtatgcaaggagagttttctacaagattgatacagcaagccccctgaacccagaggctgcagtactgtatgaaaaagatattcagctttttaaaagtaaagttgttgacagtgttaaggtgtgcactgctcgtttgtttgaccaacctaaaatagaagacccctatgcaattagcttttctccatggaatccttctgtacatgatgaagccagagaaaagatgctgactcagaaaaagaagcctgaagaacagcacaataaaagtgttcatgttgctggcctgtcatgggtaaagcctggctcagtacagcctttcagtaaagaagagaaaacagtggcgacttaagagatggtgaatctggtgcaccatgcactttcctgctagactctggcctagttcaagctgaccaatggcagaggactgcctgaagagtaaaactgtgtgaacaatgactgactgccagtgttttccatgtatgcataggttctaacagcagggtttggaaacctgtctctaagtaatgcattacttctgtcagaagtgtcttagggtggttatctagttcagtactccaaattattggggaccttgaggcttaagtaagtatttttctgaatataatgctaaaggtaagttgcattcatttaaactaatagagcagacagaattcagcactacttaatagtttataaatcagtggtttcagttgtatatatgttaggaaatggagaggtatagagagagcaggttccatagctcagcacttttaagtggaagatcatttgaatctcagtcttcagcctgcactgatttgtagcctgcactgtcttactgatttacaaactgaaatcactgagaaatgtctttagttcagtgagaagaaaccagaacacttgttcctagtgttgtgttgttttttttaagcaaattacttactgtatttttatggcaggagggagaaaaagtgttacaacggtttctaatgaagtccggtatttaaatgataaatgactaatgtgtttagtagagacaaaataaaccaataaatgattgttctttgccattta

SEQ ID NO: 355976 - DNA, 2162 bp, Homo sapiens
cgctgccgagggcagggcagggcaggcaggcggggtggggcggggcggggatcaagcaggggcagggctggcgctgcggcgggagatgctgtcgggccgcggcggcgcttggcagccaggagctctgcattgaaggcactggggcgctcgcgactcggcgacggcggccgcagtgggacacggaggcggggccgggcacctgtgcgcgtttgcaggcacctgctgcgctggccgcctcgcagcccgggactgctgctggggactgcggctggagctgggctggcccggcccgagggagaggggggcccagctggctcgccccggcccgtgcccgccctccccggccgggtcccgaccccgagctctggttaagggggcgtcgccgggccccagagcccccccactggaggggcccgcggctcccgggccagcatcgagctagctgcgaggccaggacagggcccccgccttgcatcacctcgagacaggtaaagtgaatgccgaagacagaagatttggatgatacaccactgactttctttgtttggaatacacgttatgaaccctttctggagcatgtctacaagctctgtacgcaaacgatctgaaggtgaagagaagacattaacaggggacgtgaaaaccagtcctccacgaactgcaccaaagaaacagctgccttctattcccaaaaatgctttgcccataactaagcctacatctcctgccccagcagcacagtcaacaaatggcacgcatgcgtcctatggacccttctacctggaatactctcttcttgcagaatttaccttggttgtgaagcagaagctaccaggcgtctatgtgcagccatcttatcgctctgcattaatgtggtttggagtaatattcatacggcatggactttaccaagatggcgtatttaagtttacagtttacatccctgataactatccagatggtgactgtccacgcttggtgttcgatattcctgtctttcacccgctagttgatcccacctcaggtgagctggatgtgaagagagcatttgcaaaatggaggcggaaccataatcatatttggcaggtattaatgtatgcaaggagagttttctacaagattgatacagcaagccccctgaacccagaggctgcagtactgtatgaaaaagatattcagctttttaaaagtaaagttgttgacagtgttaaggtgtgcactgctcgtttgtttgaccaacctaaaatagaagacccctatgcaattagcttttctccatggaatccttctgtacatgatgaagccagagaaaagatgctgactcagaaaaagaagcctgaagaacagcacaataaaagtgttcatgttgctggcctgtcatgggtaaagcctggctcagtacagcctttcagtaaagaagagaaaacagtggcgacttaagagatggtgaatctggtgcaccatgcactttcctgctagactctggcctagttcaagctgaccaatggcagaggactgcctgaagagtaaaactgtgtgaacaatgactgactgccagtgttttccatgtatgcataggttctaacagcagggtttggaaacctgtctctaagtaatgcattacttctgtcagaagtgtcttagggtggttatctagttcagtactccaaattattggggaccttgaggcttaagtaagtatttttctgaatataatgctaaaggtaagttgcattcatttaaactaatagagcagacagaattcagcactacttaatagtttataaatcagtggtttcagttgtatatatgttaggaaatggagaggtatagagagagcaggttccatagctcagcacttttaagtggaagatcatttgaatctcagtcttcagcctgcactgatttgtagcctgcactgtcttactgatttacaaactgaaatcactgagaaatgtctttagttcagtgagaagaaaccagaacacttgttcctagtgttgtgttgttttttttaagcaaattacttactgtatttttatggcaggagggagaaaaagtgttacaacggtttctaatgaagtccggtatttaaatgataaatgactaatgtgtttagtagagacaaaataaaccaataaatgattgttctttgccattta

SEQ ID NO: 355977 - DNA, 1736 bp, Homo sapiens
aaacaacccggccagagaatgcggcttctgagtgtaagacactgaggcggtgtcacagacaggtaaagtgaatgccgaagacagaagatttggatgatacaccactgactttctttgtttggaatacacgttatgaaccctttctggagcatgtctacaagctctgtacgcaaacgatctgaaggtgaagagaagacattaacaggggacgtgaaaaccagtcctccacgaactgcaccaaagaaacagctgccttctattcccaaaaatgctttgcccataactaagcctacatctcctgccccagcagcacagtcaacaaatggcacgcatgcgtcctatggacccttctacctggaatactctcttcttgcagaatttaccttggttgtgaagcagaagctaccaggcgtctatgtgcagccatcttatcgctctgcattaatgtggtttggagtaatattcatacggcatggactttaccaagatggcgtatttaagtttacagtttacatccctgataactatccagatggtgactgtccacgcttggtgttcgatattcctgtctttcacccgctagttgatcccacctcaggtgagctggatgtgaagagagcatttgcaaaatggaggcggaaccataatcatatttggcaggtattaatgtatgcaaggagagttttctacaagattgatacagcaagccccctgaacccagaggctgcagtactgtatgaaaaagatattcagctttttaaaagtaaagttgttgacagtgttaaggtgtgcactgctcgtttgtttgaccaacctaaaatagaagacccctatgcaattagcttttctccatggaatccttctgtacatgatgaagccagagaaaagatgctgactcagaaaaagaagcctgaagaacagcacaataaaagtgttcatgttgctggcctgtcatgggtaaagcctggctcagtacagcctttcagtaaagaagagaaaacagtggcgacttaagagatggtgaatctggtgcaccatgcactttcctgctagactctggcctagttcaagctgaccaatggcagaggactgcctgaagagtaaaactgtgtgaacaatgactgactgccagtgttttccatgtatgcataggttctaacagcagggtttggaaacctgtctctaagtaatgcattacttctgtcagaagtgtcttagggtggttatctagttcagtactccaaattattggggaccttgaggcttaagtaagtatttttctgaatataatgctaaaggtaagttgcattcatttaaactaatagagcagacagaattcagcactacttaatagtttataaatcagtggtttcagttgtatatatgttaggaaatggagaggtatagagagagcaggttccatagctcagcacttttaagtggaagatcatttgaatctcagtcttcagcctgcactgatttgtagcctgcactgtcttactgatttacaaactgaaatcactgagaaatgtctttagttcagtgagaagaaaccagaacacttgttcctagtgttgtgttgttttttttaagcaaattacttactgtatttttatggcaggagggagaaaaagtgttacaacggtttctaatgaagtccggtatttaaatgataaatgactaatgtgtttagtagagacaaaataaaccaataaatgattgttctttgccattta

SEQ ID NO: 355978 - DNA, 2077 bp, Homo sapiens
cgctgccgagggcagggcagggcaggcaggcggggtggggcggggcggggatcaagcaggggcagggctggcgctgcggcgggagatgctgtcgggccgcggcggcgcttggcagccaggagctctgcattgaaggcactggggtaaagtgaatgccgaagacagaagatttggatgatacaccactgactttctttgtttggaatacacgttatgaaccctttctggagcatgtctacaagctctgtacgcaaacgatctgaaggtgaagagaagacattaacaggggacgtgaaaaccagtcctccacgaactgcaccaaagaaacagctgccttctattcccaaaaatgctttgcccataactaagcctacatctcctgccccagcagcacagtcaacaaatggcacgcatgcgtcctatggacccttctacctggaatactctcttcttgcagaatttaccttggttgtgaagcagaagctaccaggcgtctatgtgcagccatcttatcgctctgcattaatgtggtttggagtaatattcatacggcatggactttaccaagatggcgtatttaagtttacagtttacatccctgataactatccagatggtgactgtccacgcttggtgttcgatattcctgtctttcacccgctagttgatcccacctcaggtgagctggatgtgaagagagcatttgcaaaatggaggcggaaccataatcatatttggcaggtattaatgtatgcaaggagagttttctacaagattgatacagcaagccccctgaacccagaggctgcagtactgtatgaaaaagatattcagctttttaaaagtaaagttgttgacagtgttaaggtgtgcactgctcgtttgtttgaccaacctaaaatagaagacccctatgcaattagcttttctccatggaatccttctgtacatgatgaagccagagaaaagatgctgactcagaaaaagaagcctgaagaacagcacaataaaagtgttcatgttgctggcctgtcatgggtaaagcctggctcagtacagcctttcagtaaagaagagaaaacagtggcgacttaagagatggtgaatctggtgcaccatgcactttcctgctagactctggcctagttcaagctgaccaatggcagaggactgcctgaagagtaaaactgtgtgaacaatgactgactgccagtgttttccatgtatgcataggttctaacagcagggtttggaaacctgtctctaagtaatgcattacttctgtcagaagtgtcttagggtggttatctagttcagtactccaaattattggggaccttgaggcttaagtaagtatttttctgaatataatgctaaaggtaagttgcattcatttaaactaatagagcagacagaattcagcactacttaatagtttataaatcagtggtttcagttgtatatatgttaggaaatggagaggtatagagagagcaggttccatagctcagcacttttaagtggaagatcatttgaatctcagtcttcagcctgcactgatttgtagcctgcactgtcttactgatttacaaactgaaatcactgagaaatgtctttagttcagtgagaagaaaccagaacacttgttcctagtgttgtgttgttttttttaagcaaattacttactgtatttttatggcaggagggagaaaaagtgttacaacggtttctaatgaagtccggtatttaaatgataaatgactaatgtgtttagtagagacaaaataaaccaataaatgattgttctttgccatttatgcaggaaactacccttttctcaatataaccaaacaaaggctaatttataaatgctttattgaaaaatacacttatcttcatataaaattacagtagcagtatcttgagaagttttataaatatttttgcagaacactattctaattgaacaatgtaagttccatatttctctcagcaatatgaagttacctagtaactttgtttatactgattcaatttacaattgaattttctccctaataagattattaatttgact

SEQ ID NO: 355979 - DNA, 1934 bp, Homo sapiens
cgctgccgagggcagggcagggcaggcaggcggggtggggcggggcggggatcaagcaggggcagggctggcgctgcggcgggagatgctgtcgggccgcggcggcgcttggcagccaggagctctgcattgaaggcactggggtaaagtgaatgccgaagacagaagatttggatgatacaccactgactttctttgtttggaatacacgttatgaaccctttctggagcatgtctacaagctctgtacgcaaacgatctgaaggtgaagagaagacattaacaggggacgtgaaaaccagtcctccacgaactgcaccaaagaaacagctgccttctattcccaaaaatgctttgcccataactaagcctacatctcctgccccagcagcacagtcaacaaatggcacgcatgcgtcctatggacccttctacctggaatactctcttcttgcagaatttaccttggttgtgaagcagaagctaccaggcgtctatgtgcagccatcttatcgctctgcattaatgtggtttggagtaatattcatacggcatggactttaccaagatggcgtatttaagtttacagtttacatccctgataactatccagatggtgactgtccattgtccagggggacttctgtgctttgcagcagcttccggcatgccatcagagctttgtttctctgctcagggtctgcaagggaggctggctgcctgccatcctgcagcactcaccagcgcttggtgttcgatattcctgtctttcacccgctagttgatcccacctcaggtgagctggatgtgaagagagcatttgcaaaatggaggcggaaccataatcatatttggcaggtattaatgtatgcaaggagagttttctacaagattgatacagcaagccccctgaacccagaggctgcagtactgtatgaaaaagatattcagctttttaaaagtaaagttgttgacagtgttaaggtgtgcactgctcgtttgtttgaccaacctaaaatagaagacccctatgcaattagcttttctccatggaatccttctgtacatgatgaagccagagaaaagatgctgactcagaaaaagaagcctgaagaacagcacaataaaagtgttcatgttgctggcctgtcatgggtaaagcctggctcagtacagcctttcagtaaagaagagaaaacagtggcgacttaagagatggtgaatctggtgcaccatgcactttcctgctagactctggcctagttcaagctgaccaatggcagaggactgcctgaagagtaaaactgtgtgaacaatgactgactgccagtgttttccatgtatgcataggttctaacagcagggtttggaaacctgtctctaagtaatgcattacttctgtcagaagtgtcttagggtggttatctagttcagtactccaaattattggggaccttgaggcttaagtaagtatttttctgaatataatgctaaaggtaagttgcattcatttaaactaatagagcagacagaattcagcactacttaatagtttataaatcagtggtttcagttgtatatatgttaggaaatggagaggtatagagagagcaggttccatagctcagcacttttaagtggaagatcatttgaatctcagtcttcagcctgcactgatttgtagcctgcactgtcttactgatttacaaactgaaatcactgagaaatgtctttagttcagtgagaagaaaccagaacacttgttcctagtgttgtgttgttttttttaagcaaattacttactgtatttttatggcaggagggagaaaaagtgttacaacggtttctaatgaagtccggtatttaaatgataaatgactaatgtgtttagtagagacaaaataaaccaataaatgattgttctttgccattta

SEQ ID NO: 355980 - DNA, 1718 bp, Homo sapiens
cgctgccgagggcagggcagggcaggcaggcggggtggggcggggcggggatcaagcaggggcagggctggcgctgcggcgggagatgctgtcgggccgcggcggcgcttggcagccaggagctctgcattgaaggcactggggtaaagtgaatgccgaagacagaagatttggatgatacaccactgactttctttgtttggaatacacgttatgaaccctttctggagcatgtctacaagctctgtacgcaaacgatctgaaggtgaagagaagacattaacaggggacgtgaaaaccagtcctccacgaactgcaccaaagaaacagctgccttctattcccaaaaatgctttgcccataactaagcctacatctcctgccccagcagcacagtcaacaaatggcacgcatgcgtcctatggacccttctacctggaatactctcttcttgcagaatttaccttggttgtgaagcagaagctaccaggcgtctatgtgcagccatcttatcgctctgcattaatgtggtttggagtaatattcatacggcatggactttaccaagatggcgtatttaagtttacagtttacatccctgataactatccagatggtgactgtccacgcttggtgttcgatattcctgtctttcacccgctagttgatcccacctcaggtgagctggatgtgaagagagcatttgcaaaatggaggtatgaaaaagatattcagctttttaaaagtaaagttgttgacagtgttaaggtgtgcactgctcgtttgtttgaccaacctaaaatagaagacccctatgcaattagcttttctccatggaatccttctgtacatgatgaagccagagaaaagatgctgactcagaaaaagaagcctgaagaacagcacaataaaagtgttcatgttgctggcctgtcatgggtaaagcctggctcagtacagcctttcagtaaagaagagaaaacagtggcgacttaagagatggtgaatctggtgcaccatgcactttcctgctagactctggcctagttcaagctgaccaatggcagaggactgcctgaagagtaaaactgtgtgaacaatgactgactgccagtgttttccatgtatgcataggttctaacagcagggtttggaaacctgtctctaagtaatgcattacttctgtcagaagtgtcttagggtggttatctagttcagtactccaaattattggggaccttgaggcttaagtaagtatttttctgaatataatgctaaaggtaagttgcattcatttaaactaatagagcagacagaattcagcactacttaatagtttataaatcagtggtttcagttgtatatatgttaggaaatggagaggtatagagagagcaggttccatagctcagcacttttaagtggaagatcatttgaatctcagtcttcagcctgcactgatttgtagcctgcactgtcttactgatttacaaactgaaatcactgagaaatgtctttagttcagtgagaagaaaccagaacacttgttcctagtgttgtgttgttttttttaagcaaattacttactgtatttttatggcaggagggagaaaaagtgttacaacggtttctaatgaagtccggtatttaaatgataaatgactaatgtgtttagtagagacaaaataaaccaataaatgattgttctttgccattta

SEQ ID NO: 355981 - DNA, 1072 bp, Homo sapiens
tatgagggatagttatgtgagaaaattaattagataatgtctaaaacatacatgtcgacaacaataaaaaatactgtgctttattaagttaggggaattggcttaaaactgcaaaatgaatgttatagaaatttagtgagccaacaaatagtttttaaatacttttctcttccttaagcttttctccatggaatccttctgtacatgatgaagccagagaaaagatgctgactcagaaaaagaagcctgaagaacagcacaataaaagtgttcatgttgctggcctgtcatgggtaaagcctggctcagtacagcctttcagtaaagaagagaaaacagtggcgacttaagagatggtgaatctggtgcaccatgcactttcctgctagactctggcctagttcaagctgaccaatggcagaggactgcctgaagagtaaaactgtgtgaacaatgactgactgccagtgttttccatgtatgcataggttctaacagcagggtttggaaacctgtctctaagtaatgcattacttctgtcagaagtgtcttagggtggttatctagttcagtactccaaattattggggaccttgaggcttaagtaagtatttttctgaatataatgctaaaggtaagttgcattcatttaaactaatagagcagacagaattcagcactacttaatagtttataaatcagtggtttcagttgtatatatgttaggaaatggagaggtatagagagagcaggttccatagctcagcacttttaagtggaagatcatttgaatctcagtcttcagcctgcactgatttgtagcctgcactgtcttactgatttacaaactgaaatcactgagaaatgtctttagttcagtgagaagaaaccagaacacttgttcctagtgttgtgttgttttttttaagcaaattacttactgtatttttatggcaggagggagaaaaagtgttacaacggtttctaatgaagtccggtatttaaatgataaatgactaatgtgtttagtagagacaaaataaaccaataaatgattgttctttgccattta

SEQ ID NO: 355982 - DNA, 962 bp, Homo sapiens
tgggccgcgttacctgtacactggtgtttgtaagacgtctaaagatagaaggagcactatgcaattagcttttctccatggaatccttctgtacatgatgaagccagagaaaagatgctgactcagaaaaagaagcctgaagaacagcacaataaaagtgttcatgttgctggcctgtcatgggtaaagcctggctcagtacagcctttcagtaaagaagagaaaacagtggcgacttaagagatggtgaatctggtgcaccatgcactttcctgctagactctggcctagttcaagctgaccaatggcagaggactgcctgaagagtaaaactgtgtgaacaatgactgactgccagtgttttccatgtatgcataggttctaacagcagggtttggaaacctgtctctaagtaatgcattacttctgtcagaagtgtcttagggtggttatctagttcagtactccaaattattggggaccttgaggcttaagtaagtatttttctgaatataatgctaaaggtaagttgcattcatttaaactaatagagcagacagaattcagcactacttaatagtttataaatcagtggtttcagttgtatatatgttaggaaatggagaggtatagagagagcaggttccatagctcagcacttttaagtggaagatcatttgaatctcagtcttcagcctgcactgatttgtagcctgcactgtcttactgatttacaaactgaaatcactgagaaatgtctttagttcagtgagaagaaaccagaacacttgttcctagtgttgtgttgttttttttaagcaaattacttactgtatttttatggcaggagggagaaaaagtgttacaacggtttctaatgaagtccggtatttaaatgataaatgactaatgtgtttagtagagacaaaataaaccaataaatgattgttctttgccattta

SEQ ID NO: 355983 - DNA, 390 bp, Homo sapiens
ggggtgatttgatttgcaggaccgagtgtgttcttcccaacgcccccggaagaacgtctttgacgggcaggtgtgagagccagttggcgccgggaggccaggcggaagcctcgggccccaggatcgtgcagcagggggcggagcccgctgccgagggcagggcagggcaggcaggcggggtggggcggggcggggatcaagcaggggcagggctggcgctgcggcgggagatgctgtcgggccgcggcggcgcttggcagccaggagctctgcattgaaggcactggggtgaggcttactgcccggcaggctggtgggtacgcgagggctgaggtgtctgtaaatctggccgccagcctccacgggcccggcatttgtccatctttctag

SEQ ID NO: 355984 - DNA, 795 bp, Homo sapiens
cgctgccgagggcagggcagggcaggcaggcggggtggggcggggcggggatcaagcaggggcagggctggcgctgcggcgggagatgctgtcgggccgcggcggcgcttggcagccaggagctctgcattgaaggcactggggtaaagtgaatgccgaagacagaagatttggatgatacaccactgactttctttgtttggaatacacgttatgaaccctttctggagcatgtctacaagctctgtacgcaaacgatctgaaggtgaagagaagacattaacaggggacgtgaaaaccagtcctccacgaactgcaccaaagaaacagctgccttctattcccaaaaatgctttgcccataactaagcctacatctcctgccccagcagcacagtcaacaaatggcacgcatgcgtcctatggacccttctacctggaatactctcttcttgcagaatttaccttggttgtgaagcagaagctaccaggcgtctatgtgcagccatcttatcgctctgcattaatgtggtttggagtaatattcatacggcatggactttaccaagatggcgtatttaagtttacagtttacatccctgataactatccagatggtgactgtccacgcttggtgttcgatattcctgtctttcacccgctagttgatcccacctcaggtgagctggatgtgaagagagcatttgcaaaatggagggtaagtaaataaagtgtttcttttagtgacataatacagcaagaggacgcctcggtaatcacgccatgtttcccttta

SEQ ID NO: 355985 - DNA, 1765 bp, Homo sapiens
cgctgccgagggcagggcagggcaggcaggcggggtggggcggggcggggatcaagcaggggcagggctggcgctgcggcgggagatgctgtcgggccgcggcggcgcttggcagccaggagctctgcattgaaggcactggggtaaagtgaatgccgaagacagaagatttggatgatacaccactgactttctttgtttggaatacacgttatgaaccctttctggagcatgtctacaagctctgtacgcaaacgatctgaaggtgaagagaagacattaacaggggacgtgaaaaccagtcctccacgaactgcaccaaagaaacagctgccttctattcccaaaaatgctttgcccataactaagcctacatctcctgccccagcagcacagtcaacaaatggcacgcatgcgtcctatggacccttctacctggaatactctcttcttgcagaatttaccttggttgtgaagcagaagctaccaggcgtctatgtgcagccatcttatcgctctgcattaatgtggtttggagtaatattcatacggcatggactttaccaagatggcgtatttaagtttacagtttacatccctgataactatccagatggtgactgtccacgcttggtgttcgatattcctgtctttcacccgctagttgatcccacctcaggtgagctggatgtgaagagagcatttgcaaaatggaggcggaaccataatcatatttggcaggtattaatgtatgcaaggagagttttctacaagattgatacagcaagccccctgaacccagaggctgcagtactgtatgaaaaagatattcagctttttaaaagtaaagttgttgacagtgttaaggtgtgcactgctcgtttgtttgaccaacctaaaatagaagacccctatgcaattagcttttctccatggaatccttctgtacatgatgaagccagagaaaagatgctgactcagaaaaagaagcctgaagaacagcacaataaaagtgttcatgttgctggcctgtcatgggtaaagcctggctcagtacagcctttcagtaaagaagagaaaacagtggcgacttaagagatggtgaatctggtgcaccatgcactttcctgctagactctggcctagttcaagctgaccaatggcagaggactgcctgaagagttctaacagcagggtttggaaacctgtctctaagtaatgcattacttctgtcagaagtgtcttagggtggttatctagttcagtactccaaattattggggaccttgaggcttaagtaagtatttttctgaatataatgctaaaggtaagttgcattcatttaaactaatagagcagacagaattcagcactacttaatagtttataaatcagtggtttcagttgtatatatgttaggaaatggagaggtatagagagagcaggttccatagctcagcacttttaagtggaagatcatttgaatctcagtcttcagcctgcactgatttgtagcctgcactgtcttactgatttacaaactgaaatcactgagaaatgtctttagttcagtgagaagaaaccagaacacttgttcctagtgttgtgttgttttttttaagcaaattacttactgtatttttatggcaggagggagaaaaagtgttacaacggtttctaatgaagtccggtatttaaatgataaatgactaatgtgtttagtagagacaaaataaaccaataaatgattgttctttgccattta

SEQ ID NO: 355986 - DNA, 369 bp, Homo sapiens
gcggccgcagtgggacacggaggcggggccgggcacctgtgcgcgtttgcaggcacctgctgcgctggccgcctcgcagcccgggactgctgctggggactgcggctggagctgggctggcccggcccgagggagaggggggcccagctggctcgccccggcccgtgcccgccctccccggccgggtcccgaccccgagctctggttaagggggcgtcgccgggccccagagcccccccactggaggggcccgcggctcccgggccagcatcgagctagctgcgaggccaggacagggcccccgccttgcatcacctcgagacaggtttgtccagattccctgagtgctcagagacgggtttccgcccg

SEQ ID NO: 355987 - DNA, 626 bp, Homo sapiens
gtacactcctggcatgcgtgttaccctagcgtgtgctcggtaccgtgacatccatacgcgtgctgtcatgttgtgcatgttcgaaagtgtcgcgtctcacagagggtaggaagcccaccaacaatatcgcgtatgtactataagatctctagctaggcgattgcttagtcgcttgcgtcgtttaatcaacgtttctgggtgtgcctagattgatcggtataaggctcactctcccgccccccaaagtggttgatcgttggaacgagaaaagggccatgttcggagtgtatgacaacatcgggatcctgggaaactttgaaaagcaccccaaagaactgatcagggggcccatatggcttcgaggttggaaagggaatgaattgcaacgttgtatccgaaagaggaaaatggttggaagtagaatgttcgctgatgacctgcacaaccttaataaacgcatccgctatctctacaaacactttaaccgacatgggaagtttcgatagaagagaaagctgagaacttcggaaaaggctcatctgtcaccctggagaagggaaactgtacttttccctgtgaggaaacggctttgtattttctctgtaataaaatggggcttctttgga

SEQ ID NO: 355988 - DNA, 1155 bp, Homo sapiens
gggatctcacccgcggctctgattccggcagtcaggctgaaatgaaaaggaaaaaacacgcgtgcacaacacgcaccaattagcaaggcagttttcaagtcggcggagaatccggccaatccccggcaggcagaggcaaagggccgcctctgagtctggcaacgcgcgggcaaagccacaaataccgagttcaaatctcaacggctgcaggacggccaatcgcgacgcccgccggagcggccggccaatcacagcgccgcccgggggcgggccaaggctccggctccggcccccgctcccacccccggcccgcctgcgaatccctccttggccgcaaggtccccctttgcccagtcggcggggaggaggccgtatttctgctggccagagacgtcgcgtccctggctgggcattcagtcacccccaggaaaggaggcaagtccacgctgggagttagaaggcatcgcctctaatccaggtttcgccatctcctctgctaagtgacgtccagcaagtcacttcactttcaggacctcaaatctcctccccagtagtaaaataggggtaataaaaacagctacagcggaagactgttgtgaggcacagagaaagggcttggtcattggaagcgggttccaggttctcaaccttcatttccttcacggttgaaggacgccaaagaaagcggaaagggtgtgcctagattgatcggtataaggctcactctcccgccccccaaagtggttgatcgttggaacgagaaaagggccatgttcggagtgtatgacaacatcgggatcctgggaaactttgaaaagcaccccaaagaactgatcagggggcccatatggcttcgaggttggaaagggaatgaattgcaacgttgtatccgaaagaggaaaatggttggaagtagaatgttcgctgatgacctgcacaaccttaataaacgcatccgctatctctacaaacactttaaccgacatgggaagtttcgatagaagagaaagctgagaacttcggaaaaggctcatctgtcaccctggagaagggaaactgtacttttccctgtgaggaaacggctttgtattttctctgtaataaaatggggcttctttggaaaaaaaccaaaaaaaaaaaacaaaaaaggggggg

SEQ ID NO: 355989 - DNA, 657 bp, Homo sapiens
  misc_feature (12)..(12): n is a, c, g, or t
ttttttttcttncccccaaagaaaaaaaaacaccctcccttgttaaggcgttcaaagagaccattgtcccctcccggttcttgcgggtgtggatgacgacattagaaatataatttttatcctcaaggatgcctagcagatcgcagctagatgggaggcgacgtctgcttctggttttggctgtaggggaataaaagccaggacttatcgggcagagggctgggactgggcttgcggcaaactttctctgtggctagatgtcggataagccctctccccccccaaaggttgtcgttggacgaaaaagggcatgttggaggtatgcaacatcggattctgggaaactttgaaaagcaccccaaagaactgatcagggggcccatatggcttcgaggttggaaagggaatgaattgcaacgttgtatccgaaagaggaaaatggttggaagtagaatgttcgctgatgacctgcacaaccttaataaacgcatccgctatctctacaaacactttaaccgacatgggaagtttcgatagaagagaaagctgagaacttcggaaaaggctcatctgtcaccctggagaagggaaactgtacttttccctgtgaggaaacggctttgtattttctctgtaataaaatggggcttctttgga

SEQ ID NO: 355990 - DNA, 1522 bp, Homo sapiens
gggatctcacccgcggctctgattccggcagtcaggctgaaatgaaaaggaaaaaacacgcgtgcacaacacgcaccaattagcaaggcagttttcaagtcggcggagaatccggccaatccccggcaggcagaggcaaagggccgcctctgagtctggcaacgcgcgggcaaagccacaaataccgagttcaaatctcaacggctgcaggacggccaatcgcgacgcccgccggagcggccggccaatcacagcgccgcccgggggcgggccaaggctccggctccggcccccgctcccacccccggcccgcctgcgaatccctccttggccgcaaggtccccctttgcccagtcggcggggaggaggccgtatttctgctggccagagacgtcgcgtccctggctgggcattcagtcacccccaggaaaggaggcaagtccacgctgggagttagaaggcatcgcctctaatccaggtttcgccatctcctctgctaagtgacgtccagcaagtcacttcactttcaggacctcaaatctcctccccagtagtaaaataggggtaataaaaacagctacagcggaagactgttgtgaggcacagagaaagggcttggtcattggaagcgggttccaggttctcaaccttcatttccttcacggttgaaggacgccaaagaaagcggaaagggtgaattttcttgaaatctcagttttggggaatcttagcgacgagtcgcggacctcagcttgtccggcgctccaaaacttccggcaggcggaccggaagcactgaggcgggaagggtggtagaggcccctcctgccggaacccggggggcggggctcgtggctgttgcggatggggcgtaggtgggcggtgcgcccacagctgcctgggtaaggcccaagatggctgtcttcgccttagtactcgtgtgaagttggcggggacggttcctgtcatcttcttgggcttatttggtgtgctgttgaaggggggagactagagaaatggcagggaacctcttatccggggcaggtaggcgcctgtgggactgggtgcctctggcgtgcagaagcttctctcttggtgtgcctagattgatcggtataaggctcactctcccgccccccaaagtggttgatcgttggaacgagaaaagggccatgttcggagtgtatgacaacatcgggatcctgggaaactttgaaaagcaccccaaagaactgatcagggggcccatatggcttcgaggttggaaagggaatgaattgcaacgttgtatccgaaagaggaaaatggttggaagtagaatgttcgctgatgacctgcacaaccttaataaacgcatccgctatctctacaaacactttaaccgacatgggaagtttcgatagaagagaaagctgagaacttcggaaaaggctcatctgtcaccctggagaagggaaactgtacttttccctgtgaggaaacggctttgtattttctctgtaataaaatggggcttctttgga

SEQ ID NO: 355991 - DNA, 2183 bp, Homo sapiens
gggatctcacccgcggctctgattccggcagtcaggctgaaatgaaaaggaaaaaacacgcgtgcacaacacgcaccaattagcaaggcagttttcaagtcggcggagaatccggccaatccccggcaggcagaggcaaagggccgcctctgagtctggcaacgcgcgggcaaagccacaaataccgagttcaaatctcaacggctgcaggacggccaatcgcgacgcccgccggagcggccggccaatcacagcgccgcccgggggcgggccaaggctccggctccggcccccgctcccacccccggcccgcctgcgaatccctccttggccgcaaggtccccctttgcccagtcggcggggaggaggccgtatttctgctggccagagacgtcgcgtccctggctgggcattcagtcacccccaggaaaggaggcaagtccacgctgggagttagaaggcatcgcctctaatccaggtttcgccatctcctctgctaagtgacgtccagcaagtcacttcactttcaggacctcaaatctcctccccagtagtaaaataggggtaataaaaacagctacagcggaagactgttgtgaggcacagagaaagggcttggtcattggaagcgggttccaggttctcaaccttcatttccttcacggttgaaggacgccaaagaaagcggaaagggtgaattttcttgaaatctcagttttggggaatcttagcgacgagtcgcggacctcagcttgtccggcgctccaaaacttccggcaggcggaccggaagcactgaggcgggaagggtggtagaggcccctcctgccggaacccggggggcggggctcgtggctgttgcggatggggcgtaggtgggcggtgcgcccacagctgcctgggtaaggcccaagatggctgtcttcgccttagtactcgtgtgaagttggcggggacggttcctgtcatcttcttgggcttatttggtgtgctgttgaaggggggagactagagaaatggcagggaacctcttatccggggcaggtaggcgcctgtgggactgggtgcctctggcgtgcagaagcttctctcttggtgtgcctagattgatcggtataaggctcactctcccgccccccaaagtggttgatcgttggaacgagaaaagggccatgttcggagtgtatgacaacatcgggatcctgggaaactttgaaaagcaccccaaagaactgatcagggggcccatatggcttcgaggttggaaagggaatgaattgcaacgttgtatccgaaagaggaaaatggttggaagtagaatgttcgctgatgacctgcacaaccttaataaacgcatccgctatctctacaaacactttaaccgacatgggaagtttcgatagaagagaaagctgagaacttcggaaaaggctcatctgtcaccctggagaagggaaactgtacttttccctgtgaggaaacggctttgtattttctctgtaataaaatggggcttctttggaatttgatagccacatacttttgttttcctctagatgctgcctctactcatgtagactatgaagtcttgactcatcctagatcttaggatcttaggtttgggcttcacaccacttgccttttacagtctagctatacctaattcctttaaaaagaaaagttggtgagaatgttattggcgctttttgacataatgctgttatgttaatagtgtttctaaagagccttccacactgaaatgaaatataagagaaaaatggagtcatacttctgtactactctcataaaatatttattaggcatattctctgagtaggaactataggaaaaacaaaaaagtgtgaggtgtcctttccatttaaatatgaaacattaagtaccatatgaatggtagagatggcggatactaagcctgactggtcatcagttttctgggtgttttaacatttcaagcctagtcctaacccctaaagattgatcagtagagctgagttgagtctagggcatctatgtgttttgttcttttttaataataatttttaagaattacagctgggcagaatggtgcccacatgtaatcccagcattttgggaggctgaggtgggaggattgcttggagacaggaatttgagactggtctgggcgacatggtgaaactccgt

SEQ ID NO: 355992 - DNA, 1580 bp, Homo sapiens
gggatctcacccgcggctctgattccggcagtcaggctgaaatgaaaaggaaaaaacacgcgtgcacaacacgcaccaattagcaaggcagttttcaagtcggcggagaatccggccaatccccggcaggcagaggcaaagggccgcctctgagtctggcaacgcgcgggcaaagccacaaataccgagttcaaatctcaacggctgcaggacggccaatcgcgacgcccgccggagcggccggccaatcacagcgccgcccgggggcgggccaaggctccggctccggcccccgctcccacccccggcccgcctgcgaatccctccttggccgcaaggtccccctttgcccagtcggcggggaggaggccgtatttctgctggccagagacgtcgcgtccctggctgggcattcagtcacccccaggaaaggaggcaagtccacgctgggagttagaaggcatcgcctctaatccaggtttcgccatctcctctgctaagtgacgtccagcaagtcacttcactttcaggacctcaaatctcctccccagtagtaaaataggggtaataaaaacagctacagcggaagactgttgtgaggcacagagaaagggcttggtcattggaagcgggttccaggttctcaaccttcatttccttcacggttgaaggacgccaaagaaagcggaaagggtgaattttcttgaaatctcagttttggggaatcttagcgacgagtcgcggacctcagcttgtccggcgctccaaaacttccggcaggcggaccggaagcactgaggcgggaagggtggtagaggcccctcctgccggaacccggggggcggggctcgtggctgttgcggatggggcgtaggtgggcggtgcgcccacagctgcctgggtaaggcccaagatggctgtcttcgccttagtactcgtgtgaagttggcggggacggttcctgtcatcttcttgggcttatttggtgtgctgttgaaggggggagactagagaaatggcagggaacctcttatccggggcaggtaggcgcctgtgggactgggtgcctctggcgtgcagaagcttctctcttggtgtgcctagattgatcggtataaggctcactctcccgccccccaaagtggttgatcgttggaacgagaaaagggccatgttcggagtgtatgacaacatcgggatcctgggaaactttgaaaagcaccccaaagaactgatcagggggcccatatggcttcgaggttggaaagggaatgaattgcaacgttgtatccgaaagaggaaaatggttggaagtagaatgttcgctgatgacctgcacaaccttaataaacgcatccgctatctctacaaacactttaaccgacatgggaagtttcgatagaagagaaagctgagaacttcggaaaaggctcatctgtcaccctggagaagggaaactgtacttttccctgtgaggaaacggctttgtattttctctgtaataaaatggggcttctttggaaaaaaaaatcacttcttcctcaactttggcaccaaatcgggaattatttcttcctttc

SEQ ID NO: 355993 - DNA, 1646 bp, Homo sapiens
  misc_feature (1536)..(1536): n is a, c, g, or t
  misc_feature (1539)..(1539): n is a, c, g, or t
gggatctcacccgcggctctgattccggcagtcaggctgaaatgaaaaggaaaaaacacgcgtgcacaacacgcaccaattagcaaggcagttttcaagtcggcggagaatccggccaatccccggcaggcagaggcaaagggccgcctctgagtctggcaacgcgcgggcaaagccacaaataccgagttcaaatctcaacggctgcaggacggccaatcgcgacgcccgccggagcggccggccaatcacagcgccgcccgggggcgggccaaggctccggctccggcccccgctcccacccccggcccgcctgcgaatccctccttggccgcaaggtccccctttgcccagtcggcggggaggaggccgtatttctgctggccagagacgtcgcgtccctggctgggcattcagtcacccccaggaaaggaggcaagtccacgctgggagttagaaggcatcgcctctaatccaggtttcgccatctcctctgctaagtgacgtccagcaagtcacttcactttcaggacctcaaatctcctccccagtagtaaaataggggtaataaaaacagctacagcggaagactgttgtgaggcacagagaaagggcttggtcattggaagcgggttccaggttctcaaccttcatttccttcacggttgaaggacgccaaagaaagcggaaagggtgaattttcttgaaatctcagttttggggaatcttagcgacgagtcgcggacctcagcttgtccggcgctccaaaacttccggcaggcggaccggaagcactgaggcgggaagggtggtagaggcccctcctgccggaacccggggggcggggctcgtggctgttgcggatggggcgtaggtgggcggtgcgcccacagctgcctgggtaaggcccaagatggctgtcttcgccttagtactcgtgtgaagttggcggggacggttcctgtcatcttcttgggcttatttggtgtgctgttgaaggggggagactagagaaatggcagggaacctcttatccggggcaggtaggcgcctgtgggactgggtgcctctggcgtgcagaagcttctctcttggtgtgcctagattgatcggtataaggctcactctcccgccccccaaagtggttgatcgttggaacgagaaaagggccatgttcggagtgtatgacaacatcgggatcctgggaaactttgaaaagcaccccaaagaactgatcagggggcccatatggcttcgaggttggaaagggaatgaattgcaacgttgtatccgaaagaggaaaatggttggaagtagaatgttcgctgatgacctgcacaaccttaataaacgcatccgctatctctacaaacactttaaccgacatgggaagtttcgatagaagagaaagctgagaacttcggaaaaggctcatctgtcaccctggagaagggaaactgtacttttccctgtgaggaaacggctttgtattttctctgtaataaaatggggcttctttggaaaatataactcacncanaaaaaccaggcaacaaagtcaaggccagcatttcttaaacatcaaaactattggcgcggttttacaagtctggactggggaaaccctgccgttcccactttatcccc

SEQ ID NO: 355994 - DNA, 1589 bp, Homo sapiens
gggatctcacccgcggctctgattccggcagtcaggctgaaatgaaaaggaaaaaacacgcgtgcacaacacgcaccaattagcaaggcagttttcaagtcggcggagaatccggccaatccccggcaggcagaggcaaagggccgcctctgagtctggcaacgcgcgggcaaagccacaaataccgagttcaaatctcaacggctgcaggacggccaatcgcgacgcccgccggagcggccggccaatcacagcgccgcccgggggcgggccaaggctccggctccggcccccgctcccacccccggcccgcctgcgaatccctccttggccgcaaggtccccctttgcccagtcggcggggaggaggccgtatttctgctggccagagacgtcgcgtccctggctgggcattcagtcacccccaggaaaggaggcaagtccacgctgggagttagaaggcatcgcctctaatccaggtttcgccatctcctctgctaagtgacgtccagcaagtcacttcactttcaggacctcaaatctcctccccagtaaaacagctacagcggaagactgttgtgaggcacagagaaagggcttggtcattggaagcgggttccaggttctcaaccttcatttccttcacggttgaaggacgccaaagaaagcggaaagggtgaattttcttgaaatctcagttttggggaatcttagcgacgagtcgcggacctcagcttgtccggcgctccaaaacttccggcaggcggaccggaagcactgaggcgggaagggtggtagaggcccctcctgccggaacccggggggcggggctcgtggctgttgcggatggggcgtaggtgggcggtgcgcccacagctgcctgggtaaggcccaagatggctgtcttcgccttagtactcgtgtgaagttggcggggacggttcctgtcatcttcttgggcttatttggtgtgctgttgaaggggggagactagagaaatggcagggaacctcttatccggggcaggtaggcgcctgtgggactgggtgcctctggcgtgcagaagcttctctcttggtaagtggctgatgtaggcaccccgataactgcttcgtagtataataggcggctcagattaattccctcccttccccatccccaggtgtgcctagattgatcggtataaggctcactctcccgccccccaaagtggttgatcgttggaacgagaaaagggccatgttcggagtgtatgacaacatcgggatcctgggaaactttgaaaagcaccccaaagaactgatcagggggcccatatggcttcgaggttggaaagggaatgaattgcaacgttgtatccgaaagaggaaaatggttggaagtagaatgttcgctgatgacctgcacaaccttaataaacgcatccgctatctctacaaacactttaaccgacatgggaagtttcgatagaagagaaagctgagaacttcggaaaaggctcatctgtcaccctggagaagggaaactgtacttttccctgtgaggaaacggctttgtattttctctgtaataaaatggggcttctttgga

SEQ ID NO: 355995 - DNA, 1318 bp, Homo sapiens
  misc_feature (12)..(12): n is a, c, g, or t
ttttttttcttncccccaaagaaaaaaaaacaccctcccttgttaaggcgttcaaagagaccattgtcccctcccggttcttgcgggtgtggatgacgacattagaaatataatttttatcctcaaggatgcctagcagatcgcagctagatgggaggcgacgtctgcttctggttttggctgtaggggaataaaagccaggacttatcgggcagagggctgggactgggcttgcggcaaactttctctgtggctagatgtcggataagccctctccccccccaaaggttgtcgttggacgaaaaagggcatgttggaggtatgcaacatcggattctgggaaactttgaaaagcaccccaaagaactgatcagggggcccatatggcttcgaggttggaaagggaatgaattgcaacgttgtatccgaaagaggaaaatggttggaagtagaatgttcgctgatgacctgcacaaccttaataaacgcatccgctatctctacaaacactttaaccgacatgggaagtttcgatagaagagaaagctgagaacttcggaaaaggctcatctgtcaccctggagaagggaaactgtacttttccctgtgaggaaacggctttgtattttctctgtaataaaatggggcttctttggaatttgatagccacatacttttgttttcctctagatgctgcctctactcatgtagactatgaagtcttgactcatcctagatcttaggatcttaggtttgggcttcacaccacttgccttttacagtctagctatacctaattcctttaaaaagaaaagttggtgagaatgttattggcgctttttgacataatgctgttatgttaatagtgtttctaaagagccttccacactgaaatgaaatataagagaaaaatggagtcatacttctgtactactctcataaaatatttattaggcatattctctgagtaggaactataggaaaaacaaaaaagtgtgaggtgtcctttccatttaaatatgaaacattaagtaccatatgaatggtagagatggcggatactaagcctgactggtcatcagttttctgggtgttttaacatttcaagcctagtcctaacccctaaagattgatcagtagagctgagttgagtctagggcatctatgtgttttgttcttttttaataataatttttaagaattacagctgggcagaatggtgcccacatgtaatcccagcattttgggaggctgaggtgggaggattgcttggagacaggaatttgagactggtctgggcgacatggtgaaactccgt

SEQ ID NO: 355996 - DNA, 1265 bp, Homo sapiens
caaacacttatgtagctgtttacattgtgtttggcactgttctgagtcccctcgtataatttttacttcataagtaaaaataaacagtttttccaaagttaataaatggcagcatcagaattttaaccccaagcagtctggctccagagtctgtgctattgttctgtactgtaatgttccttgtctataggtgctgctcagcaagatgcaaccgtgggttgaaagcttagctggtgtaggatgagttctcttgtcttggatctaatgtgttctctcacattacacaggaaactttgaaaagcaccccaaagaactgatcagggggcccatatggcttcgaggttggaaagggaatgaattgcaacgttgtatccgaaagaggaaaatggttggaagtagaatgttcgctgatgacctgcacaaccttaataaacgcatccgctatctctacaaacactttaaccgacatgggaagtttcgatagaagagaaagctgagaacttcggaaaaggctcatctgtcaccctggagaagggaaactgtacttttccctgtgaggaaacggctttgtattttctctgtaataaaatggggcttctttggaatttgatagccacatacttttgttttcctctagatgctgcctctactcatgtagactatgaagtcttgactcatcctagatcttaggatcttaggtttgggcttcacaccacttgccttttacagtctagctatacctaattcctttaaaaagaaaagttggtgagaatgttattggcgctttttgacataatgctgttatgttaatagtgtttctaaagagccttccacactgaaatgaaatataagagaaaaatggagtcatacttctgtactactctcataaaatatttattaggcatattctctgagtaggaactataggaaaaacaaaaaagtgtgaggtgtcctttccatttaaatatgaaacattaagtaccatatgaatggtagagatggcggatactaagcctgactggtcatcagttttctgggtgttttaacatttcaagcctagtcctaacccctaaagattgatcagtagagctgagttgagtctagggcatctatgtgttttgttcttttttaataataatttttaagaattacagctgggcagaatggtgcccacatgtaatcccagcattttgggaggctgaggtgggaggattgcttggagacaggaatttgagactggtctgggcgacatggtgaaactccgt

SEQ ID NO: 355997 - DNA, 1310 bp, Homo sapiens
gggatctcacccgcggctctgattccggcagtcaggctgaaatgaaaaggaaaaaacacgcgtgcacaacacgcaccaattagcaaggcagttttcaagtcggcggagaatccggccaatccccggcaggcagaggcaaagggccgcctctgagtctggcaacgcgcgggcaaagccacaaataccgagttcaaatctcaacggctgcaggacggccaatcgcgacgcccgccggagcggccggccaatcacagcgccgcccgggggcgggccaaggctccggctccggcccccgctcccacccccggcccgcctgcgaatccctccttggccgcaaggtccccctttgcccagtcggcggggaggaggccgtatttctgctggccagagacgtcgcgtccctggctgggcattcagtcacccccaggaaaggaggcaagtccacgctgggagttagaaggcatcgcctctaatccaggtttcgccatctcctctgctaagtgacgtccagcaagtcacttcactttcaggacctcaaatctcctccccagtaaaacagctacagcggaagactgttgtgaggcacagagaaagggcttggtcattggaagcgggttccaggttctcaaccttcatttccttcacggttgaaggacgccaaagaaagcggaaagggtgaattttcttgaaatctcagttttggggaatcttagcgacgagtcgcggacctcagcttgtccggcgctccaaaacttccggcaggcggaccggaagcactgaggcgggaagggtggtagaggcccctcctgccggaacccggggggcggggctcgtggctgttgcggatggggcgtaggtgggcggtgcgcccacagctgcctgggtaaggcccaagatggctgtcttcgccttagtactcgtgtgaagttggcggggacggttcctgtcatcttcttgggcttatttggtgtgctgttgaaggggggagactagagaaatggcagggaacctcttatccggggcaggtaggcgcctgtgggactgggtgcctctggcgtgcagaagcttctctcttggtaagtggctgatgtaggcaccccgataactgcttcgtagtataataggcggctcagattaattccctcccttccccatccccaggtgtgcctagattgatcggtataaggctcactctcccgccccccaaagtggttgatcgttggaacgagaaaagggccatgttcggagtgtatgacaacatcgggatcctgggtaagacttgaccttcgacgtggtacacaatttcagaa

SEQ ID NO: 355998 - DNA, 1121 bp, Homo sapiens
gggatctcacccgcggctctgattccggcagtcaggctgaaatgaaaaggaaaaaacacgcgtgcacaacacgcaccaattagcaaggcagttttcaagtcggcggagaatccggccaatccccggcaggcagaggcaaagggccgcctctgagtctggcaacgcgcgggcaaagccacaaataccgagttcaaatctcaacggctgcaggacggccaatcgcgacgcccgccggagcggccggccaatcacagcgccgcccgggggcgggccaaggctccggctccggcccccgctcccacccccggcccgcctgcgaatccctccttggccgcaaggtccccctttgcccagtcggcggggaggaggccgtatttctgctggccagagacgtcgcgtccctggctgggcattcagtcacccccaggaaaggaggcaagtccacgctgggagttagaaggcatcgcctctaatccaggtttcgccatctcctctgctaagtgacgtccagcaagtcacttcactttcaggacctcaaatctcctccccagtagtaaaataggggtaataaaaacagctacagcggaagactgttgtgaggcacagagaaagggcttggtcattggaagcgggttccaggttctcaaccttcatttccttcacggttgaaggacgccaaagaaagcggaaagggtgtgcctagattgatcggtataaggctcactctcccgccccccaaagtggttgatcgttggaacgagaaaagggccatgttcggagtgtatgacaacatcgggatcctgggaaactttgaaaagcaccccaaagaactgatcagggggcccatatggcttcgaggttggaaagggaatgaattgcaacgttgtatccgaaagaggaaaatggttggaagtagaatgttcgctgatgacctgcacaaccttaataaacgcatccgctatctctacaaacactttaaccgacatgggaagtttcgatagaagagaaagctgagaacttcggaaaaggctcatctgtcaccctggagaagggaaactgtacttttccctgtgaggaaacggctttgtattttctctgtaataaaatggggcttctttgga

SEQ ID NO: 355999 - DNA, 1030 bp, Homo sapiens
  misc_feature (1030)..(1030): n is a, c, g, or t
gggatctcacccgcggctctgattccggcagtcaggctgaaatgaaaaggaaaaaacacgcgtgcacaacacgcaccaattagcaaggcagttttcaagtcggcggagaatccggccaatccccggcaggcagaggcaaagggccgcctctgagtctggcaacgcgcgggcaaagccacaaataccgagttcaaatctcaacggctgcaggacggccaatcgcgacgcccgccggagcggccggccaatcacagcgccgcccgggggcgggccaaggctccggctccggcccccgctcccacccccggcccgcctgcgaatccctccttggccgcaaggtccccctttgcccagtcggcggggaggaggccgtatttctgctggccagagacgtcgcgtccctggctgggcattcagtcacccccaggaaaggaggtgtgcctagattgatcggtataaggctcactctcccgccccccaaagtggttgatcgttggaacgagaaaagggccatgttcggagtgtatgacaacatcgggatcctgggaaactttgaaaagcaccccaaagaactgatcagggggcccatatggcttcgaggttggaaagggaatgaattgcaacgttgtatccgaaagaggaaaatggttggaagtagaatgttcgctgatgacctgcacaaccttaataaacgcatccgctatctctacaaacactttaaccgacatgggaagtttcgatagaagagaaagctgagaacttcggaaaaggctcatctgtcaccctggagaagggaaactgtacttttccctgtgaggaaacggctttgtattttctctgtaataaaatggggcttctttggaaaaaaaatcctttcccttcccttcccctctcctctctccttctactctaaactatctctcccccttggcctattcaccttttaactcgaacactcttttccttccggccgcatttggcgtcactggccctctcccctatggggactcctttcctccctggccgtccn

SEQ ID NO: 356000 - DNA, 1556 bp, Homo sapiens
gggatctcacccgcggctctgattccggcagtcaggctgaaatgaaaaggaaaaaacacgcgtgcacaacacgcaccaattagcaaggcagttttcaagtcggcggagaatccggccaatccccggcaggcagaggcaaagggccgcctctgagtctggcaacgcgcgggcaaagccacaaataccgagttcaaatctcaacggctgcaggacggccaatcgcgacgcccgccggagcggccggccaatcacagcgccgcccgggggcgggccaaggctccggctccggcccccgctcccacccccggcccgcctgcgaatccctccttggccgcaaggtccccctttgcccagtcggcggggaggaggccgtatttctgctggccagagacgtcgcgtccctggctgggcattcagtcacccccaggaaaggaggcaagtccacgctgggagttagaaggcatcgcctctaatccaggtttcgccatctcctctgctaagtgacgtccagcaagtcacttcactttcaggacctcaaatctcctccccagtagtaaaataggggtaataaaaacagctacagcggaagactgttgtgaggcacagagaaagggcttggtcattggaagcgggttccaggttctcaaccttcatttccttcacggttgaaggacgccaaagaaagcggaaagggtgaattttcttgaaatctcagttttggggaatcttagcgacgagtcgcggacctcagcttgtccggcgctccaaaacttccggcaggcggaccggaagcactgaggcgggaagggtggtagaggcccctcctgccggaacccggggggcggggctcgtggctgttgcggatggggcgtaggtgggcggtgcgcccacagctgcctgggtaaggcccaagatggctgtcttcgccttagtactcgtgtgaagttggcggggacggttcctgtcatcttcttgggcttatttggtgtgctgttgaaggggggagactagagaaatggcagggaacctcttatccggggcaggtaggcgcctgtgggactgggtgcctctggcgtgcagaagcttctctcttggtgtgcctagattgatcggtataaggctcactctcccgccccccaaagtggttgatcgttggaacgagaaaagggccatgttcggagtgtatgacaacatcgggatcctgggaaactttgaaaagcaccccaaagaactgatcagggggcccatatggcttcgaggttggaaagggaatgaattgcaacgttgtatccgaaagaggaaaatggttggaagtagaatgttcgctgatgacctgcacaaccttaataaacgcatccgctatctctacaaacactttaaccgacatgggaagtttcgatagaagagaaagctgagaacttcggaaaaggctcatctgtcaccctggagaagggaaactgtacttttccctgtgaggaaacggctttgtattttctctgtaataaaatggggcttctttggaaaaaaaccaaaaaaaaaaaacaaaaaaggggggg

SEQ ID NO: 356001 - DNA, 1842 bp, Homo sapiens
gggatctcacccgcggctctgattccggcagtcaggctgaaatgaaaaggaaaaaacacgcgtgcacaacacgcaccaattagcaaggcagttttcaagtcggcggagaatccggccaatccccggcaggcagaggcaaagggccgcctctgagtctggcaacgcgcgggcaaagccacaaataccgagttcaaatctcaacggctgcaggacggccaatcgcgacgcccgccggagcggccggccaatcacagcgccgcccgggggcgggccaaggctccggctccggcccccgctcccacccccggcccgcctgcgaatccctccttggccgcaaggtccccctttgcccagtcggcggggaggaggccgtatttctgctggccagagacgtcgcgtccctggctgggcattcagtcacccccaggaaaggaggcaagtccacgctgggagttagaaggcatcgcctctaatccaggtttcgccatctcctctgctaagtgacgtccagcaagtcacttcactttcaggacctcaaatctcctccccagtagtaaaataggggtaataaaaacagctacagcggaagactgttgtgaggcacagagaaagggcttggtcattggaagcgggttccaggttctcaaccttcatttccttcacggttgaaggacgccaaagaaagcggaaagggtgaattttcttgaaatctcagttttggggaatcttagcgacgagtcgcggacctcagcttgtccggcgctccaaaacttccggcaggcggaccggaagcactgaggcgggaagggtggtagaggcccctcctgccggaacccggggggcggggctcgtggctgttgcggatggggcgtaggtgggcggtgcgcccacagctgcctgggtaaggcccaagatggctgtcttcgccttagtactcgtgtgaagttggcggggacggttcctgtcatcttcttgggcttatttggtgtgctgttgaaggggggagactagagaaatggcagggaacctcttatccggggcaggtaggcgcctgtgggactgggtgcctctggcgtgcagaagcttctctcttggtgtgcctagattgatcggtataaggctcactctcccgccccccaaagtggttgatcgttggaacgagaaaagggccatgttcggagtgtatgacaacatcgggatcctgggaaactttgaaaagcaccccaaagaactgatcagggggcccatatggcttcgaggttggaaagggaatgaattgcaacgttgtatccgaaagaggaaaatggttggaagtagaatgttcgctgatgacctgcacaaccttaataaacgcatccgctatctctacaaacactttaaccgacatgggaagtttcgatagaagagaaagctgagaacttcggaaaaggctcatctgtcaccctggagaagggaaactgtacttttccctgtgaggaaacggctttgtattttctctgtaataaaatggggcttctttggaaaagaaaaaaaaaaaagaaaaaaaagaaaaagaaaaaaaagagagaaaagaaaaaaaaaaagaaaaaaaaaaaaaaaacacgtggcggcagcacgcggcgggcacggagaagaggtgaagacacgagcggtgagagagaggagacaacagaggaggagagaggggcaagggggcaacagaaaacagcgaggaaacagagaaggggagagaacacacagaaataaaacgccgcggagaaacagagggagtaaaaagacaacagaaagggagatagcggcagacagggagacacacgaggggcgcaaagagggagaaaaaga

SEQ ID NO: 356002 - DNA, 906 bp, Homo sapiens
gggatctcacccgcggctctgattccggcagtcaggctgaaatgaaaaggaaaaaacacgcgtgcacaacacgcaccaattagcaaggcagttttcaagtcggcggagaatccggccaatccccggcaggcagaggcaaagggccgcctctgagtctggcaacgcgcgggcaaagccacaaataccgagttcaaatctcaacggctgcaggacggccaatcgcgacgcccgccggagcggccggccaatcacagcgccgcccgggggcgggccaaggctccggctccggcccccgctcccacccccggcccgcctgcgaatccctccttggccgcaaggtccccctttgcccagtcggcggggaggaggccgtatttctgctggccagagacgtcgcgtccctggctgggcattcagtcacccccaggaaaggaggcaagtccacgctgggagttagaaggcatcgcctctaatccaggtgtgcctagattgatcggtataaggctcactctcccgccccccaaagtggttgatcgttggaacgagaaaagggccatgttcggagtgtatgacaacatcgggatcctgggaaactttgaaaagcaccccaaagaactgatcagggggcccatatggcttcgaggttggaaagggaatgaattgcaacgttgtatccgaaagaggaaaatggttggaagtagaatgttcgctgatgacctgcacaaccttaataaacgcatccgctatctctacaaacactttaaccgacatgggaagtttcgatagaagagaaagctgagaacttcggaaaaggctcatctgtcaccctggagaagggaaactgtacttttccctgtgaggaaacggctttgtattttctctgtaataaaatggggcttctttgga

SEQ ID NO: 356003 - DNA, 766 bp, Homo sapiens
caaaaacccatagaacgcacaacaccaagagtgagccctcatgtaaactatggactttgggtgagcattgcgtgtcaacataggctcatcagttgtaaccaatatgccactctggtgggagatgttggtaacaggggaggctgtacatacgtgggggcagggatatttgggaaatctctgtacctttgtctcaaattttctataaaaccaaaactactccaaaaaaagtctagtaaaaataaaaaattttggtttataaaggctatcatgttttcccctccaatttcccctctgtcacacttccttccccttgggtagtatgtgaaaagtaccagcagctctcagaatctggccaaagggaagtccaattggggctatactcagttggggtatagtgggatatattacgtgattcccagtcccttccatgtgtagttgttatctgtaaccattgtgatgaaggaatggcttggaggcacacctcagctgcccactgactcatccagagatgtgagaccagggattgtgttgcaatatgaacgtaccctgcagcacctggcactggaagtatggaagtagtggaggggagatgaagttctaaatatgcaatgccaaaagctagtcagtctgtggtacatcgggcagttaattaatagaaatactatattgtttttctgttttctgtgacatttgtggtatttgtcaactttgtaaaatttataaacaaaacttttttctcataataaatattgctttcagttccaat

SEQ ID NO: 356004 - DNA, 345 bp, Homo sapiens
tactactactaaattcgcggccgcgtcgacgacttttttaacccatgtaagaggatggtgttatttcaaatatctcgtggtttcccattcctgaattttgtgcacggcagatgcccatatttggggaaaaaatgcatagaatatgcatcattaatattgttttggcaaacaggcattgagtttcagaacagtgaactatttttagtacatatggcaatttttttcaccttattaaagtgagatgagaacagaccttaaaatagcttttacctcaccatccaaatacctattcagattagttggttgaatagccagcactttgaagtagagccttaggaaaaaaaa

SEQ ID NO: 356005 - DNA, 996 bp, Homo sapiens
aataggctaggtacgaggctgggtgttaatcggccgaggcagcaacctcagggcctccgagagatggcaggctggcacccgccctgcgggcactgcgcctgtcccaggtgtgggtggggcctggtggctgaatttccctttcactttaaactcacgggaaagtctcctgcttttctgcccttgggccagttctcacttatgtggccatgtgagcaaatggacattttttaaagggattcatagcaactcccagacatgtcctcatttcacaatgccgggggaaggtgattagatgagcttttgcatctttgactctactgtgacggaattatcctgcaattgtgcagaaacacccgcacgaattcacgggtgttacaaacagtgcaaacctaacgggacttcactacccacaaggggaggctggacagagccatcgggcccagaggctgtgaacgtgagcttggcctttgggcctgtgtctgggagccggtgttcacagaagccctttgtgcagcacagatggagatgtggggaggtgtttaccattcctgggcccagggcaggctcactttagggattcctgccattcctctaatccagagccttctctccacatccaggtccgggaggtgccgcaggccctaagggagaccagggtattgcaggttccgacggtcttcctggggataaaggagaactgggtcccagcggcctggtcggacccaaaggagaggtgagtgcccggcgactgttccgatgacaccatccatgggcgcctgctggcttcctgcccacctctgggcaaccaggcagccctgcagggcactgcccagatccgagatgtaaaaaagcttgctctggtcaaggctgggcaaaaggtcgcccggtggaaagccttggtgggtctgggctgtgccctggcccttttcgtttctggtggggtggggtggcccgagctcttccggcgcgtttttttgccccctattgggccgggga

SEQ ID NO: 356006 - DNA, 642 bp, Homo sapiens
  misc_feature (555)..(555): n is a, c, g, or t
ggtgggtaggggtggagggtgtcatgtggtggtcctccacccagaatgccggcactgagggagaagctggtcctccaggtctgcctgggcccccgggaccaaagggggccccaggaaagccggggaaaccaggagaggctgggctgccgggactgccgggtgtggatggtctgactggacgagatggaccccctggacccaagggtgcccctggggaacggggaagtctgggacccccggggccgcccgggctggggggcaaaggcctccctggaccccccggagaggcaggagtgagcggccccccaggtgggatcggcctccgcggccccccgggaccttctggactccccggcctccctggtcccccaggacctcccggaccccctggacacccaggagtcctccctgaaggcgctactgaccttcagtgcccaagtatctgcccgccaggtcccccagggccccctggaatgccagggttcaagggacccactggctacaaaggcgagcagggggaagtcggcaaggacggcgagaaggtgacctggcccncctgggccgcggctccgggcagagtggggctgcagggccccgggggattacagaggacggccaggccactcggggccctgggacagg

SEQ ID NO: 356007 - DNA, 2469 bp, Homo sapiens
aggctttgggtctcaccgaggagagcggcggtcgtcgcaggccccggagccgctcgggacccgggaggaggggacgccgggtcaggcccacgggggcacctgcgctccttaatgagttttctccgtttcagagagtgggactccccggcccccccggccccccagggccgcccgggaagcccggccaggacggcattgacggagaagctggtcctccaggtctgcctgggcccccgggaccaaagggggccccaggaaagccggggaaaccaggagaggctgggctgccgggactgccgggtgtggatggtctgactggacgagatggaccccctggacccaagggtgcccctggggaacggggaagtctgggacccccggggccgcccgggctggggggcaaaggcctccctggaccccccggagaggcaggagtgagcggccccccaggtgggatcggcctccgcggccccccgggaccttctggactccccggcctccctggtcccccaggacctcccggaccccctggacacccaggagtcctccctgaaggcgctactgaccttcagtgcccaagtatctgcccgccaggtcccccagggccccctggaatgccagggttcaagggacccactggctacaaaggcgagcagggggaagtcggcaaggacggcgagaagggtgaccctggcccccctgggcccgccggcctcccgggcagcgtggggctgcagggcccccggggattacgaggactgccagggccactcgggccccctggggaccggggtcccattgggttccgagggccgcctgggatcccaggagcgcctgggaaagcgggtgaccgaggcgagaggggcccagaagggttccgcggccccaagggtgacctcggcagacctggtcccaagggaacccccggagtggccgggccaagcggagagccgggcatgccgggcaaggacggccagaatggcgtgccaggactcgatggccagaagggagaggctggtcgcaacggtgctccgggagagaagggccccaacgggctgccgggcctccctggacgagcggggtccaaaggcgagaagggagaacggggcagagctggggagctgggtgaggccggcccctctggagagccaggcgtccctggagatgctggcatgcctggggagcgcggtgaggctggccaccggggctcagcgggggccctcggcccacaaggccctcccggagcccctggtgtccgaggcttccagggccagaagggcagcatgggagaccccggccttccaggcccccagggcctccgaggtgacgtgggcgaccggggtccgggaggtgccgcaggccctaagggagaccagggtattgcaggttccgacggtcttcctggggataaaggagaactgggtcccagcggcctggtcggacccaaaggagagtctggcagtcgaggggagctgggccccaaaggcacccagggtcccaacggcaccagcggtgttcagggtgtccccgggccccccggtcctctgggcctgcagggcgtcccgggtgttcctggcatcacggggaagccgggagttccggggaaggaggccagcgagcagcgcatcagggagctgtgtggggggatgatcagcgaacaaattgcacagttagccgcgcacctaaggaagcctttggcacccgggtccattggtcggcccggtccagctggcccccctgggcccccaggacccccaggctccattggtcaccctggcgctcgaggaccccccggataccgcggtcccactggggagctgggagaccccgggcccagaggaaaccagggtgacagaggagacaaaggcgcggcaggagcagggctggacgggcctgaaggagaccaggggccccaaggaccccaaggcgtgcccggcaccagcaaggacggccaggacggtgctcccggcgagcctgggcctcccggagatcctgggcttccaggtgccattggggcccaggggacaccggggatctgcgacacctcagcctgccaaggagccgtgttaggaggggtcggggagaaatcaggctctcgaagctcataaaattcaacgtgaggaagcaagtgacaaggacgcccgaagcacagtggacggtcatgaaggagcggaggtgtcgcaggcgggtgacgtccaggagagggagcgcccctggctgcccctcggccgccgactggacgcgcgggccttgccagcgagcaccctcatcgggctgtcgcctgacagcatacctcaaaaggccctagctaataaacctgtaagcccagcatttgagagaaggtagggtgtgtatatataaaaggttgtgtacaactccacgaggtgaaaaatattcagtaacttgtttacatagcatttgtgtaaagactatgatctcatcccaataaaatgatatattaaaccttca

SEQ ID NO: 356008 - DNA, 2105 bp, Homo sapiens
tccccctcgtctgagaccttacgctaggtacgggctgggtttgctcccttggacccccggagaggcaggagtgagcggccccccaggtgggatcggcctccgcggccccccgggaccttctggactccccggcctccctggtcccccaggacctcccggaccccctggacacccaggagtcctccctgaaggcgctactgaccttcagtgcccaagtatctgcccgccaggtcccccagggccccctggaatgccagggttcaagggacccactggctacaaaggcgagcagggggaagtcggcaaggacggcgagaagggtgaccctggcccccctgggcccgccggcctcccgggcagcgtggggctgcagggcccccggggattacgaggactgccagggccactcgggccccctggggaccggggtcccattgggttccgagggccgcctgggatcccaggagcgcctgggaaagcgggtgaccgaggcgagaggggcccagaagggttccgcggccccaagggtgacctcggcagacctggtcccaagggaacccccggagtggccgggccaagcggagagccgggcatgccgggcaaggacggccagaatggcgtgccaggactcgatggccagaagggagaggctggtcgcaacggtgctccgggagagaagggccccaacgggctgccgggcctccctggacgagcggggtccaaaggcgagaagggagaacggggcagagctggggagctgggtgaggccggcccctctggagagccaggcgtccctggagatgctggcatgcctggggagcgcggtgaggctggccaccggggctcagcgggggccctcggcccacaaggccctcccggagcccctggtgtccgaggcttccagggccagaagggcagcatgggagaccccggccttccaggcccccagggcctccgaggtgacgtgggcgaccggggtccgggaggtgccgcaggccctaagggagaccagggtattgcaggttccgacggtcttcctggggataaaggagaactgggtcccagcggcctggtcggacccaaaggagagtctggcagtcgaggggagctgggccccaaaggcacccagggtcccaacggcaccagcggtgttcagggtgtccccgggccccccggtcctctgggcctgcagggcgtcccgggtgttcctggcatcacggggaagccgggagttccggggaaggaggccagcgagcagcgcatcagggagctgtgtggggggatgatcagcgaacaaattgcacagttagccgcgcacctaaggaagcctttggcacccgggtccattggtcggcccggtccagctggcccccctgggcccccaggacccccaggctccattggtcaccctggcgctcgaggaccccccggataccgcggtcccactggggagctgggagaccccgggcccagaggaaaccagggtgacagaggagacaaaggcgcggcaggagcagggctggacgggcctgaaggagaccaggggccccaaggaccccaaggcgtgcccggcaccagcaaggacggccaggacggtgctcccggcgagcctgggcctcccggagatcctgggcttccaggtgccattggggcccaggggacaccggggatctgcgacacctcagcctgccaaggagccgtgttaggaggggtcggggagaaatcaggctctcgaagctcataaaattcaacgtgaggaagcaagtgacaaggacgcccgaagcacagtggacggtcatgaaggagcggaggtgtcgcaggcgggtgacgtccaggagagggagcgcccctggctgcccctcggccgccgactggacgcgcgggccttgccagcgagcaccctcatcgggctgtcgcctgacagcatacctcaaaaggccctagctaataaacctgtaagcccagcatttgagagaaggtagggtgtgtatatataaaaggttgtgtacaactccacgaggtgaaaaatattcagtaacttgtttacatagcatttgtgtaaagactatgatctcatcccaataaaatgatatattaaaccttca

SEQ ID NO: 356009 - DNA, 1986 bp, Homo sapiens
gaagtattacgagtcgagtcctgggtgtaatttcatacggggcccgggtacccagtagtctccgctgactggcgctacatgaccttcagtgcccaagtatctgcccgccaggtcccccagggccccctggaatgccagggttcaagggacccactggctacaaaggcgagcagggggaagtcggcaaggacggcgagaagggtgaccctggcccccctgggcccgccggcctcccgggcagcgtggggctgcagggcccccggggattacgaggactgccagggccactcgggccccctggggaccggggtcccattgggttccgagggccgcctgggatcccaggagcgcctgggaaagcgggtgaccgaggcgagaggggcccagaagggttccgcggccccaagggtgacctcggcagacctggtcccaagggaacccccggagtggccgggccaagcggagagccgggcatgccgggcaaggacggccagaatggcgtgccaggactcgatggccagaagggagaggctggtcgcaacggtgctccgggagagaagggccccaacgggctgccgggcctccctggacgagcggggtccaaaggcgagaagggagaacggggcagagctggggagctgggtgaggccggcccctctggagagccaggcgtccctggagatgctggcatgcctggggagcgcggtgaggctggccaccggggctcagcgggggccctcggcccacaaggccctcccggagcccctggtgtccgaggcttccagggccagaagggcagcatgggagaccccggccttccaggcccccagggcctccgaggtgacgtgggcgaccggggtccgggaggtgccgcaggccctaagggagaccagggtattgcaggttccgacggtcttcctggggataaaggagaactgggtcccagcggcctggtcggacccaaaggagagtctggcagtcgaggggagctgggccccaaaggcacccagggtcccaacggcaccagcggtgttcagggtgtccccgggccccccggtcctctgggcctgcagggcgtcccgggtgttcctggcatcacggggaagccgggagttccggggaaggaggccagcgagcagcgcatcagggagctgtgtggggggatgatcagcgaacaaattgcacagttagccgcgcacctaaggaagcctttggcacccgggtccattggtcggcccggtccagctggcccccctgggcccccaggacccccaggctccattggtcaccctggcgctcgaggaccccccggataccgcggtcccactggggagctgggagaccccgggcccagaggaaaccagggtgacagaggagacaaaggcgcggcaggagcagggctggacgggcctgaaggagaccaggggccccaaggaccccaaggcgtgcccggcaccagcaaggacggccaggacggtgctcccggcgagcctgggcctcccggagatcctgggcttccaggtgccattggggcccaggggacaccggggatctgcgacacctcagcctgccaaggagccgtgttaggaggggtcggggagaaatcaggctctcgaagctcataaaattcaacgtgaggaagcaagtgacaaggacgcccgaagcacagtggacggtcatgaaggagcggaggtgtcgcaggcgggtgacgtccaggagagggagcgcccctggctgcccctcggccgccgactggacgcgcgggccttgccagcgagcaccctcatcgggctgtcgcctgacagcatacctcaaaaggccctagctaataaacctgtaagcccagcatttgagagaaggtagggtgtgtatatataaaaggttgtgtacaactccacgaggtgaaaaatattcagtaacttgtttacatagcatttgtgtaaagactatgatctcatcccaataaaatgatatattaaaccttca

SEQ ID NO: 356010 - DNA, 2660 bp, Homo sapiens
aataggctaggtacgaggctgggtgttaatcggccgaggccatggccgggccgcgcgcgtgcgcgccgctcctgctcctgctcctgctcggggagcttctggcggccgccggggcgcagagagtgggactccccggcccccccggccccccagggccgcccgggaagcccggccaggacggcattgacggagaagctggtcctccaggtctgcctgggcccccgggaccaaagggggccccaggaaagccggggaaaccaggagaggctgggctgccgggactgccgggtgtggatggtctgactggacgagatggaccccctggacccaagggtgcccctggggaacggggaagtctgggacccccggggccgcccgggctggggggcaaaggcctccctggaccccccggagaggcaggagtgagcggccccccaggtgggatcggcctccgcggccccccgggaccttctggactccccggcctccctggtcccccaggacctcccggaccccctggacacccaggagtcctccctgaaggcgctactgaccttcagtgcccaagtatctgcccgccaggtcccccagggccccctggaatgccagggttcaagggacccactggctacaaaggcgagcagggggaagtcggcaaggacggcgagaaggccgggggaccaggtctgggatgccctttagcgtggctggagtgatcagatgaggagaccccaggtgcacatcagaggggtccctgcttggccacgaggaggggcctggacagggctgaagggccttgtgggaacagtgaccacggaccccggcccggcagggcgaggccaccgagactcgcgggactgctctggaactgtggggtgaccctggcccccctgggcccgccggcctcccgggcagcgtggggctgcagggcccccggggattacgaggactgccagggccactcgggccccctggggaccggggtcccattgggttccgagggccgcctgggatcccaggagcgcctgggaaagcgggtgaccgaggcgagaggggcccagaagggttccgcggccccaagggtgacctcggcagacctggtcccaagggaacccccggagtggccgggccaagcggagagccgggcatgccgggcaaggacggccagaatggcgtgccaggactcgatggccagaagggagaggctggtcgcaacggtgctccgggagagaagggccccaacgggctgccgggcctccctggacgagcggggtccaaaggcgagaagggagaacggggcagagctggggagctgggtgaggccggcccctctggagagccaggcgtccctggagatgctggcatgcctggggagcgcggtgaggctggccaccggggctcagcgggggccctcggcccacaaggccctcccggagcccctggtgtccgaggcttccagggccagaagggcagcatgggagaccccggccttccaggcccccagggcctccgaggtgacgtgggcgaccggggtccgggaggtgccgcaggccctaagggagaccagggtattgcaggttccgacggtcttcctggggataaaggagaactgggtcccagcggcctggtcggacccaaaggagagtctggcagtcgaggggagctgggccccaaaggcacccagggtcccaacggcaccagcggtgttcagggtgtccccgggccccccggtcctctgggcctgcagggcgtcccgggtgttcctggcatcacggggaagccgggagttccggggaaggaggccagcgagcagcgcatcagggagctgtgtggggggatgatcagcgaacaaattgcacagttagccgcgcacctaaggaagcctttggcacccgggtccattggtcggcccggtccagctggcccccctgggcccccaggacccccaggctccattggtcaccctggcgctcgaggaccccccggataccgcggtcccactggggagctgggagaccccgggcccagaggaaaccagggtgacagaggagacaaaggcgcggcaggagcagggctggacgggcctgaaggagaccaggggccccaaggaccccaaggcgtgcccggcaccagcaaggacggccaggacggtgctcccggcgagcctgggcctcccggagatcctgggcttccaggtgccattggggcccaggggacaccggggatctgcgacacctcagcctgccaaggagccgtgttaggaggggtcggggagaaatcaggctctcgaagctcataaaattcaacgtgaggaagcaagtgacaaggacgcccgaagcacagtggacggtcatgaaggagcggaggtgtcgcaggcgggtgacgtccaggagagggagcgcccctggctgcccctcggccgccgactggacgcgcgggccttgccagcgagcaccctcatcgggctgtcgcctgacagcatacctcaaaaggccctagctaataaacctgtaagcccagcatttgagagaaggtagggtgtgtatatataaaaggttgtgtacaactccacgaggtgaaaaatattcagtaacttgtttacatagcatttgtgtaaagactatgatctcatcccaataaaatgatatattaaaccttca

SEQ ID NO: 356011 - DNA, 3007 bp, Homo sapiens
aataggctaggtacgaggctgggtgttaatcggccgaggccatggccgggccgcgcgcgtgcgcgccgctcctgctcctgctcctgctcggggagcttctggcggccgccggggcgcagagagtgggactccccggcccccccggccccccagggccgcccgggaagcccggccaggacggcattgacggagaagctggtcctccaggtctgcctgggcccccgggaccaaagggggccccaggaaagccggggaaaccaggagaggctgggctgccgggactgccgggtgtggatggtctgactggacgagatggaccccctggacccaagggtgcccctggggaacggggaagtctgggacccccggggccgcccgggctggggggcaaaggcctccctggaccccccggagaggcaggagtgagcggccccccaggtgggatcggcctccgcggccccccgggaccttctggactccccggcctccctggtcccccaggacctcccggaccccctggacacccaggagtcctccctgaaggcgctactgaccttcagtgcccaagtatctgcccgccaggtcccccagggccccctggaatgccagggttcaagggacccactggctacaaaggcgagcagggggaagtcggcaaggacggcgagaagggtgaccctggcccccctgggcccgccggcctcccgggcagcgtggggctgcagggcccccggggattacgaggactgccagggccactcgggccccctggggaccggggtcccattgggttccgagggccgcctgggatcccaggagcgcctgggaaagcgggtgaccgaggcgagaggggcccagaagggttccgcggccccaagggtgacctcggcagacctggtcccaagggaacccccggagtggccgggccaagcggagagccgggcatgccgggcaaggacggccagaatggcgtgccaggactcgatggccagaagggagaggctggtcgcaacggtgctccgggagagaagggccccaacgggctgccgggcctccctggacgagcggggtccaaaggcgagaagggagaacggggcagagctggggagctgggtgaggccggcccctctggagagccaggcgtccctggagatgctggcatgcctggggagcgcggtgaggctggccaccggggctcagcgggggccctcggcccacaaggccctcccggagcccctggtgtccgaggcttccagggccagaagggcagcatgggagaccccggccttccaggcccccagggcctccgaggtgacgtgggcgaccggggtccgggaggtgccgcaggccctaagggagaccagggtattgcaggttccgacggtcttcctggggataaaggagaactgggtcccagcggcctggtcggacccaaaggagagtctggcagtcgaggggagctgggccccaaaggcacccagggtcccaacggcaccagcggtgttcagggtgtccccgggccccccggtcctctgggcctgcagggcgtcccgggtgttcctggcatcacggggaagccgggagttccggggaaggaggccagcgagcagcgcatcagggagctgtgtggggggatgatcagcggtaagtcagccacgtgcaccggctgcagcggggcccatccccgcctgggggtcccgtgcctggggctacacagaaagccttcgtgccactgctttccagccaaagtgagcccctagcactcaccccgcctgttagcccttgggggtccacgtccgccttggcgtctgcctgtcctctgcgctagaggatggcccacgctcccgccccggattcaaccagattcccagcacgcagcagacgccctaaagcctgctgaatgcaatgggtacaagaacagcggagtgtgcccctgtggctggcagggcaggtccctaaacacccccaagggcacttccttcaccttcccactcaggcttctcaggctccaaggggttgggggtcctttctagctccagcattcatcaccccaaagcagttaaaccattttccatcaatcagaaggaaaacttgcttctggaagacagcaccgtgtagatattttatgctttacgtaacaatacttctgatgatcctctctcgagtaaacgcctgcacccttgttttcccaaagaacaaattgcacagttagccgcgcacctaaggaagcctttggcacccgggtccattggtcggcccggtccagctggcccccctgggcccccaggacccccaggctccattggtcaccctggcgctcgaggaccccccggataccgcggtcccactggggagctgggagaccccgggcccagaggaaaccagggtgacagaggagacaaaggcgcggcaggagcagggctggacgggcctgaaggagaccaggggccccaaggaccccaaggcgtgcccggcaccagcaaggacggccaggacggtgctcccggcgagcctgggcctcccggagatcctgggcttccaggtgccattggggcccaggggacaccggggatctgcgacacctcagcctgccaaggagccgtgttaggaggggtcggggagaaatcaggctctcgaagctcataaaattcaacgtgaggaagcaagtgacaaggacgcccgaagcacagtggacggtcatgaaggagcggaggtgtcgcaggcgggtgacgtccaggagagggagcgcccctggctgcccctcggccgccgactggacgcgcgggccttgccagcgagcaccctcatcgggctgtcgcctgacagcatacctcaaaaggccctagctaataaacctgtaagcccagcatttgagagaaggtagggtgtgtatatataaaaggttgtgtacaactccacgaggtgaaaaatattcagtaacttgtttacatagcatttgtgtaaagactatgatctcatcccaataaaatgatatattaaaccttca

SEQ ID NO: 356012 - DNA, 2163 bp, Homo sapiens
aataggctaggtacgaggctgggtgttaatcggccgaggccatggccgggccgcgcgcgtgcgcgccgctcctgctcctgctcctgctcggggagcttctggcggccgccggggcgcagagagtgggactccccggcccccccggccccccagggccgcccgggaagcccggccaggacggcattgacggagaagctggtcctccaggtctgcctgggcccccgggaccaaagggggccccaggaaagccggggaaaccaggagaggctgggctgccgggactgccgggtgtggatggtctgactggacgagatggaccccctggacccaagggtgcccctggggaacggggaagtctgggacccccggggccgcccgggctggggggcaaaggcctccctggaccccccggagaggcaggagtgagcggccccccaggtgggatcggcctccgcggccccccgggaccttctggactccccggcctccctggtcccccaggacctcccggaccccctggacacccaggagtcctccctgaaggcgctactgaccttcagtgcccaagtatctgcccgccaggtcccccagggccccctggaatgccagggttcaagggacccactggctacaaaggcgagcagggggaagtcggcaaggacggcgagaagggtgaccctggcccccctgggcccgccggcctcccgggcagcgtggggctgcagggcccccggggattacgaggactgccagggccactcgggccccctggggaccggggtcccattgggttccgagggccgcctgggatcccaggagcgcctgggaaagcgggtgaccgaggcgagaggggcccagaagggttccgcggccccaagggtgacctcggcagacctggtcccaagggaacccccggagtggccgggccaagcggagagccgggcatgccgggcaaggacggccagaatggcgtgccaggactcgatggccagaagggagaggctggtcgcaacggtgctccgggagagaagggccccaacgggctgccgggcctccctggacgagcggggtccaaaggcgagaagggagaacggggcagagctggggagctgggtgaggccggcccctctggagagccaggcgtccctggagatgctggcatgcctggggagcgcggtgaggctggccaccggggctcagcgggggccctcggcccacaaggccctcccggagcccctggtgtccgaggcttccagggccagaagggcagcatgggagaccccggccttccaggcccccagggcctccgaggtgacgtgggcgaccggggtccgggaggtgccgcaggccctaagggagaccagggtattgcaggttccgacggtcttcctggggataaaggagaactgggtcccagcggcctggtcggacccaaaggagagtctggcagtcgaggggagctgggccccaaaggcacccagggtcccaacggcaccagcggtgttcagggtgtccccgggccccccggtcctctgggcctgcagggcgtcccgggtgttcctggcatcacggggaagccgggagttccggggaaggaggccagcgagcagcgcatcagggagctgtgtggggggatgatcagcgaacaaattgcacagttagccgcgcacctaaggaagcctttggcacccgggtccattggtcggcccggtccagggacaccggggatctgcgacacctcagcctgccaaggagccgtgttaggaggggtcggggagaaatcaggctctcgaagctcataaaattcaacgtgaggaagcaagtgacaaggacgcccgaagcacagtggacggtcatgaaggagcggaggtgtcgcaggcgggtgacgtccaggagagggagcgcccctggctgcccctcggccgccgactggacgcgcgggccttgccagcgagcaccctcatcgggctgtcgcctgacagcatacctcaaaaggccctagctaataaacctgtaagcccagcatttgagagaaggtagggtgtgtatatataaaaggttgtgtacaactccacgaggtgaaaaatattcagtaacttgtttacatagcatttgtgtaaagactatgatctcatcccaataaaatgatatattaaaccttca

SEQ ID NO: 356013 - DNA, 3099 bp, Homo sapiens
aataggctaggtacgaggctgggtgttaatcggccgaggccatggccgggccgcgcgcgtgcgcgccgctcctgctcctgctcctgctcggggagcttctggcggccgccggggcgcagagagtgggactccccggcccccccggccccccagggccgcccgggaagcccggccaggacggcattgacggagaagctggtcctccaggtctgcctgggcccccgggaccaaagggggccccaggaaagccggggaaaccaggagaggctgggctgccgggactgccgggtgtggatggtctgactggacgagatggaccccctggacccaagggtgcccctggggaacggggaagtctgggacccccggggccgcccgggctggggggcaaaggcctccctggaccccccggagaggcaggagtgagcggccccccaggtgggatcggcctccgcggccccccgggaccttctggactccccggcctccctggtcccccaggacctcccggaccccctggacacccaggagtcctccctgaaggcgctactgaccttcagtgcccaagtatctgcccgccaggtcccccagggccccctggaatgccagggttcaagggacccactggctacaaaggcgagcagggggaagtcggcaaggacggcgagaagggtgaccctggcccccctgggcccgccggcctcccgggcagcgtggggctgcagggcccccggggattacgaggactgccagggccactcgggccccctggggaccggggtcccattgggttccgagggccgcctgggatcccaggagcgcctgggaaagcgggtgaccgaggcgagaggggcccagaagggttccgcggccccaagggtgacctcggcagacctggtcccaagggaacccccggagtggccgggccaagcggagagccgggcatgccgggcaaggacggccagaatggcgtgccaggactcgatggccagaagggagaggctggtcgcaacggtgctccgggagagaagggccccaacgggctgccgggcctccctggacgagcggggtccaaaggcgagaagggagaacggggcagagctggggagctgggtgaggccggcccctctggagagccaggcgtccctggagatgctggcatgcctggggagcgcggtgaggctggccaccggggctcagcgggggccctcggcccacaaggccctcccggagcccctggtgtccgaggcttccagggccagaagggcagcatgggagaccccggccttccaggcccccagggcctccgaggtgacgtgggcgaccggggtccgggaggtgccgcaggccctaagggagaccagggtattgcaggttccgacggtcttcctggggataaaggagaactgggtcccagcggcctggtcggacccaaaggagagtctggcagtcgaggggagctgggccccaaaggcacccagggtcccaacggcaccagcggtgttcagggtgtccccgggccccccggtcctctgggcctgcagggcgtcccgggtgttcctggcatcacggggaagccgggagttccggggaaggaggccagcgagcagcgcatcagggagctgtgtggggggatgatcagcggtaagtcagccacgtgcaccggctgcagcggggcccatccccgcctgggggtcccgtgcctggggctacacagaaagccttcgtgccactgctttccagccaaagtgagcccctagcactcaccccgcctgttagcccttgggggtccacgtccgccttggcgtctgcctgtcctctgcgctagaggatggcccacgctcccgccccggattcaaccagattcccagcacgcagcagacgccctaaagcctgctgaatgcaatgggtacaagaacagcggagtgtgcccctgtggctggcagggcaggtccctaaacacccccaagggcacttccttcaccttcccactcaggcttctcaggctccaaggggttgggggtcctttctagctccagcattcatcaccccaaagcagttaaaccattttccatcaatcagaaggaaaacttgcttctggaagacagcaccgtgtagatattttatgctttacgtaacaatacttctgatgatcctctctcgagtaaacgcctgcacccttgttttcccaaagaacaaattgcacagttagccgcgcacctaaggaagcctttggcacccgggtccattggtcggcccggtccagctggcccccctgggcccccaggacccccaggctccattggtcaccctggcgctcgaggaccccccggataccgcggtcccactggggagctgggagaccccgggcccagaggaaaccagggtgacagaggagacaaaggcgcggcaggagcagggctggacgggcctgaaggagaccaggggccccaaggaccccaaggcgtgcccggcaccagcaaggacggccaggacggtgctcccggcgagcctgggcctcccggagatcctgggcttccaggtgccattggggcccaggggacaccggggatctgcgacacctcagcctgccaaggagccgtgttaggaggggtcggggagaaatcaggctctcgaagctcataaaattcaacgtgaggaagcaagtgacaaggacgcccgaagcacagtggacggtcatgaaggagcggaggtgtcgcaggcgggtgacgtccaggagagggagcgcccctggctgcccctcggccgccgactggacgcgcgggccttgccagcgagcaccctcatcgggctgtcgcctgacagcatacctcaaaaggccctagctaataaacctgtaagcccagcatttgagagaaggtagggtgtgtatatataaaaggttgtgtacaactccacgaggtgaaaaatattcagtaacttgtttacatagcatttgtgtaaagactatgatctcatcccaataaaatgatatattaaaccttcagattaatgactggctacagagtaacaaaaaataaagaatttaatgtacagtaaattctctccatacaaaggtctagtctgatgttttgtgta

SEQ ID NO: 356014 - DNA, 1091 bp, Homo sapiens
ctagcgggttatcgtggtctgaactggggataaaggagaactgggtcccagcggcctggtcggacccaaaggagagtctggcagtcgaggggagctgggccccaaaggcacccagggtcccaacggcaccagcggtgttcagggtgtccccgggccccccggtcctctgggcctgcagggcgtcccgggtgttcctggcatcacggggaagccgggagttccggggaaggaggccagcgagcagcgcatcagggagctgtgtggggggatgatcagcgaacaaattgcacagttagccgcgcacctaaggaagcctttggcacccgggtccattggtcggcccggtccagctggcccccctgggcccccaggacccccaggctccattggtcaccctggcgctcgaggaccccccggataccgcggtcccactggggagctgggagaccccgggcccagaggaaaccagggtgacagaggagacaaaggcgcggcaggagcagggctggacgggcctgaaggagaccaggggccccaaggaccccaaggcgtgcccggcaccagcaaggacggccaggacggtgctcccggcgagcctgggcctcccggagatcctgggcttccaggtgccattggggcccaggggacaccggggatctgcgacacctcagcctgccaaggagccgtgttaggaggggtcggggagaaatcaggctctcgaagctcataaaattcaacgtgaggaagcaagtgacaaggacgcccgaagcacagtggacggtcatgaaggagcggaggtgtcgcaggcgggtgacgtccaggagagggagcgcccctggctgcccctcggccgccgactggacgcgcgggccttgccagcgagcaccctcatcgggctgtcgcctgacagcatacctcaaaaggccctagctaataaacctgtaagcccagcatttgagagaaggtagggtgtgtatatataaaaggttgtgtacaactccacgaggtgaaaaatattcagtaacttgtttacatagcatttgtgtaaagactatgatctcatcccaataaaatgatatattaaaccttca

SEQ ID NO: 356015 - DNA, 1981 bp, Homo sapiens
aataggctaggtacgaggctgggtgttaatcggccgaggcagcaacctcagggcctccgagagatggcaggctggcacccgccctgcgggcactgcgcctgtcccaggtgtgggtggggcctggtggctgaatttccctttcactttaaactcacgggaaagtctcctgcttttctgcccttgggccagttctcacttatgtggccatgtgagcaaatggacattttttaaagggattcatagcaactcccagacatgtcctcatttcacaatgccgggggaaggtgattagatgagcttttgcatctttgactctactgtgacggaattatcctgcaattgtgcagaaacacccgcacgaattcacgggtgttacaaacagtgcaaacctaacgggacttcactacccacaaggggaggctggacagagccatcgggcccagaggctgtgaacgtgagcttggcctttgggcctgtgtctgggagccggtgttcacagaagccctttgtgcagcacagatggagatgtggggaggtgtttaccattcctgggcccagggcaggctcactttagggattcctgccattcctctaatccagagccttctctccacatccaggtccgggaggtgccgcaggccctaagggagaccagggtattgcaggttccgacggtcttcctggggataaaggagaactgggtcccagcggcctggtcggacccaaaggagaggtgagtgcccggcgactgttccgatgacaccatccatgggcgcctgctggcttcctgcccacctctgggcaaccaggcagccctgcagggcactgcccagatccgagatgtaaaaaagcttgctctggtcaaggctgggcaagacggctccgtgccggctgggaaagagcacgtcggggtggctctgggctcctgggctcgcccctgacccaccttcctctgttcctctgcagtctggcagtcgaggggagctgggccccaaaggcacccagggtcccaacggcaccagcggtgttcagggtgtccccgggccccccggtcctctgggcctgcagggcgtcccgggtgttcctggcatcacggggaagccgggagttccggggaaggaggccagcgagcagcgcatcagggagctgtgtggggggatgatcagcgaacaaattgcacagttagccgcgcacctaaggaagcctttggcacccgggtccattggtcggcccggtccagctggcccccctgggcccccaggacccccaggctccattggtcaccctggcgctcgaggaccccccggataccgcggtcccactggggagctgggagaccccgggcccagaggaaaccagggtgacagaggagacaaaggcgcggcaggagcagggctggacgggcctgaaggagaccaggggccccaaggaccccaaggcgtgcccggcaccagcaaggacggccaggacggtgctcccggcgagcctgggcctcccggagatcctgggcttccaggtgccattggggcccaggggacaccggggatctgcgacacctcagcctgccaaggagccgtgttaggaggggtcggggagaaatcaggctctcgaagctcataaaattcaacgtgaggaagcaagtgacaaggacgcccgaagcacagtggacggtcatgaaggagcggaggtgtcgcaggcgggtgacgtccaggagagggagcgcccctggctgcccctcggccgccgactggacgcgcgggccttgccagcgagcaccctcatcgggctgtcgcctgacagcatacctcaaaaggccctagctaataaacctgtaagcccagcatttgagagaaggtagggtgtgtatatataaaaggttgtgtacaactccacgaggtgaaaaatattcagtaacttgtttacatagcatttgtgtaaagactatgatctcatcccaataaaatgatatattaaaccttca

SEQ ID NO: 356016 - DNA, 1008 bp, Homo sapiens
  misc_feature (26)..(27): n is a, c, g, or t
aaacataggctaggtactgggccaanntaccaggtcccaacggcaccagcggtgttcagggtgtccccgggccccccggtcctctgggcctgcagggcgtcccgggtgttcctggcatcacggggaagccgggagttccggggaaggaggccagcgagcagcgcatcagggagctgtgtggggggatgatcagcgaacaaattgcacagttagccgcgcacctaaggaagcctttggcacccgggtccattggtcggcccggtccagctggcccccctgggcccccaggacccccaggctccattggtcaccctggcgctcgaggaccccccggataccgcggtcccactggggagctgggagaccccgggcccagaggaaaccagggtgacagaggagacaaaggcgcggcaggagcagggctggacgggcctgaaggagaccaggggccccaaggaccccaaggcgtgcccggcaccagcaaggacggccaggacggtgctcccggcgagcctgggcctcccggagatcctgggcttccaggtgccattggggcccaggggacaccggggatctgcgacacctcagcctgccaaggagccgtgttaggaggggtcggggagaaatcaggctctcgaagctcataaaattcaacgtgaggaagcaagtgacaaggacgcccgaagcacagtggacggtcatgaaggagcggaggtgtcgcaggcgggtgacgtccaggagagggagcgcccctggctgcccctcggccgccgactggacgcgcgggccttgccagcgagcaccctcatcgggctgtcgcctgacagcatacctcaaaaggccctagctaataaacctgtaagcccagcatttgagagaaggtagggtgtgtatatataaaaggttgtgtacaactccacgaggtgaaaaatattcagtaacttgtttacatagcatttgtgtaaagactatgatctcatcccaataaaatgatatattaaaccttca

SEQ ID NO: 356017 - DNA, 981 bp, Homo sapiens
  misc_feature (85)..(85): n is a, c, g, or t
aaaaaatacgggctaagagtacgaaggccccccgttggtttaaattcgtgcacgaatggggtggatgctcacgatgtgcgccccntgctgacgaatgtgtggggtgaattccagggaaggaggccagcgagcagcgcatcagggagctgtgtggggggatgatcagcgaacaaattgcacagttagccgcgcacctaaggaagcctttggcacccgggtccattggtcggcccggtccagctggcccccctgggcccccaggacccccaggctccattggtcaccctggcgctcgaggaccccccggataccgcggtcccactggggagctgggagaccccgggcccagaggaaaccagggtgacagaggagacaaaggcgcggcaggagcagggctggacgggcctgaaggagaccaggggccccaaggaccccaaggcgtgcccggcaccagcaaggacggccaggacggtgctcccggcgagcctgggcctcccggagatcctgggcttccaggtgccattggggcccaggggacaccggggatctgcgacacctcagcctgccaaggagccgtgttaggaggggtcggggagaaatcaggctctcgaagctcataaaattcaacgtgaggaagcaagtgacaaggacgcccgaagcacagtggacggtcatgaaggagcggaggtgtcgcaggcgggtgacgtccaggagagggagcgcccctggctgcccctcggccgccgactggacgcgcgggccttgccagcgagcaccctcatcgggctgtcgcctgacagcatacctcaaaaggccctagctaataaacctgtaagcccagcatttgagagaaggtagggtgtgtatatataaaaggttgtgtacaactccacgaggtgaaaaatattcagtaacttgtttacatagcatttgtgtaaagactatgatctcatcccaataaaatgatatattaaaccttca

SEQ ID NO: 356018 - DNA, 1209 bp, Homo sapiens
ccaagggctgtgtttggagcgggttaaaaggcagccctggggcctgggcttttggcctcgaccttaagatgaacattacacctacggaggcttgagagcagggactttaaggcatgaagtccctactcatgcatgaacagctcttttaactttggggtgtatcgttttcagggtattgcaggttccgacggtcttcctggggataaaggagaactgggtcccagcggcctggtcggacccaaaggagagtctggcagtcgaggggagctgggccccaaaggcacccagggtcccaacggcaccagcggtgttcagggtgtccccgggccccccggtcctctgggcctgcagggcgtcccgggtgttcctggcatcacggggaagccgggagttccgaacaaattgcacagttagccgcgcacctaaggaagcctttggcacccgggtccattggtcggcccggtccagctggcccccctgggcccccaggacccccaggctccattggtcaccctggcgctcgaggaccccccggataccgcggtcccactggggagctgggagaccccgggcccagaggaaaccagggtgacagaggagacaaaggcgcggcaggagcagggctggacgggcctgaaggagaccaggggccccaaggaccccaaggcgtgcccggcaccagcaaggacggccaggacggtgctcccggcgagcctgggcctcccggagatcctgggcttccaggtgccattggggcccaggggacaccggggatctgcgacacctcagcctgccaaggagccgtgttaggaggggtcggggagaaatcaggctctcgaagctcataaaattcaacgtgaggaagcaagtgacaaggacgcccgaagcacagtggacggtcatgaaggagcggaggtgtcgcaggcgggtgacgtccaggagagggagcgcccctggctgcccctcggccgccgactggacgcgcgggccttgccagcgagcaccctcatcgggctgtcgcctgacagcatacctcaaaaggccctagctaataaacctgtaagcccagcatttgagagaaggtagggtgtgtatatataaaaggttgtgtacaactccacgaggtgaaaaatattcagtaacttgtttacatagcatttgtgtaaagactatgatctcatcccaataaaatgatatattaaaccttca

SEQ ID NO: 356019 - DNA, 904 bp, Homo sapiens
aataggctaggtacgaggctgggtgttaatcggccgaggccatggccgggccgcgcgcgtgcgcgccgctcctgctcctgctcctgctcggggagcttctggcggccgccggggcgcagagagtgggactccccggcccccccggccccccagggccgcccgggaagcccggccaggacggcattgacggagctgtgtggggggatgatcagcgaacaaattgcacagttagccgcgcacctaaggaagcctttggcacccgggtccattggtcggcccggtccagctggcccccctgggcccccaggacccccagggctggacgggcctgaaggagaccaggggccccaaggaccccaaggcgtgcccggcaccagcaaggacggccaggacggtgctcccggcgagcctgggcctcccggagatcctgggcttccaggtgccattggggcccaggggacaccggggatctgcgacacctcagcctgccaaggagccgtgttaggaggggtcggggagaaatcaggctctcgaagctcataaaattcaacgtgaggaagcaagtgacaaggacgcccgaagcacagtggacggtcatgaaggagcggaggtgtcgcaggcgggtgacgtccaggagagggagcgcccctggctgcccctcggccgccgactggacgcgcgggccttgccagcgagcaccctcatcgggctgtcgcctgacagcatacctcaaaaggccctagctaataaacctgtaagcccagcatttgagagaaggtagggtgtgtatatataaaaggttgtgtacaactccacgaggtgaaaaatattcagtaacttgtttacatagcatttgtgtaaagactatgatctcatcccaataaaatgatatattaaaccttca

SEQ ID NO: 356020 - DNA, 2074 bp, Homo sapiens
aataggctaggtacgaggctgggtgttaatcggccgaggccatggccgggccgcgcgcgtgcgcgccgctcctgctcctgctcctgctcggggagcttctggcggccgccggggcgcagagagtgggactccccggcccccccggccccccagggccgcccgggaagcccggccaggacggcattgacggagaagctggtcctccaggtctgcctgggcccccgggaccaaagggggccccaggaaagccggggaaaccaggagaggctgggctgccgggactgccgggtgtggatggtctgactggacgagatggaccccctggacccaagggtgcccctggggaacggggaagtctgggacccccggggccgcccgggctggggggcaaaggcctccctggaccccccggagaggcaggagtgagcggccccccaggtgggatcggcctccgcggccccccgggaccttctggactccccggcctccctggtcccccaggacctcccggaccccctggacacccaggagtcctccctgaaggcgctactgaccttcagtgcccaagtatctgcccgccaggtcccccagggccccctggaatgccagggttcaagggacccactggctacaaaggcgagcagggggaagtcggcaaggacggcgagaagggtgaccctggcccccctgggcccgccggcctcccgggcagcgtggggctgcagggcccccggggattacgaggactgccagggccactcgggccccctggggaccggggtcccattgggttccgagggccgcctgggatcccaggagcgcctgggaaagcgggtgaccgaggcgagaggggcccagaagggttccgcggccccaagggtgacctcggcagacctggtcccaagggaacccccggagtggccgggccaagcggagagccgggcatgccgggcaaggacggccagaatggcgtgccaggactcgatggccagaagggagaggctggtcgcaacggtgctccgggagagaagggccccaacgggctgccgggcctccctggacgagcggggtccaaaggcgagaagggagaacggggcagagctggggagctgggtgaggccggcccctctggagagccaggcgtccctggagatgctggcatgcctggggagcgcggtgaggctggccaccggggctcagcgggggccctcggcccacaaggccctcccggagcccctggtgtccgaggcttccagggccagaagggcagcatgggagaccccggccttccaggcccccagggcctccgaggtgacgtgggcgaccggggtccgggaggtgccgcaggccctaagggagaccagggtattgcaggttccgacggtcttcctggggataaaggagaactgggtcccagcggcctggtcggacccaaaggagagtctggcagtcgaggggagctgggccccaaaggcacccagggtcccaacggcaccagcggtgttcagggtgtccccgggccccccggtcctctgggcctgcagggcgtcccgggtgttcctggcatcacggggaagccgggagttccggggaaggaggccagcgagcagcgcatcagggagctgtgtggggggatgatcagcgaacaaattgcacagttagccgcgcacctaaggaagcctttggcacccgggtccattggtcggcccggtccagctggcccccctgggcccccaggacccccaggctccattggtcaccctggcgctcgaggaccccccggataccgcggtcccactggggagctgggagaccccgggcccagaggaaaccagggtgacagaggagacaaaggcgcggcaggagcagggctggacgggcctgaaggagaccaggggccccaaggaccccaaggcgtgcccggcaccagcaaggacggccaggacggtgctcccggcgagcctgggcctcccggagatcctgggcttccaggtgccattggggcccagggggaaccaaccgggggaatcttggcgaaaaccttcaagcccttggcccaaaggggaacggccag

SEQ ID NO: 356021 - DNA, 189 bp, Homo sapiens
tttgtgtctgtggccggggcgaggggcatctgtgaggatggctggctttagcctgtagcctcccctcacctgtggtcgctgtccgtggagggtgtctgtccatggtcacctgcaggccgggggaccaggtctgggatgccctttagcgtggctggagtgatcagatgaggagaccccaggtgcacatca

SEQ ID NO: 356022 - DNA, 795 bp, Homo sapiens
tgggcttagtagagcatgggtgttaaataaggcagaggggaagctggaaggtaagggagaagggtgaccctggcccccctgggcccgccggcctcccgggcagcgtggggctgcagggcccccggggattacgaggactgccagggccactcgggccccctggggaccggggtcccattgggttccgagggccgcctgggatcccaggagcgcctgggaaagcgggtgaccgaggcgagaggggcccagaagggttccgcggccccaagggtgacctcggcagacctggtcccaagggaacccccggagtggccgggccaagcggagagccgggcatgccgggcaaggacggccagaatggcgtgccaggactcgatggccagaagggagaggctggtcgcaacggtgctccgggagagaagggccccaacgggctgccgggcctccctggacgagcggggtccaaaggcgagaagggagaacggggcagagctggggagctgggtgaggccggcccctctggagagccaggcgtccctggagatgctggcatgcctggggagcgcggtgaggctggccaccggggctcagcgggggccctcggcccacaaggccctcccggagcccctggtgtccgaggcttccaggccagaagggcagcatgggagacccggcttccaggcccagcctcgaggtgcgtgggacgggtcgggaggcgcggcctaggaacaggttgagtcgaggtctggaaaaggactggcccggcgtcgcaggaggaggcgaagccgcgtggga

SEQ ID NO: 356023 - DNA, 2457 bp, Homo sapiens
aataggctaggtacgaggctgggtgttaatcggccgaggccatggccgggccgcgcgcgtgcgcgccgctcctgctcctgctcctgctcggggagcttctggcggccgccggggcgcagagagtgggactccccggcccccccggccccccagggccgcccgggaagcccggccaggacggcattgacggagaagctggtcctccaggtctgcctgggcccccgggaccaaagggggccccaggaaagccggggaaaccaggagaggctgggctgccgggactgccgggtgtggatggtctgactggacgagatggaccccctggacccaagggtgcccctggggaacggggaagtctgggacccccggggccgcccgggctggggggcaaaggcctccctggaccccccggagaggcaggagtgagcggccccccaggtgggatcggcctccgcggccccccgggaccttctggactccccggcctccctggtcccccaggacctcccggaccccctggacacccaggagtcctccctgaaggcgctactgaccttcagtgcccaagtatctgcccgccaggtcccccagggccccctggaatgccagggttcaagggacccactggctacaaaggcgagcagggggaagtcggcaaggacggcgagaagggtgaccctggcccccctgggcccgccggcctcccgggcagcgtggggctgcagggcccccggggattacgaggactgccagggccactcgggccccctggggaccggggtcccattgggttccgagggccgcctgggatcccaggagcgcctgggaaagcgggtgaccgaggcgagaggggcccagaagggttccgcggccccaagggtgacctcggcagacctggtcccaagggaacccccggagtggccgggccaagcggagagccgggcatgccgggcaaggacggccagaatggcgtgccaggactcgatggccagaagggagaggctggtcgcaacggtgctccgggagagaagggccccaacgggctgccgggcctccctggacgagcggggtccaaaggcgagaagggagaacggggcagagctggggagctgggtgaggccggcccctctggagagccaggcgtccctggagatgctggcatgcctggggagcgcggtgaggctggccaccggggctcagcgggggccctcggcccacaaggccctcccggagcccctggtgtccgaggcttccagggccagaagggcagcatgggagaccccggccttccaggcccccagggcctccgaggtgacgtgggcgaccggggtccgggaggtgccgcaggccctaagggagaccagggtattgcaggttccgacggtcttcctggggataaaggagaactgggtcccagcggcctggtcggacccaaaggagagtctggcagtcgaggggagctgggccccaaaggcacccagggtcccaacggcaccagcggtgttcagggtgtccccgggccccccggtcctctgggcctgcagggcgtcccgggtgttcctggcatcacggggaagccgggagttccggggaaggaggccagcgagcagcgcatcagggagctgtgtggggggatgatcagcgaacaaattgcacagttagccgcgcacctaaggaagcctttggcacccgggtccattggtcggcccggtccagctggcccccctgggcccccaggacccccaggctccattggtcaccctggcgctcgaggaccccccggataccgcggtcccactggggagctgggagaccccgggcccagaggaaaccagggtgacagaggagacaaaggcgcggcaggagcagggctggacgggcctgaaggagaccaggggccccaaggaccccaaggcgtgcccggcaccagcaaggacggccaggacggtgctcccggcgagcctgggcctcccggagatcctgggcttccaggtgccattggggcccaggggacaccggggatctgcgacacctcagcctgccaaggagccgtgttaggaggggtcggggagaaatcaggctctcgaagctcataaaattcaacgtgaggaagcaagtgacaaggacgcccgaagcacagtggacggtcatgaaggagcggaggtgtcgcaggcgggtgacgtccaggagagggagcgcccctggctgcccctcggccgccgactggacgcgcgggccttgccagcgagcaccctcatcgggctgtcgcctgacagcatacctcaaaaggccctagctaataaacctgtaagcccagcatttgagagaaggtagggtgtgtatatataaaaggttgtgtacaactccacgaggtgaaaaatattcagtaacttgtttacatagcatttgtgtaaagactatgatctcatcccaataaaatgatatattaaaccttca

SEQ ID NO: 356024 - DNA, 2549 bp, Homo sapiens
aataggctaggtacgaggctgggtgttaatcggccgaggccatggccgggccgcgcgcgtgcgcgccgctcctgctcctgctcctgctcggggagcttctggcggccgccggggcgcagagagtgggactccccggcccccccggccccccagggccgcccgggaagcccggccaggacggcattgacggagaagctggtcctccaggtctgcctgggcccccgggaccaaagggggccccaggaaagccggggaaaccaggagaggctgggctgccgggactgccgggtgtggatggtctgactggacgagatggaccccctggacccaagggtgcccctggggaacggggaagtctgggacccccggggccgcccgggctggggggcaaaggcctccctggaccccccggagaggcaggagtgagcggccccccaggtgggatcggcctccgcggccccccgggaccttctggactccccggcctccctggtcccccaggacctcccggaccccctggacacccaggagtcctccctgaaggcgctactgaccttcagtgcccaagtatctgcccgccaggtcccccagggccccctggaatgccagggttcaagggacccactggctacaaaggcgagcagggggaagtcggcaaggacggcgagaagggtgaccctggcccccctgggcccgccggcctcccgggcagcgtggggctgcagggcccccggggattacgaggactgccagggccactcgggccccctggggaccggggtcccattgggttccgagggccgcctgggatcccaggagcgcctgggaaagcgggtgaccgaggcgagaggggcccagaagggttccgcggccccaagggtgacctcggcagacctggtcccaagggaacccccggagtggccgggccaagcggagagccgggcatgccgggcaaggacggccagaatggcgtgccaggactcgatggccagaagggagaggctggtcgcaacggtgctccgggagagaagggccccaacgggctgccgggcctccctggacgagcggggtccaaaggcgagaagggagaacggggcagagctggggagctgggtgaggccggcccctctggagagccaggcgtccctggagatgctggcatgcctggggagcgcggtgaggctggccaccggggctcagcgggggccctcggcccacaaggccctcccggagcccctggtgtccgaggcttccagggccagaagggcagcatgggagaccccggccttccaggcccccagggcctccgaggtgacgtgggcgaccggggtccgggaggtgccgcaggccctaagggagaccagggtattgcaggttccgacggtcttcctggggataaaggagaactgggtcccagcggcctggtcggacccaaaggagagtctggcagtcgaggggagctgggccccaaaggcacccagggtcccaacggcaccagcggtgttcagggtgtccccgggccccccggtcctctgggcctgcagggcgtcccgggtgttcctggcatcacggggaagccgggagttccggggaaggaggccagcgagcagcgcatcagggagctgtgtggggggatgatcagcgaacaaattgcacagttagccgcgcacctaaggaagcctttggcacccgggtccattggtcggcccggtccagctggcccccctgggcccccaggacccccaggctccattggtcaccctggcgctcgaggaccccccggataccgcggtcccactggggagctgggagaccccgggcccagaggaaaccagggtgacagaggagacaaaggcgcggcaggagcagggctggacgggcctgaaggagaccaggggccccaaggaccccaaggcgtgcccggcaccagcaaggacggccaggacggtgctcccggcgagcctgggcctcccggagatcctgggcttccaggtgccattggggcccaggggacaccggggatctgcgacacctcagcctgccaaggagccgtgttaggaggggtcggggagaaatcaggctctcgaagctcataaaattcaacgtgaggaagcaagtgacaaggacgcccgaagcacagtggacggtcatgaaggagcggaggtgtcgcaggcgggtgacgtccaggagagggagcgcccctggctgcccctcggccgccgactggacgcgcgggccttgccagcgagcaccctcatcgggctgtcgcctgacagcatacctcaaaaggccctagctaataaacctgtaagcccagcatttgagagaaggtagggtgtgtatatataaaaggttgtgtacaactccacgaggtgaaaaatattcagtaacttgtttacatagcatttgtgtaaagactatgatctcatcccaataaaatgatatattaaaccttcagattaatgactggctacagagtaacaaaaaataaagaatttaatgtacagtaaattctctccatacaaaggtctagtctgatgttttgtgta

SEQ ID NO: 356025 - DNA, 2052 bp, Homo sapiens
aataggctaggtacgaggctgggtgttaatcggccgagggatcggctccgcggcccccgggaccttctggactccccggcctccctggtcccccaggacctcccggaccccctggacacccaggagtcctccctgaaggcgctactgaccttcagtgcccaagtatctgcccgccaggtcccccagggccccctggaatgccagggttcaagggacccactggctacaaaggcgagcagggggaagtcggcaaggacggcgagaagggtgaccctggcccccctgggcccgccggcctcccgggcagcgtggggctgcagggcccccggggattacgaggactgccagggccactcgggccccctggggaccggggtcccattgggttccgagggccgcctgggatcccaggagcgcctgggaaagcgggtgaccgaggcgagaggggcccagaagggttccgcggccccaagggtgacctcggcagacctggtcccaagggaacccccggagtggccgggccaagcggagagccgggcatgccgggcaaggacggccagaatggcgtgccaggactcgatggccagaagggagaggctggtcgcaacggtgctccgggagagaagggccccaacgggctgccgggcctccctggacgagcggggtccaaaggcgagaagggagaacggggcagagctggggagctgggtgaggccggcccctctggagagccaggcgtccctggagatgctggcatgcctggggagcgcggtgaggctggccaccggggctcagcgggggccctcggcccacaaggccctcccggagcccctggtgtccgaggcttccagggccagaagggcagcatgggagaccccggccttccaggcccccagggcctccgaggtgacgtgggcgaccggggtccgggaggtgccgcaggccctaagggagaccagggtattgcaggttccgacggtcttcctggggataaaggagaactgggtcccagcggcctggtcggacccaaaggagagtctggcagtcgaggggagctgggccccaaaggcacccagggtcccaacggcaccagcggtgttcagggtgtccccgggccccccggtcctctgggcctgcagggcgtcccgggtgttcctggcatcacggggaagccgggagttccggggaaggaggccagcgagcagcgcatcagggagctgtgtggggggatgatcagcgaacaaattgcacagttagccgcgcacctaaggaagcctttggcacccgggtccattggtcggcccggtccagctggcccccctgggcccccaggacccccaggctccattggtcaccctggcgctcgaggaccccccggataccgcggtcccactggggagctgggagaccccgggcccagaggaaaccagggtgacagaggagacaaaggcgcggcaggagcagggctggacgggcctgaaggagaccaggggccccaaggaccccaaggcgtgcccggcaccagcaaggacggccaggacggtgctcccggcgagcctgggcctcccggagatcctgggcttccaggtgccattggggcccaggggacaccggggatctgcgacacctcagcctgccaaggagccgtgttaggaggggtcggggagaaatcaggctctcgaagctcataaaattcaacgtgaggaagcaagtgacaaggacgcccgaagcacagtggacggtcatgaaggagcggaggtgtcgcaggcgggtgacgtccaggagagggagcgcccctggctgcccctcggccgccgactggacgcgcgggccttgccagcgagcaccctcatcgggctgtcgcctgacagcatacctcaaaaggccctagctaataaacctgtaagcccagcatttgagagaaggtagggtgtgtatatataaaaggttgtgtacaactccacgaggtgaaaaatattcagtaacttgtttacatagcatttgtgtaaagactatgatctcatcccaataaaatgatatattaaaccttca

SEQ ID NO: 356026 - DNA, 2223 bp, Homo sapiens
aataggctaggtacgaggctgggtgttaatcggccgaggccatggccgggccgcgcgcgtgcgcgccgctcctgctcctgctcctgctcggggagcttctggcggccgccggggcgcagagagtgggactccccggcccccccggccccccagggccgcccgggaagcccggccaggacggcattgacggagaagctggtcctccaggtctgcctgggcccccgggaccaaagggggccccaggaaagccggggaaaccaggagaggctgggctgccgggactgccgggtgtggatggtctgactggacgagatggaccccctggacccaagggtgcccctggggaacggggaagtctgggacccccggggccgcccgggctggggggcaaaggcctccctggaccccccggagaggcaggagtgagcggccccccaggtgggatcggcctccgcggccccccgggaccttctggactccccggcctccctggtcccccaggacctcccggaccccctggacacccaggagtcctccctgaaggcgctactgaccttcagtgcccaagtatctgcccgccaggtcccccagggccccctggaatgccagggttcaagggacccactggctacaaaggcgagcagggggaagtcggcaaggacggcgagaagggtgaccctggcccccctgggcccgccggcctcccgggcagcgtggggctgcagggcccccggggattacgaggactgccagggccactcgggccccctggggaccggggtcccattgggttccgagggccgcctgggatcccaggagcgcctgggaaagcgggtgaccgaggcgagaggggcccagaagggttccgcggccccaagggtgacctcggcagacctggtcccaagggaacccccggagtggccgggccaagcggagagccgggcatgccgggcaaggacggccagaatggcgtgccaggactcgatggccagaagggagaggctggtcgcaacggtgctccgggagagaagggccccaacgggctgccgggcctccctggacgagcggggtccaaaggcgagaagggagaacggggcagagctggggagctgggtgaggccggcccctctggagagccaggcgtccctggagatgctggcatgcctggggagcgcggtgaggctggccaccggggctcagcgggggccctcggcccacaaggccctcccggagcccctggtgtccgaggcttccagggccagaagggcagcatgggagaccccggccttccaggcccccagggcctccgaggtgacgtgggcgaccggggtccgggaggtgccgcaggccctaagggagaccagggtattgcaggttccgacggtcttcctggggataaaggagaactgggtcccagcggcctggtcggacccaaaggagagtctggcagtcgaggggagctgggccccaaaggcacccagggtcccaacggcaccagcggtgttcagggtgtccccgggccccccggtcctctgggcctgcagggcgtcccgggtgttcctggcatcacggggaagccgggagttccggggaaggaggccagcgagcagcgcatcagggagctgtgtggggggatgatcagcgaacaaattgcacagttagccgcgcacctaaggaagcctttggcacccgggtccattggtcggcccggtccagctggcccccctgggcccccaggacccccaggctccattggtcaccctggcgctcgaggaccccccggataccgcggtcccactggggagctgggagaccccgggcccagaggaaaccagggtgacagaggagacaaaggcgcggcaggagcagggctggacgggcctgaaggagaccaggggccccaaggaccccaaggcgtgcccggcaccagcaaggacggccaggacggtgctcccggcgagcctgggcctcccggagatcctgggcttccaggtgccattggggcccaggggacaccggggatctgcgacacctcagcctgccaaggagccgtgttaggaggggtcggggagaaatcaggctctcgaagctcataaaattcaacgtgaggaagcaagtgacaaggacgcccgaagcacagtggacggtcatgaaggagcggaggtgtcgcagacaatccttgcaggggtaccgagcctcgaattcggttaatcatggttcttg

SEQ ID NO: 356027 - DNA, 2124 bp, Homo sapiens
tctgactgctctgttttccgacagtgcccaagtatctgcccgccaggtcccccagggccccctggaatgccagggttcaagggacccactggctacaaaggcgagcagggggaagtcggcaaggacggcgagaaggccgggggaccaggtctgggatgccctttagcgtggctggagtgatcagatgaggagaccccaggtgcacatcagaggggtccctgcttggccacgaggaggggcctggacagggctgaagggccttgtgggaacagtgaccacggaccccggcccggcagggcgaggccaccgagactcgcgggactgctctggaactgtggggtgaccctggcccccctgggcccgccggcctcccgggcagcgtggggctgcagggcccccggggattacgaggactgccagggccactcgggccccctggggaccggggtcccattgggttccgagggccgcctgggatcccaggagcgcctgggaaagcgggtgaccgaggcgagaggggcccagaagggttccgcggccccaagggtgacctcggcagacctggtcccaagggaacccccggagtggccgggccaagcggagagccgggcatgccgggcaaggacggccagaatggcgtgccaggactcgatggccagaagggagaggctggtcgcaacggtgctccgggagagaagggccccaacgggctgccgggcctccctggacgagcggggtccaaaggcgagaagggagaacggggcagagctggggagctgggtgaggccggcccctctggagagccaggcgtccctggagatgctggcatgcctggggagcgcggtgaggctggccaccggggctcagcgggggccctcggcccacaaggccctcccggagcccctggtgtccgaggcttccagggccagaagggcagcatgggagaccccggccttccaggcccccagggcctccgaggtgacgtgggcgaccggggtccgggaggtgccgcaggccctaagggagaccagggtattgcaggttccgacggtcttcctggggataaaggagaactgggtcccagcggcctggtcggacccaaaggagagtctggcagtcgaggggagctgggccccaaaggcacccagggtcccaacggcaccagcggtgttcagggtgtccccgggccccccggtcctctgggcctgcagggcgtcccgggtgttcctggcatcacggggaagccgggagttccggggaaggaggccagcgagcagcgcatcagggagctgtgtggggggatgatcagcgaacaaattgcacagttagccgcgcacctaaggaagcctttggcacccgggtccattggtcggcccggtccagctggcccccctgggcccccaggacccccaggctccattggtcaccctggcgctcgaggaccccccggataccgcggtcccactggggagctgggagaccccgggcccagaggaaaccagggtgacagaggagacaaaggcgcggcaggagcagggctggacgggcctgaaggagaccaggggccccaaggaccccaaggcgtgcccggcaccagcaaggacggccaggacggtgctcccggcgagcctgggcctcccggagatcctgggcttccaggtgccattggggcccaggggacaccggggatctgcgacacctcagcctgccaaggagccgtgttaggaggggtcggggagaaatcaggctctcgaagctcataaaattcaacgtgaggaagcaagtgacaaggacgcccgaagcacagtggacggtcatgaaggagcggaggtgtcgcaggcgggtgacgtccaggagagggagcgcccctggctgcccctcggccgccgactggacgcgcgggccttgccagcgagcaccctcatcgggctgtcgcctgacagcatacctcaaaaggccctagctaataaacctgtaagcccagcatttgagagaaggtagggtgtgtatatataaaaggttgtgtacaactccacgaggtgaaaaatattcagtaacttgtttacatagcatttgtgtaaagactatgatctcatcccaataaaatgatatattaaaccttca

SEQ ID NO: 356028 - DNA, 2692 bp, Homo sapiens
  misc_feature (1704)..(1704): n is a, c, g, or t
aataggctaggtacgaggctgggtgttaatcggccgaggccatggccgggccgcgcgcgtgcgcgccgctcctgctcctgctcctgctcggggagcttctggcggccgccggggcgcagagagtgggactccccggcccccccggccccccagggccgcccgggaagcccggccaggacggcattgacggagaagctggtcctccaggtctgcctgggcccccgggaccaaagggggccccaggaaagccggggaaaccaggagaggctgggctgccgggactgccgggtgtggatggtctgactggacgagatggaccccctggacccaagggtgcccctggggaacggggaagtctgggacccccggggccgcccgggctggggggcaaaggcctccctggaccccccggagaggcaggagtgagcggccccccaggtgggatcggcctccgcggccccccgggaccttctggactccccggcctccctggtcccccaggacctcccggaccccctggacacccaggagtcctccctgaaggcgctactgaccttcagtgcccaagtatctgcccgccaggtcccccagggccccctggaatgccagggttcaagggacccactggctacaaaggcgagcagggggaagtcggcaaggacggcgagaagggtgaccctggcccccctgggcccgccggcctcccgggcagcgtggggctgcagggcccccggggattacgaggactgccagggccactcgggccccctggggaccggggtcccattgggttccgagggccgcctgggatcccaggagcgcctgggaaagcgggtgaccgaggcgagaggggcccagaagggttccgcggccccaagggtgacctcggcagacctggtcccaagggaacccccggagtggccgggccaagcggagagccgggcatgccgggcaaggacggccagaatggcgtgccaggactcgatggccagaagggagaggctggtcgcaacggtgctccgggagagaagggccccaacgggctgccgggcctccctggacgagcggggtccaaaggcgagaagggagaacggggcagagctggggagctgggtgaggccggcccctctggagagccaggcgtccctggagatgctggcatgcctggggagcgcggtgaggctggccaccggggctcagcgggggccctcggcccacaaggccctcccggagcccctggtgtccgaggcttccagggccagaagggcagcatgggagaccccggccttccaggcccccagggcctccgaggtgacgtgggcgaccggggtccgggaggtgccgcaggccctaagggagaccagggtattgcaggttccgacggtcttcctggggataaaggagaactgggtcccagcggcctggtcggacccaaaggagagtctggcagtcgaggggagctgggccccaaaggcacccagggtcccaacggcaccagcggtgttcagggtgtccccgggccccccggtcctctgggcctgcagggcgtcccgggtgttcctggcatcacggggaagccgggagttccggtacgtcgcttttccggcttttccagctttcacagggttgagatcgtgttttttccggaaggaagttactttgcggggtgacggtgggaatgcctcaccgaggctgccgcccccntgctgacgaatgtgtggggtgaattccagggaaggaggccagcgagcagcgcatcagggagctgtgtggggggatgatcagcgaacaaattgcacagttagccgcgcacctaaggaagcctttggcacccgggtccattggtcggcccggtccagctggcccccctgggcccccaggacccccaggctccattggtcaccctggcgctcgaggaccccccggataccgcggtcccactggggagctgggagaccccgggcccagaggaaaccagggtgacagaggagacaaaggcgcggcaggagcagggctggacgggcctgaaggagaccaggggccccaaggaccccaaggcgtgcccggcaccagcaaggacggccaggacggtgctcccggcgagcctgggcctcccggagatcctgggcttccaggtgccattggggcccaggggacaccggggatctgcgacacctcagcctgccaaggagccgtgttaggaggggtcggggagaaatcaggctctcgaagctcataaaattcaacgtgaggaagcaagtgacaaggacgcccgaagcacagtggacggtcatgaaggagcggaggtgtcgcaggcgggtgacgtccaggagagggagcgcccctggctgcccctcggccgccgactggacgcgcgggccttgccagcgagcaccctcatcgggctgtcgcctgacagcatacctcaaaaggccctagctaataaacctgtaagcccagcatttgagagaaggtagggtgtgtatatataaaaggttgtgtacaactccacgaggtgaaaaatattcagtaacttgtttacatagcatttgtgtaaagactatgatctcatcccaataaaatgatatattaaaccttcagattaatgactggctacagagtaacaaaaaataaagaatttaatgtacagtaaattctctccatacaaaggtctagtctgatgttttgtgta

SEQ ID NO: 356029 - DNA, 1459 bp, Homo sapiens
ggcacgagggtacaccggtgcttaggagagaagggccccaacgggctgccgggcctccctggacgagcggggtccaaaggcgagaagggagaacggggcagagctggggagctgggtgaggccggcccctctggagagccaggcgtccctggagatgctggcatgcctggggagcgcggtgaggctggccaccggggctcagcgggggccctcggcccacaaggccctcccggagcccctggtgtccgaggcttccagggccagaagggcagcatgggagaccccggccttccaggcccccagggcctccgaggtgacgtgggcgaccggggtccgggaggtgccgcaggccctaagggagaccagggtattgcaggttccgacggtcttcctggggataaaggagaactgggtcccagcggcctggtcggacccaaaggagagtctggcagtcgaggggagctgggccccaaaggcacccagggtcccaacggcaccagcggtgttcagggtgtccccgggccccccggtcctctgggcctgcagggcgtcccgggtgttcctggcatcacggggaagccgggagttccggggaaggaggccagcgagcagcgcatcagggagctgtgtggggggatgatcagcgaacaaattgcacagttagccgcgcacctaaggaagcctttggcacccgggtccattggtcggcccggtccagctggcccccctgggcccccaggacccccaggctccattggtcaccctggcgctcgaggaccccccggataccgcggtcccactggggagctgggagaccccgggcccagaggaaaccagggtgacagaggagacaaaggcgcggcaggagcagggctggacgggcctgaaggagaccaggggccccaaggaccccaaggcgtgcccggcaccagcaaggacggccaggacggtgctcccggcgagcctgggcctcccggagatcctgggcttccaggtgccattggggcccaggggacaccggggatctgcgacacctcagcctgccaaggagccgtgttaggaggggtcggggagaaatcaggctctcgaagctcataaaattcaacgtgaggaagcaagtgacaaggacgcccgaagcacagtggacggtcatgaaggagcggaggtgtcgcaggcgggtgacgtccaggagagggagcgcccctggctgcccctcggccgccgactggacgcgcgggccttgccagcgagcaccctcatcgggctgtcgcctgacagcatacctcaaaaggccctagctaataaacctgtaagcccagcatttgagagaaggtagggtgtgtatatataaaaggttgtgtacaactccacgaggtgaaaaatattcagtaacttgtttacatagcatttgtgtaaagactatgatctcatcccaataaaatgatatattaaaccttca

SEQ ID NO: 356030 - DNA, 1392 bp, Homo sapiens
gtagtctaatagcaggtgtgtggatgatttgatttattttatcctcaactggctacttcccacccacccaacaatacacttagttcaaacacacaacttttctcttcacagggtcccagcggcctggtcggacccaaaggagaggtgagtgcccggcgactgttccgatgacaccatccatgggcgcctgctggcttcctgcccacctctgggcaaccaggcagccctgcagggcactgcccagatccgagatgtaaaaaagcttgctctggtcaaggctgggcaagacggctccgtgccggctgggaaagagcacgtcggggtggctctgggctcctgggctcgcccctgacccaccttcctctgttcctctgcagtctggcagtcgaggggagctgggccccaaaggcacccagggtcccaacggcaccagcggtgttcagggtgtccccgggccccccggtcctctgggcctgcagggcgtcccgggtgttcctggcatcacggggaagccgggagttccggggaaggaggccagcgagcagcgcatcagggagctgtgtggggggatgatcagcgaacaaattgcacagttagccgcgcacctaaggaagcctttggcacccgggtccattggtcggcccggtccagctggcccccctgggcccccaggacccccaggctccattggtcaccctggcgctcgaggaccccccggataccgcggtcccactggggagctgggagaccccgggcccagaggaaaccagggtgacagaggagacaaaggcgcggcaggagcagggctggacgggcctgaaggagaccaggggccccaaggaccccaaggcgtgcccggcaccagcaaggacggccaggacggtgctcccggcgagcctgggcctcccggagatcctgggcttccaggtgccattggggcccaggggacaccggggatctgcgacacctcagcctgccaaggagccgtgttaggaggggtcggggagaaatcaggctctcgaagctcataaaattcaacgtgaggaagcaagtgacaaggacgcccgaagcacagtggacggtcatgaaggagcggaggtgtcgcaggcgggtgacgtccaggagagggagcgcccctggctgcccctcggccgccgactggacgcgcgggccttgccagcgagcaccctcatcgggctgtcgcctgacagcatacctcaaaaggccctagctaataaacctgtaagcccagcatttgagagaaggtagggtgtgtatatataaaaggttgtgtacaactccacgaggtgaaaaatattcagtaacttgtttacatagcatttgtgtaaagactatgatctcatcccaataaaatgatatattaaaccttca

SEQ ID NO: 356031 - DNA, 1407 bp, Homo sapiens
  misc_feature (511)..(511): n is a, c, g, or t
ccaagggctgtgtttggagcgggttaaaaggcagccctggggcctgggcttttggcctcgaccttaagatgaacattacacctacggaggcttgagagcagggactttaaggcatgaagtccctactcatgcatgaacagctcttttaactttggggtgtatcgttttcagggtattgcaggttccgacggtcttcctggggataaaggagaactgggtcccagcggcctggtcggacccaaaggagagtctggcagtcgaggggagctgggccccaaaggcacccagggtcccaacggcaccagcggtgttcagggtgtccccgggccccccggtcctctgggcctgcagggcgtcccgggtgttcctggcatcacggggaagccgggagttccggtacgtcgcttttccggcttttccagctttcacagggttgagatcgtgttttttccggaaggaagttactttgcggggtgacggtgggaatgcctcaccgaggctgccgcccccntgctgacgaatgtgtggggtgaattccagggaaggaggccagcgagcagcgcatcagggagctgtgtggggggatgatcagcgaacaaattgcacagttagccgcgcacctaaggaagcctttggcacccgggtccattggtcggcccggtccagctggcccccctgggcccccaggacccccaggctccattggtcaccctggcgctcgaggaccccccggataccgcggtcccactggggagctgggagaccccgggcccagaggaaaccagggtgacagaggagacaaaggcgcggcaggagcagggctggacgggcctgaaggagaccaggggccccaaggaccccaaggcgtgcccggcaccagcaaggacggccaggacggtgctcccggcgagcctgggcctcccggagatcctgggcttccaggtgccattggggcccaggggacaccggggatctgcgacacctcagcctgccaaggagccgtgttaggaggggtcggggagaaatcaggctctcgaagctcataaaattcaacgtgaggaagcaagtgacaaggacgcccgaagcacagtggacggtcatgaaggagcggaggtgtcgcaggcgggtgacgtccaggagagggagcgcccctggctgcccctcggccgccgactggacgcgcgggccttgccagcgagcaccctcatcgggctgtcgcctgacagcatacctcaaaaggccctagctaataaacctgtaagcccagcatttgagagaaggtagggtgtgtatatataaaaggttgtgtacaactccacgaggtgaaaaatattcagtaacttgtttacatagcatttgtgtaaagactatgatctcatcccaataaaatgatatattaaaccttca

SEQ ID NO: 356032 - DNA, 2190 bp, Homo sapiens
  misc_feature (744)..(744): n is a, c, g, or t
ccaagggctgtgtttggagcgggttaaaaggcagccctggggcctgggcttttggcctcgaccttaagatgaacattacacctacggaggcttgagagcagggactttaaggcatgaagtccctactcatgcatgaacagctcttttaactttggggtgtatcgttttcagggtattgcaggttccgacggtcttcctggggataaaggagaactgggtcccagcggcctggtcggacccaaaggagaggtgagtgcccggcgactgttccgatgacaccatccatgggcgcctgctggcttcctgcccacctctgggcaaccaggcagccctgcagggcactgcccagatccgagatgtaaaaaagcttgctctggtcaaggctgggcaagacggctccgtgccggctgggaaagagcacgtcggggtggctctgggctcctgggctcgcccctgacccaccttcctctgttcctctgcagtctggcagtcgaggggagctgggccccaaaggcacccagggtcccaacggcaccagcggtgttcagggtgtccccgggccccccggtcctctgggcctgcagggcgtcccgggtgttcctggcatcacggggaagccgggagttccggtacgtcgcttttccggcttttccagctttcacagggttgagatcgtgttttttccggaaggaagttactttgcggggtgacggtgggaatgcctcaccgaggctgccgcccccntgctgacgaatgtgtggggtgaattccagggaaggaggccagcgagcagcgcatcagggagctgtgtggggggatgatcagcggtaagtcagccacgtgcaccggctgcagcggggcccatccccgcctgggggtcccgtgcctggggctacacagaaagccttcgtgccactgctttccagccaaagtgagcccctagcactcaccccgcctgttagcccttgggggtccacgtccgccttggcgtctgcctgtcctctgcgctagaggatggcccacgctcccgccccggattcaaccagattcccagcacgcagcagacgccctaaagcctgctgaatgcaatgggtacaagaacagcggagtgtgcccctgtggctggcagggcaggtccctaaacacccccaagggcacttccttcaccttcccactcaggcttctcaggctccaaggggttgggggtcctttctagctccagcattcatcaccccaaagcagttaaaccattttccatcaatcagaaggaaaacttgcttctggaagacagcaccgtgtagatattttatgctttacgtaacaatacttctgatgatcctctctcgagtaaacgcctgcacccttgttttcccaaagaacaaattgcacagttagccgcgcacctaaggaagcctttggcacccgggtccattggtcggcccggtccagctggcccccctgggcccccaggacccccaggctccattggtcaccctggcgctcgaggaccccccggataccgcggtcccactggggagctgggagaccccgggcccagaggaaaccagggtgacagaggagacaaaggcgcggcaggagcagggctggacgggcctgaaggagaccaggggccccaaggaccccaaggcgtgcccggcaccagcaaggacggccaggacggtgctcccggcgagcctgggcctcccggagatcctgggcttccaggtgccattggggcccaggggacaccggggatctgcgacacctcagcctgccaaggagccgtgttaggaggggtcggggagaaatcaggctctcgaagctcataaaattcaacgtgaggaagcaagtgacaaggacgcccgaagcacagtggacggtcatgaaggagcggaggtgtcgcaggcgggtgacgtccaggagagggagcgcccctggctgcccctcggccgccgactggacgcgcgggccttgccagcgagcaccctcatcgggctgtcgcctgacagcatacctcaaaaggccctagctaataaacctgtaagcccagcatttgagagaaggtagggtgtgtatatataaaaggttgtgtacaactccacgaggtgaaaaatattcagtaacttgtttacatagcatttgtgtaaagactatgatctcatcccaataaaatgatatattaaaccttca

SEQ ID NO: 356033 - DNA, 571 bp, Homo sapiens
  misc_feature (49)..(49): n is a, c, g, or t
  misc_feature (51)..(51): n is a, c, g, or t
  misc_feature (53)..(53): n is a, c, g, or t
  misc_feature (67)..(67): n is a, c, g, or t
acgcgtccggtgcccgcacatgcaaggacggccaggacggtgctcctcngngntcgggtaaaggggncccccccccctgggcctcccggagatcctgggcttccaggtgccattggggcccaggggacaccggggatctgcgacacctcagcctgccaaggagccgtgttaggaggggtcggggagaaatcaggctctcgaagctcataaaattcaacgtgaggaagcaagtgacaaggacgcccgaagcacagtggacggtcatgaaggagcggaggtgtcgcaggcgggtgacgtccaggagagggagcgcccctggctgcccctcggccgccgactggacgcgcgggccttgccagcgagcaccctcatcgggctgtcgcctgacagcatacctcaaaaggccctagctaataaacctgtaagcccagcatttgagagaaggtagggtgtgtatatataaaaggttgtgtacaactccacgaggtgaaaaatattcagtaacttgtttacatagcatttgtgtaaagactatgatctcatcccaataaaatgatatattaaaccttca

SEQ ID NO: 356034 - DNA, 1364 bp, Homo sapiens
aataggctaggtacgaggctgggtgttaatcggccgaggccatggccgggccgcgcgcgtgcgcgccgctcctgctcctgctcctgctcggggagcttctggcggccgccggggcgcagagagtgggactccccggcccccccggccccccagggccgcccgggaagcccggccaggacggcattgacggagaagctggtcctccaggtctgcctgggcccccgggaccaaagggggccccaggaaagccggggaaaccaggagaggctgggctgccgggactgccgggtgtggatggtctgactggacgagatggaccccctggacccaagggtgcccctggggaacggggaagtctgggacccccggggccgcccgggctggggggcaaaggcctccctggaccccccggagaggcaggagtgagcggccccccaggtgggatcggcctccgcggccccccgggaccttctggactccccggcctccctggtcccccaggacctcccggaccccctggacacccaggagtcctccctgaaggcgctactgaccttcagtgcccaagtatctgcccgccaggtcccccagggccccctggaatgccagggttcaagggacccactggctacaaaggcgagcagggggaagtcggcaaggacggcgagaagggtgaccctggcccccctgggcccgccggcctcccgggcagcgtggggctgcagggcccccggggattacgaggactgccagggccactcgggccccctggggaccggggtcccattgggttccgagggccgcctgggatcccaggagcgcctgggaaagcgggtgaccgaggcgagaggggcccagaagggttccgcggccccaagggtgacctcggcagacctggtcccaagggaacccccggagtggccgggccaagcggagagccgggcatgccgggcaaggacggccagaatggcgtgccaggactcgatggccagaagggagaggctggtcgcaacggtgctccgggagagaagggccccaacgggctgccgggcctccctggacgagcggggtccaaaggcgagaagggagaacgggggcagagctgggtgagctgggtgaggccggaccctctggagaaccaagagcgtcacacatggagaaatgcgatgggacaatgcccatgggagagaagacggacgggatgaacggacatgggtacccacaaccgtgtggacaatcaaaaaggagagagaagcaccaaacagggaacaccaacaaaaggagcccataccgccgagaaaaccacccatggattggtcaccagaaaggataccaggggtgcaagaaagtgcgacaagacaatg

SEQ ID NO: 356035 - DNA, 952 bp, Homo sapiens
gccggagacgccaggagccctgctccccacccctctccattaatgacggggaagagccaccgcctctgccgggaacgccaaggaatacgcgggcctggagcctgaaaagctggatggggctcaagtggaggcccaaaggatcactagcagcctagccagggtccagagcgaggcagggactggaggagcgcttatccgactgcctcgccctgccgcgggatcccccaaccccgacagggtctcagtcccgaactacaactcccggggtgcaccgcgccggccctcgccgccatgcccctccttcccgcaccatccccattcccatcccccttctctagtccccgaccgccctactatcccccagagtatacctgcagctcagaaacagatgcacagagcatcacgtacaatggctccatggacagcccagtgcccttgtaccctaccgattgccccccttcttatgaggcagtcatgggactacgaggagacagccaggccactctctttgaccctcagcttcacgatggctcgtgcatctgtgaacgagtggcctccattgtagacgtgtccatggacagcgggtctctggtgctgtcagccattggtgacctccctgggggctctagcccgtcggaggactcgtgcctgctggagctgcagggctccgtgcgctccgtggactacgttctctttcgctccatccagcgcagccgtgccggctactgcctcagcctggactgtggcctgcggggcctcggggaagcctgcgaagggcccaagggtgggcgtcctttctggttgcctttagtcacccatgtggccacagtggccttcggccggttggggtgccctggtggctgtcccatggcggggctcttttcggcccgtcctgacggtgtgaaatagcagcgggatcttccgcgaccgaaagacgggagaggatttacaa

SEQ ID NO: 356036 - DNA, 3890 bp, Homo sapiens
gccggagacgccaggagccctgctccccacccctctccattaatgacggggaagagccaccgcctctgccgggaacgccaaggaatacgcgggcctggagcctgaaaagctggatggggctcaagtggaggcccaaaggatcactagcagcctagccagggtccagagcgaggcagggactggaggagcgcttatccgactgcctcgccctgccgcgggatcccccaaccccgacagggtctcagtcccgaactacaactcccggggtgcaccgcgccggccctcgccgccatgcccctccttcccgcaccatccccattcccatcccccttctctagtccccgacctgcggcagccggagctcggggagcggagcgtggtggggaggggagcgggacaggcgacacaggagacagcggcgccgcggcctctccccaccaggcggccccggatcctactggacgccctgagggcacaccgaccgcgcctctagagtcaccccacgccgacccctcccctcttctctagacttatttccattccttcccgcttttaccctccccacccctccctgggctccaggccgccgccccctcctcactcctggaccggcccttctcggtgcccctcttccctagggagatgcgatgagccggtgcccccgcgtcctcatcgtcgccccgggcacggtgcccgtccagtgcccgtggtggggagggagcactccgcggtccctccgtgacgcccctcgcttggccccccccacagctggcgtccctcggccatgccccaggggacccagccagggggtgggctctagagcgagtggggtggagaggagaaaggacggggccttgggggcctctgagatgctcccaagtgccagggagggccgagcgaggcgcaggcaaccgggcagcaggcatgatgccctcgcctagtgactccagccgctcgctgaccagccggcccagcaccaggggccttacccacctccgcctccaccgaccctggctgcaggccctgcttacgctggggctggtccaagtgctcctgggcatcctggtggtcaccttcagcatggtggcctcttccgtcaccaccaccgagagcatcaagaggtcctgcccgtcttgggctgggttctcgctggcgttctccggggtggttggcattgtgtcctggaagcggccattcactctagtgatctccttcttctccttgctttcggtgctctgtgtcatgcttagcatggctggctctgttctctcctgtaagaatgctcaactggcccgagacttccaacagtgctctctggaaggaaaggtctgtgtgtgctgtccctctgttcccctcctccggccctgtccagagtcggggcaggaactgaaagttgcccctaactccacctgtgatgaagcccgaggggccctcaagaacctgctcttcagcgtctgtgggctcaccatttgtgccgctataatctgtacactctctgctattgtctgctgcatccaaatcttctccctggacctcgtgcatacgctggcccctgagcggtcagtctcaggcccactgggacctctgggctgcacgtccccgcccccagcccctctcctacacaccatgctggacctggaggaatttgtcccgcctgtgcccccaccgccctactatcccccagagtatacctgcagctcagaaacagatgcacagagcatcacgtacaatggctccatggacagcccagtgcccttgtaccctaccgattgccccccttcttatgaggcagtcatgggactacgaggagacagccaggccactctctttgaccctcagcttcacgatggctcgtgcatctgtgaacgagtggcctccattgtagacgtgtccatggacagcgggtctctggtgctgtcagccattggtgacctccctgggggctctagcccgtcggaggactcgtgcctgctggagctgcagggctccgtgcgctccgtggactacgttctctttcgctccatccagcgcagccgtgccggctactgcctcagcctggactgtggcctgcggggccccttcgaggaaagccccctgccacggcgccccccacgggctgcccgctcctattcctgctctgcccctgaagctccacccccactgggtgcccccacagctgcccgcagctgccaccggttggagggctggccgccctgggtgggaccctgcttccccgagctgaggcggcgggtcccccggggagggggccgcccagccgcagccccgcccacccgagccccgactcgtcgcttcagcgatagctcaggttccctcaccccaccggggcaccggcctcctcatccggcatccccaccaccgctgctgctgccacggtcccacagcgacccaggcatcacgacctccagtgacactgctgacttcagggacctttataccaaagtgcttgaggaagaagctgcttctgtttcctctgcagatacagggctctgctctgaagcctgcctcttccgcctagcccgctgcccttcccccaagttgctacgtgcccggtcagccgagaaacggcgccctgtgcccaccttccaaaaagttcccctgccctcgggccctgcacctgcccactccctgggggacctaaagggcagctggccaggtcggggcctggtcactcgtttcctccagatatccaggaaagccccagaccccagtgggactggagctcatggacataagcaggtgccccggagcctgtggggccggcctggccgagagagcctccaccttcgcagctgcggagatctgagctctagctcttccctgcggcgtctcctgtctggccgcaggctggagcgtggtacccgcccccacagcctcagcctcaacgggggcagccgggagactgggctctgacctaggcttcttgtcacactgaacacatccagccacaggcaccagctggttgggaccagcagcccccagcatcctcttgcactggctggcacaaaaagaaacctgctgtataccccccaaagtgtccctttccctcctacctctggggtctcttgctgcttgcctctgctgctctggtctgggagagcttctgtcctgtgctgcatgggtatttagactgtgggggagatgccccttcttatagcactggaggaggaaaacaaattcttgtccccctcagaatgagagtggctctttctgatttgcaagggcactatggtcagggcaaaggcatggcccaggtgtttaagtacagggtgacgtgtgcctatgcaatggggtggtaaggcaggcacgaagagtccaaaaaatctaggtggcctctcagctctgccacctctagctgcatgaccttgggcaagctatgtaaccccaattgcctgctccattaaagactgtgaaggtagaatgtttgtaaagctcttaacagtatgtaagccttcaataaatttcagttttccccttgttttcttggaaaaaaaaaaaaaaaaaaaaaaaaaaaaaaaaaaaagaaaaaaaaaaaaaaaaaaaaaaaagaaaaaaaagggggggggggggcacaagaggatcccgcggggggggcccagggggcacaccacacgattactaggacaaaagagggggcccccaattatggccgagctctcttataaatcaatacgacgggacagcggcgcggctagtacaaaaaaccccgatcacggcggcgtgggagaacccactcggccacacgggggaacatctgggaggagaaagaacccccaaatcggagggggcgacgaacacactgggcgcgccaacacacccacagagagactaacgaccctgggagaatcacaaacattcagcagtcatagcag

SEQ ID NO: 356037 - DNA, 2848 bp, Homo sapiens
gccggagacgccaggagccctgctccccacccctctccattaatgacggggaagagccaccgcctctgccgggaacgccaaggaatacgcgggcctggagcctgaaaagctggatggggctcaagtggaggcccaaaggatcactagcagcctagccagggtccagagcgaggcagggactggaggagcgcttatccgactgcctcgccctgccgcgggatcccccaaccccgacagggtctcagtcccgaactacaactcccggggtgcaccgcgccggccctcgccgccatgcccctccttcccgcaccatccccattcccatcccccttctctagtccccgacctgcggcagccggagctcggggagcggagcgtggtggggaggggagcgggacaggcgacacaggagacagcggcgccgcggcctctccccaccaggcggccccggatcctactggacgccctgagggcacaccgaccgcgcctctagagtcaccccacgccgacccctcccctcttctctagacttatttccattccttcccgcttttaccctccccacccctccctgggctccaggccgccgccccctcctcactcctggaccggcccttctcggtgcccctcttccctagggagatgcgatgagccggtgcccccgcgtcctcatcgtcgccccgggcacggtgcccgtccagtgcccgtggtggggagggagcactccgcggtccctccgtgacgcccctcgcttggccccccccacagctggcgtccctcggccatgccccaggggacccagccagggggtgggctctagagcgagtggggtggagaggagaaaggacggggccttgggggcctctgagatgctcccaagtgccagggagggccgagcgaggcgcaggcaaccgggcagcaggcatgatgccctcgcctagtgactccagccgctcgctgaccagccggcccagcaccaggggccttacccacctccgcctccaccgaccctggctgcaggccctgcttacgctggggctggtccaagtgctcctgggcatcctggtggtcaccttcagcatggtggcctcttccgtcaccaccaccgagagcatcaagaggtcctgcccgtcttgggctgggttctcgctggcgttctccggggtggttggcattgtgtcctggaagcggccattcactctagtgatctccttcttctccttgctttcggtgctctgtgtcatgcttagcatggctggctctgttctctcctgtaagaatgctcaactggcccgagacttccaacagtgctctctggaaggaaaggtctgtgtgtgctgtccctctgttcccctcctccggccctgtccagagtcggggcaggaactgaaagttgcccctaactccacctgtgatgaagcccgaggggccctcaagaacctgctcttcagcgtctgtgggctcaccatttgtgccgctataatctgtacactctctgctattgtctgctgcatccaaatcttctccctggacctcgtgcatacgctggcccctgagcggtcagtctcaggcccactgggacctctgggctgcacgtccccgcccccagcccctctcctacacaccatgctggacctggaggaatttgtcccgcctgtgcccccaccgccctactatcccccagagtatacctgcagctcagaaacagatgcacagagcatcacgtacaatggctccatggacagcccagtgcccttgtaccctaccgattgccccccttcttatgaggcagtcatgggactacgaggagacagccaggccactctctttgaccctcagcttcacgatggctcgtgcatctgtgaacgagtggcctccattgtagacgtgtccatggacagcgggtctctggtgctgtcagccattggtgacctccctgggggctctagcccgtcggaggactcgtgcctgctggagctgcagggctccgtgcgctccgtggactacgttctctttcgctccatccagcgcagccgtgccggctactgcctcagcctggactgtggcctgcggggccccttcgaggaaagccccctgccacggcgccccccacgggctgcccgctcctattcctgctctgcccctgaagctccacccccactgggtgcccccacagctgcccgcagctgccaccggttggagggctggccgccctgggtgggaccctgcttccccgagctgaggcggcgggtcccccggggagggggccgcccagccgcagccccgcccacccgagccccgactcgtcgcttcagcgatagctcaggttccctcaccccaccggggcaccggcctcctcatccggcatccccaccaccgctgctgctgccacggtcccacagcgacccaggcatcacgacctccagtgacactgctgacttcagggacctttataccaaagtgcttgaggaagaagctgcttctgtttcctctgcagatacagggctctgctctgaagcctgcctcttccgcctagcccgctgcccttcccccaaaatgagagtggctctttctgatttgcaagggcactatggtcagggcaaaggcatggcccaggtgtttaagtacagggtgacgtgtgcctatgcaatggggtggtaaggcaggcacgaagagtccaaaaaatctaggtggcctctcagctctgccacctctagctgcatgaccttgggcaagctatgtaaccccaattgcctgctccattaaagactgtgaaggtagaatgtttgtaaagctcttaacagtatgtaagccttcaataaatttcagttttccccttgttttcttg

SEQ ID NO: 356038 - DNA, 1821 bp, Homo sapiens
cctggtggcgaattcggcacgagggatgcacagagcatcacgtacaatggctccatggacagcccagtgcccttgtaccctaccgattgccccccttcttatgaggcagtcatgggactacgaggagacagccaggccactctctttgaccctcagcttcacgatggctcgtgcatctgtgaacgagtggcctccattgtagacgtgtccatggacagcgggtctctggtgctgtcagccattggtgacctccctgggggctctagcccgtcggaggactcgtgcctgctggagctgcagggctccgtgcgctccgtggactacgttctctttcgctccatccagcgcagccgtgccggctactgcctcagcctggactgtggcctgcggggccccttcgaggaaagccccctgccacggcgccccccacgggctgcccgctcctattcctgctctgcccctgaagctccacccccactgggtgcccccacagctgcccgcagctgccaccggttggagggctggccgccctgggtgggaccctgcttccccgagctgaggcggcgggtcccccggggagggggccgcccagccgcagccccgcccacccgagccccgactcgtcgcttcagcgatagctcaggttccctcaccccaccggggcaccggcctcctcatccggcatccccaccaccgctgctgctgccacggtcccacagcgacccaggcatcacgacctccagtgacactgctgacttcagggacctttataccaaagtgcttgaggaagaagctgcttctgtttcctctgcagatacagggctctgctctgaagcctgcctcttccgcctagcccgctgcccttcccccaagttgctacgtgcccggtcagccgagaaacggcgccctgtgcccaccttccaaaaagttcccctgccctcgggccctgcacctgcccactccctgggggacctaaagggcagctggccaggtcggggcctggtcactcgtttcctccagatatccaggaaagccccagaccccagtgggactggagctcatggacataagcaggtgccccggagcctgtggggccggcctggccgagagagcctccaccttcgcagctgcggagatctgagctctagctcttccctgcggcgtctcctgtctggccgcaggctggagcgtggtacccgcccccacagcctcagcctcaacgggggcagccgggagactgggctctgacctaggcttcttgtcacactgaacacatccagccacaggcaccagctggttgggaccagcagcccccagcatcctcttgcactggctggcacaaaaagaaacctgctgtataccccccaaagtgtccctttccctcctacctctggggtctcttgctgcttgcctctgctgctctggtctgggagagcttctgtcctgtgctgcatgggtatttagactgtgggggagatgccccttcttatagcactggaggaggaaaacaaattcttgtccccctcagaatgagagtggctctttctgatttgcaagggcactatggtcagggcaaaggcatggcccaggtgtttaagtacagggtgacgtgtgcctatgcaatggggtggtaaggcaggcacgaagagtccaaaaaatctaggtggcctctcagctctgccacctctagctgcatgaccttgggcaagctatgtaaccccaattgcctgctccattaaagactgtgaaggtagaatgtttgtaaagctcttaacagtatgtaagccttcaataaatttcagttttccccttgttttcttg

SEQ ID NO: 356039 - DNA, 532 bp, Homo sapiens
agcgccccctgccgcccacagtgtccatggacagcgggtctctggtgctgtcagccattggtgacctccctgggggctctagcccgtcggaggactcgtgcctgctggagctgcagggctccgtgcgctccgtggactacgttctctttcgctccatccagcgcagccgtgccggctactgcctcagcctggactgtggcctgcggggccccttcgaggaaagccccctgccacggcgccccccacgggctgcccgctcctattcctgctctgcccctgaagctccacccccactgggtgcccccacagctgcccgcagctgccaccggttggagggctggccgccctgggtgggaccctgcttccccgagctgaggcggcgggtcccccggggagggggccgcccagccgcagccccgcccacccgagccccgactcgtcgcttcagcgatagctcaggttccctcaccccaccggggcaccggcctcctcatccggcatccccaccaccgctgctgctgccacggtccca

SEQ ID NO: 356040 - DNA, 3504 bp, Homo sapiens
gccggagacgccaggagccctgctccccacccctctccattaatgacggggaagagccaccgcctctgccgggaacgccaaggaatacgcgggcctggagcctgaaaagctggatggggctcaagtggaggcccaaaggatcactagcagcctagccagggtccagagcgaggcagggactggaggagcgcttatccgactgcctcgccctgccgcgggatcccccaaccccgacagggtctcagtcccgaactacaactcccggggtgcaccgcgccggccctcgccgccatgcccctccttcccgcaccatccccattcccatcccccttctctagtccccgacctgcggcagccggagctcggggagcggagcgtggtggggaggggagcgggacaggcgacacaggagacagcggcgccgcggcctctccccaccaggcggccccggatcctactggacgccctgagggcacaccgaccgcgcctctagagtcaccccacgccgacccctcccctcttctctagacttatttccattccttcccgcttttaccctccccacccctccctgggctccaggccgccgccccctcctcactcctggaccggcccttctcggtgcccctcttccctagggagatgcgatgagccggtgcccccgcgtcctcatcgtcgccccgggcacggtgcccgtccagtgcccgtggtggggagggagcactccgcggtccctccgtgacgcccctcgcttggccccccccacagctggcgtccctcggccatgccccaggggacccagccagggggtgggctctagagcgagtggggtggagaggagaaaggacggggccttgggggcctctgagatgctcccaagtgccagggagggccgagcgaggcgcaggcaaccgggcagcaggcatgatgccctcgcctagtgactccagccgctcgctgaccagccggcccagcaccaggggccttacccacctccgcctccaccgaccctggctgcaggccctgcttacgctggggctggtccaagtgctcctgggcatcctggtggtcaccttcagcatggtggcctcttccgtcaccaccaccgagagcatcaagaggtcctgcccgtcttgggctgggttctcgctggcgttctccggggtggttggcattgtgtcctggaagcggccattcactctagtgatctccttcttctccttgctttcggtgctctgtgtcatgcttagcatggctggctctgttctctcctgtaagaatgctcaactggcccgagacttccaacagtgctctctggaaggaaaggtctgtgtgtgctgtccctctgttcccctcctccggccctgtccagagtcggggcaggaactgaaagttgcccctaactccacctgtgatgaagcccgaggggccctcaagaacctgctcttcagcgtctgtgggctcaccatttgtgccgctataatctgtacactctctgctattgtctgctgcatccaaatcttctccctggacctcgtgcatacgctggcccctgagcggtcagtctcaggcccactgggacctctgggctgcacgtccccgcccccagcccctctcctacacaccatgctggacctggaggaatttgtcccgcctgtgcccccaccgccctactatcccccagagtatacctgcagctcagaaacagatgcacagagcatcacgtacaatggctccatggacagcccagtgcccttgtaccctaccgattgccccccttcttatgaggcagtcatgggactacgaggagacagccaggccactctctttgaccctcagcttcacgatggctcgtgcatctgtgaacgagtggcctccattgtagacgtgtccatggacagcgggtctctggtgctgtcagccattggtgacctccctgggggctctagcccgtcggaggactcgtgcctgctggagctgcagggctccgtgcgctccgtggactacgttctctttcgctccatccagcgcagccgtgccggctactgcctcagcctggactgtggcctgcggggccccttcgaggaaagccccctgccacggcgccccccacgggctgcccgctcctattcctgctctgcccctgaagctccacccccactgggtgcccccacagctgcccgcagctgccaccggttggagggctggccgccctgggtgggaccctgcttccccgagctgaggcggcgggtcccccggggagggggccgcccagccgcagccccgcccacccgagccccgactcgtcgcttcagcgatagctcaggttccctcaccccaccggggcaccggcctcctcatccggcatccccaccaccgctgctgctgccacggtcccacagcgacccaggcatcacgacctccagtgacactgctgacttcagggacctttataccaaagtgcttgaggaagaagctgcttctgtttcctctgcagatacagggctctgctctgaagcctgcctcttccgcctagcccgctgcccttcccccaagttgctacgtgcccggtcagccgagaaacggcgccctgtgcccaccttccaaaaagttcccctgccctcgggccctgcacctgcccactccctgggggacctaaagggcagctggccaggtcggggcctggtcactcgtttcctccagatatccaggaaagccccagaccccagtgggactggagctcatggacataagcaggtgccccggagcctgtggggccggcctggccgagagagcctccaccttcgcagctgcggagatctgagctctagctcttccctgcggcgtctcctgtctggccgcaggctggagcgtggtacccgcccccacagcctcagcctcaacgggggcagccgggagactgggctctgacctaggcttcttgtcacactgaacacatccagccacaggcaccagctggttgggaccagcagcccccagcatcctcttgcactggctggcacaaaaagaaacctgctgtataccccccaaagtgtccctttccctcctacctctggggtctcttgctgcttgcctctgctgctctggtctgggagagcttctgtcctgtgctgcatgggtatttagactgtgggggagatgccccttcttatagcactggaggaggaaaacaaattcttgtccccctcagaatgagagtggctctttctgatttgcaagggcactatggtcagggcaaaggcatggcccaggtgtttaagtacagggtgacgtgtgcctatgcaatggggtggtaaggcaggcacgaagagtccaaaaaatctaggtggcctctcagctctgccacctctagctgcatgaccttgggcaagctatgtaaccccaattgcctgctccattaaagactgtgaaggtagaatgtttgtaaagctcttaacagtatgtaagccttcaataaatttcagttttccccttgttttcttg

SEQ ID NO: 356041 - DNA, 2184 bp, Homo sapiens
gccggagacgccaggagccctgctccccacccctctccattaatgacggggaagagccaccgcctctgccgggaacgccaaggaatacgcgggcctggagcctgaaaagctggatggggctcaagtggaggcccaaaggatcactagcagcctagccagggtccagagcgaggcagggactggaggagcgcttatccgactgcctcgccctgccgcgggatcccccaaccccgacagggtctcagtcccgaactacaactcccggggtgcaccgcgccggccctcgccgccatgcccctccttcccgcaccatccccattcccatcccccttctctagtccccgaccgccctactatcccccagagtatacctgcagctcagaaacagatgcacagagcatcacgtacaatggctccatggacagcccagtgcccttgtaccctaccgattgccccccttcttatgaggcagtcatgggactacgaggagacagccaggccactctctttgaccctcagcttcacgatggctcgtgcatctgtgaacgagtggcctccattgtagacgtgtccatggacagcgggtctctggtgctgtcagccattggtgacctccctgggggctctagcccgtcggaggactcgtgcctgctggagctgcagggctccgtgcgctccgtggactacgttctctttcgctccatccagcgcagccgtgccggctactgcctcagcctggactgtggcctgcggggccccttcgaggaaagccccctgccacggcgccccccacgggctgcccgctcctattcctgctctgcccctgaagctccacccccactgggtgcccccacagctgcccgcagctgccaccggttggagggctggccgccctgggtgggaccctgcttccccgagctgaggcggcgggtcccccggggagggggccgcccagccgcagccccgcccacccgagccccgactcgtcgcttcagcgatagctcaggttccctcaccccaccggggcaccggcctcctcatccggcatccccaccaccgctgctgctgccacggtcccacagcgacccaggcatcacgacctccagtgacactgctgacttcagggacctttataccaaagtgcttgaggaagaagctgcttctgtttcctctgcagatacagggctctgctctgaagcctgcctcttccgcctagcccgctgcccttcccccaagttgctacgtgcccggtcagccgagaaacggcgccctgtgcccaccttccaaaaagttcccctgccctcgggccctgcacctgcccactccctgggggacctaaagggcagctggccaggtcggggcctggtcactcgtttcctccagatatccaggaaagccccagaccccagtgggactggagctcatggacataagcaggtgccccggagcctgtggggccggcctggccgagagagcctccaccttcgcagctgcggagatctgagctctagctcttccctgcggcgtctcctgtctggccgcaggctggagcgtggtacccgcccccacagcctcagcctcaacgggggcagccgggagactgggctctgacctaggcttcttgtcacactgaacacatccagccacaggcaccagctggttgggaccagcagcccccagcatcctcttgcactggctggcacaaaaagaaacctgctgtataccccccaaagtgtccctttccctcctacctctggggtctcttgctgcttgcctctgctgctctggtctgggagagcttctgtcctgtgctgcatgggtatttagactgtgggggagatgccccttcttatagcactggaggaggaaaacaaattcttgtccccctcagaatgagagtggctctttctgatttgcaagggcactatggtcagggcaaaggcatggcccaggtgtttaagtacagggtgacgtgtgcctatgcaatggggtggtaaggcaggcacgaagagtccaaaaaatctaggtggcctctcagctctgccacctctagctgcatgaccttgggcaagctatgtaaccccaattgcctgctccattaaagactgtgaaggtagaatgtttgtaaagctcttaacagtatgtaagccttcaataaatttcagttttccccttgttttcttg

SEQ ID NO: 356042 - DNA, 1373 bp, Homo sapiens
aaagattgcaggtcgaggctgggtttaatcgggccgaggccacagctgcccgcagctgccaccggttggagggctggccgccctgggtgggaccctgcttccccgagctgaggcggcgggtcccccggggagggggccgcccagccgcagccccgcccacccgagccccgactcgtcgcttcagcgatagctcaggttccctcaccccaccggggcaccggcctcctcatccggcatccccaccaccgctgctgctgccacggtcccacagcgacccaggcatcacgacctccagtgacactgctgacttcagggacctttataccaaagtgcttgaggaagaagctgcttctgtttcctctgcagatacagggctctgctctgaagcctgcctcttccgcctagcccgctgcccttcccccaagttgctacgtgcccggtcagccgagaaacggcgccctgtgcccaccttccaaaaagttcccctgccctcgggccctgcacctgcccactccctgggggacctaaagggcagctggccaggtcggggcctggtcactcgtttcctccagatatccaggaaagccccagaccccagtgggactggagctcatggacataagcaggtgccccggagcctgtggggccggcctggccgagagagcctccaccttcgcagctgcggagatctgagctctagctcttccctgcggcgtctcctgtctggccgcaggctggagcgtggtacccgcccccacagcctcagcctcaacgggggcagccgggagactgggctctgacctaggcttcttgtcacactgaacacatccagccacaggcaccagctggttgggaccagcagcccccagcatcctcttgcactggctggcacaaaaagaaacctgctgtataccccccaaagtgtccctttccctcctacctctggggtctcttgctgcttgcctctgctgctctggtctgggagagcttctgtcctgtgctgcatgggtatttagactgtgggggagatgccccttcttatagcactggaggaggaaaacaaattcttgtccccctcagaatgagagtggctctttctgatttgcaagggcactatggtcagggcaaaggcatggcccaggtgtttaagtacagggtgacgtgtgcctatgcaatggggtggtaaggcaggcacgaagagtccaaaaaatctaggtggcctctcagctctgccacctctagctgcatgaccttgggcaagctatgtaaccccaattgcctgctccattaaagactgtgaaggtagaatgtttgtaaagctcttaacagtatgtaagccttcaataaatttcagttttccccttgttttcttg

SEQ ID NO: 356043 - DNA, 574 bp, Homo sapiens
tctttaccccatccaagatggctttggtgttgaagaactggaaaacagttatctttaacacaattccaagacagaactcagaggcccaatatagtgcaaagttctagaaagacagctgaaggctggtcatctcttccaggtgcacctggctcatcctactaggaggtcttgtcccggctctgtcctaccttgaggcagcctggggatgctaccaaacttcagtgggccttagcttccttatctacaaagcagagataggtccagggtctcttatctggaaccaaggaggtcagatatgttcagagtcagatgcaaatatcccacaaagcatcttacccagtgggcttcgggcagcgccccttcgttaaacacttgaatattcggcagtgggatgaaggcatccatagtctcaggatagttcaagccacattgttctgtcaaatttgtgtgtgccaactttagggaaaaactaaggtttcagattttttgcatttcagggattttggagaagtgattgtgaacctgtagcttctcacatgattaataaaaaggttggtggaacagaaaaaaaaaa

SEQ ID NO: 356044 - DNA, 1554 bp, Homo sapiens
gggaggtgcctgaatagggtttgagggtctgtttgagttgggtgaagaaggcgggaagttaatcctcttccaatcagctccccatctcgccctctggcggctccggaccacaggccgagttactctgattaccgccatgctccaagacccgcactgacagtccccacgtgagggaccgcggtgggagtcctaaatgggggaggaggggacgggcggcactgtgcatctgctgtgcctcgcggcctccagcggggtccccctattctgcaggagcagtcgcggcggcgcccccgcccgtcagcagctcccgttctctgtcatcggttccctcaatggagtccacatgtttgggcagaatctggaggtgcagctgagctctgcgaggaccgagaacacgactgtggtgtggaaaagcttccatgacagcatcaccctcattgttctgtcatctgaggtgggcatctctgagctgaggctggagagactactccaaatggtgtttggagccatggtccttcttgtgggacttgaagaactgaccaatatccgcaacgtggagagactgaagaaggacttgagggccagttattgcctcatcgacagcttcctgggggactcggagctcatcggggacctgacccagtgtgtggactgcgtgattcctccagaggggtccctcttgcaggaagccctctccgggttcgctgaggccgcgggcacgaccttcgtcagtctggtggtgtccggccgggtggtggcagcaacagagggttggtggcggctggggacgcccgaggccgtgctgctcccctggctggtggggtccctgccgccgcagaccgctcgcgactacccggtgtacctgccgcacgggagccccacggtcccacaccggctcctgaccctgactctgctgccgagcctggagctgtgtctactctgcgggccgagcccacccctcagccagttgtatccacagcttctggagcgctggtggcagccactgctggacccgttgcgggcctgtctgccgttgggaccccgggcgctgcccagtggcttcccccttcacacagacatcctcgggctgctgctcctccacctggaactgaagcgctgcctcttcaccgtggagcccttgggggataaagagccttcaccagaacagcgccggcgcctcctccgaaacttctataccctggtcacctccacgcacttcccaccagagccagggccaccagagaagacagaagatgaggtctaccaggcccagctgcccagagcttgctacctagcagtgggtgatggacacagacatggggctgttagcgtctctctgtttattcgctcacaataatacacagcccctggatggggagggggtaggaggggctacaacagggtggggtgggaggggaggagacatccacttccctggcccctctcccctctgtgcttgggggggaaagggagggagggggactccccctaaccccccagaatgtaaacagcagcagatgaacaaaaataaaaatacaaaaggccggaggaaag

SEQ ID NO: 356045 - DNA, 927 bp, Homo sapiens
  misc_feature (23)..(23): n is a, c, g, or t
  misc_feature (41)..(41): n is a, c, g, or t
  misc_feature (911)..(911): n is a, c, g, or t
aagaataggctagtacgaggctngtgttaatcggccgaggngccgagttactctgattaccgccatgctccaagacccgcactgacagtccccacgtgagggaccgcggtgggagtcctaaatgggggaggaggggacgggcggcactgtgcatctgctgtgcctcgcggcctccagcggggtccccctattctgcaggagcagtcgcggcggcgcccccgcccgtcagcagctcccgttctctgtcatcggttccctcaatggagtccacatgtttgggcagaatctggaggtgcagctgagctctgcgaggaccgagaacacgactgtggtccttcttgtgggacttgaagaactgaccaatatccgcaacgtggagagactgaagaaggacttgagggccagttattgcctcatcgacagcttcctgggggactcggagctcatcggggacctgacccagtgtgtggactgcgtgattcctccagaggggtccctcttgcagtctggtggtgtccggccgggtggtggcagcaacagagggttggtggcggctggggacgcccgaggccgtgctgctcccctggctggtggggtccctgccgccgcagaccgctcgcgactacccggtgtacctgccgcacgggagccccacggtcccacaccggctcctgaccctgactctgctgccgagcctggagctgtgtctactctgcgggccgagcccacccctcagccagttgtatccacagcttctggagcgctggtggcagccactgctggacccgttgcgggcctgtctgccgttgggaccccgggcgctgcccagtggcttcccccttcacacagacatcctcggggtgctgtgcctccactgaatgaaggccgcccttcaccggggcctggggtanaagcttccaaaaagcg

SEQ ID NO: 356046 - DNA, 1717 bp, Homo sapiens
gggaggtgcctgaatagggtttgagggtctgtttgagttgggtgaagaaggcgggaagttaatcctcttccaatcagctccccatctcgccctctggcggctccggaccacaggccgagttactctgattaccgccatgctccaagacccgcactgacagtccccacgtgagggaccgcggtgggagtcctaaatgggggaggaggggacgggcggcactgtgcatctgctgtgcctcgcggcctccagcggggtccccctattctgcaggagcagtcgcggcggcgcccccgcccgtcagcagctcccgttctctgtcatcggttccctcaatggagtccacatgtttgggcagaatctggaggtgcagctgagctctgcgaggaccgagaacacgactgtggtgtggaaaagcttccatgacagcatcaccctcattgttctgtcatctgaggtgggcatctctgagctgaggctggagagactactccaaatggtgtttggagccatggtccttcttgtgggacttgaagaactgaccaatatccgcaacgtggagagactgaagaaggacttgagggccagttattgcctcatcgacagcttcctgggggactcggagctcatcggggacctgacccagtgtgtggactgcgtgattcctccagaggggtccctcttgcaggaagccctctccgggttcgctgaggccgcgggcacgaccttcgtcagtctggtggtgtccggccgggtggtggcagcaacagagggttggtggcggctggggacgcccgaggccgtgctgctcccctggctggtggggtccctgccgccgcagaccgctcgcgactacccggtgtacctgccgcacgggagccccacggtcccacaccggctcctgaccctgactctgctgccgagcctggagctgtgtctactctgcgggccgagcccacccctcagccagttgtatccacagcttctggagcgctggtggcagccactgctggacccgttgcgggcctgtctgccgttgggaccccgggcgctgcccagtggcttcccccttcacacagacatcctcgggctgctgctcctccacctggaactgaagcgctgcctcttcaccgtggagcccttgggggataaagagccttcaccagaacagcgccggcgcctcctccgaaacttctataccctggtcacctccacgcacttcccaccagagccagggccaccagagaagacagaagatgaggtctaccaggcccagctgcccagagcttgctacctggtgttggggactgaggaaccaggcacaggagtgcgtctggtggccttgcagctggggcttcggcggctgctgctgctgctgtctccccagagtcccacccatgggctgcgaagcctggccacccacactctgcatgccctcaccccacttctttgactacctagcagtgggtgatggacacagacatggggctgttagcgtctctctgtttattcgctcacaataatacacagcccctggatggggagggggtaggaggggctacaacagggtggggtgggaggggaggagacatccacttccctggcccctctcccctctgtgcttgggggggaaagggagggagggggactccccctaaccccccagaatgtaaacagcagcagatgaacaaaaataaaaatacaaaaggccggaggaaag

SEQ ID NO: 356047 - DNA, 1694 bp, Homo sapiens
gggaggtgcctgaatagggtttgagggtctgtttgagttgggtgaagaaggcgggaagttaatcctcttccaatcagctccccatctcgccctctggcggctccggaccacaggccgagttactctgattaccgccatgctccaagacccgcactgacagtccccacgtgagggaccgcggtgggagtcctaaatgggggaggaggggacgggcggcactgtgcatctgctgtgcctcgcggcctccagcggggtccccctattctgcaggagcagtcgcggcggcgcccccgcccgtcagcagctcccgttctctgtcatcggttccctcaatggagtccacatgtttgggcagaatctggaggtgcagctgagctctgcgaggaccgagaacacgactgtgcatcaccctcattgttctgtcatctgaggtgggcatctctgagctgaggctggagagactactccaaatggtgtttggagccatggtccttcttgtgggacttgaagaactgaccaatatccgcaacgtggagagactgaagaaggacttgagggccagttattgcctcatcgacagcttcctgggggactcggagctcatcggggacctgacccagtgtgtggactgcgtgattcctccagaggggtccctcttgcaggaagccctctccgggttcgctgaggccgcgggcacgaccttcgtcagtctggtggtgtccggccgggtggtggcagcaacagagggttggtggcggctggggacgcccgaggccgtgctgctcccctggctggtggggtccctgccgccgcagaccgctcgcgactacccggtgtacctgccgcacgggagccccacggtcccacaccggctcctgaccctgactctgctgccgagcctggagctgtgtctactctgcgggccgagcccacccctcagccagttgtatccacagcttctggagcgctggtggcagccactgctggacccgttgcgggcctgtctgccgttgggaccccgggcgctgcccagtggcttcccccttcacacagacatcctcgggctgctgctcctccacctggaactgaagcgctgcctcttcaccgtggagcccttgggggataaagagccttcaccagaacagcgccggcgcctcctccgaaacttctataccctggtcacctccacgcacttcccaccagagccagggccaccagagaagacagaagatgaggtctaccaggcccagctgcccagagcttgctacctggtgttggggactgaggaaccaggcacaggagtgcgtctggtggccttgcagctggggcttcggcggctgctgctgctgctgtctccccagagtcccacccatgggctgcgaagcctggccacccacactctgcatgccctcaccccacttctttgactacctagcagtgggtgatggacacagacatggggctgttagcgtctctctgtttattcgctcacaataatacacagcccctggatggggagggggtaggaggggctacaacagggtggggtgggaggggaggagacatccacttccctggcccctctcccctctgtgcttgggggggaaagggagggagggggactccccctaaccccccagaatgtaaacagcagcagatgaacaaaaataaaaatacaaaaggccggaggaaag

SEQ ID NO: 356048 - DNA, 1741 bp, Homo sapiens
gggaggtgcctgaatagggtttgagggtctgtttgagttgggtgaagaaggcgggaagttaatcctcttccaatcagctccccatctcgccctctggcggctccggaccacaggccgagttactctgattaccgccatgctccaagacccgcactgacagtccccacgtgagggaccgcggtgggagtcctaaatgggggaggaggggacgggcggcactgtgcatctgctgtgcctcgcggcctccagcggggtccccctattctgcaggagcagtcgcggcggcgcccccgcccgtcagcagctcccgttctctgtcatcggttccctcaatggagtccacatgtttgggcagaatctggaggtgcagctgagctctgcgaggaccgagaacacgactgtggtgtggaaaagcttccatgacagcatcaccctcattgttctgtcatctgaggtgggcatctctgagctgaggctggagagactactccaaatggtgtttggagccatggtccttcttgtgggacttgaagaactgaccaatatccgcaacgtggagagactgaagaaggacttgagggctggtcccttcttcctctcctaggccagttattgcctcatcgacagcttcctgggggactcggagctcatcggggacctgacccagtgtgtggactgcgtgattcctccagaggggtccctcttgcaggaagccctctccgggttcgctgaggccgcgggcacgaccttcgtcagtctggtggtgtccggccgggtggtggcagcaacagagggttggtggcggctggggacgcccgaggccgtgctgctcccctggctggtggggtccctgccgccgcagaccgctcgcgactacccggtgtacctgccgcacgggagccccacggtcccacaccggctcctgaccctgactctgctgccgagcctggagctgtgtctactctgcgggccgagcccacccctcagccagttgtatccacagcttctggagcgctggtggcagccactgctggacccgttgcgggcctgtctgccgttgggaccccgggcgctgcccagtggcttcccccttcacacagacatcctcgggctgctgctcctccacctggaactgaagcgctgcctcttcaccgtggagcccttgggggataaagagccttcaccagaacagcgccggcgcctcctccgaaacttctataccctggtcacctccacgcacttcccaccagagccagggccaccagagaagacagaagatgaggtctaccaggcccagctgcccagagcttgctacctggtgttggggactgaggaaccaggcacaggagtgcgtctggtggccttgcagctggggcttcggcggctgctgctgctgctgtctccccagagtcccacccatgggctgcgaagcctggccacccacactctgcatgccctcaccccacttctttgactacctagcagtgggtgatggacacagacatggggctgttagcgtctctctgtttattcgctcacaataatacacagcccctggatggggagggggtaggaggggctacaacagggtggggtgggaggggaggagacatccacttccctggcccctctcccctctgtgcttgggggggaaagggagggagggggactccccctaaccccccagaatgtaaacagcagcagatgaacaaaaataaaaatacaaaaggccggaggaaag

SEQ ID NO: 356049 - DNA, 1834 bp, Homo sapiens
gggaggtgcctgaatagggtttgagggtctgtttgagttgggtgaagaaggcgggaagttaatcctcttccaatcagctccccatctcgccctctggcggctccggaccacaggccgagttactctgattaccgccatgctccaagacccgcactgacagtccccacgtgagggaccgcggtgggagtcctaaatgggggaggaggggacgggcggcactgtgcatctgctgtgcctcgcggcctccagcggggtccccctattctgcaggagcagtcgcggcggcgcccccgcccgtcagcagaatctggaggtgcagctgagctctgcgaggaccgagaacacgactgtggtgtggaaaagcttccatgacaggtccccaggagggaacgtgggacagggacagggcctgggtgatagtccctgttgaagatgaccccggaggccttccagctctctaaaagcagctgttaatttggctatgggatctttagcaagccagttaccctctttgatccctgatgttctctataagaaaggcagcatcaccctcattgttctgtcatctgaggtgggcatctctgagctgaggctggagagactactccaaatggtgtttggagccatggtccttcttgtgggacttgaagaactgaccaatatccgcaacgtggagagactgaagaaggacttgagggccagttattgcctcatcgacagcttcctgggggactcggagctcatcggggacctgacccagtgtgtggactgcgtgattcctccagaggggtccctcttgcaggaagccctctccgggttcgctgaggccgcgggcacgaccttcgtcagtctggtggtgtccggccgggtggtggcagcaacagagggttggtggcggctggggacgcccgaggccgtgctgctcccctggctggtggggtccctgccgccgcagaccgctcgcgactacccggtgtacctgccgcacgggagccccacggtcccacaccggctcctgaccctgactctgctgccgagcctggagctgtgtctactctgcgggccgagcccacccctcagccagttgtatccacagcttctggagcgctggtggcagccactgctggacccgttgcgggcctgtctgccgttgggaccccgggcgctgcccagtggcttcccccttcacacagacatcctcgggctgctgctcctccacctggaactgaagcgctgcctcttcaccgtggagcccttgggggataaagagccttcaccagaacagcgccggcgcctcctccgaaacttctataccctggtcacctccacgcacttcccaccagagccagggccaccagagaagacagaagatgaggtctaccaggcccagctgcccagagcttgctacctggtgttggggactgaggaaccaggcacaggagtgcgtctggtggccttgcagctggggcttcggcggctgctgctgctgctgtctccccagagtcccacccatgggctgcgaagcctggccacccacactctgcatgccctcaccccacttctttgactacctagcagtgggtgatggacacagacatggggctgttagcgtctctctgtttattcgctcacaataatacacagcccctggatggggagggggtaggaggggctacaacagggtggggtgggaggggaggagacatccacttccctggcccctctcccctctgtgcttgggggggaaagggagggagggggactccccctaaccccccagaatgtaaacagcagcagatgaacaaaaataaaaatacaaaaggccggaggaaag

SEQ ID NO: 356050 - DNA, 1604 bp, Homo sapiens
gggaggtgcctgaatagggtttgagggtctgtttgagttgggtgaagaaggcgggaagttaatcctcttccaatcagctccccatctcgccctctggcggctccggaccacaggccgagttactctgattaccgccatgctccaagacccgcactgacagtccccacctcccgttctctgtcatcggttccctcaatggagtccacatgtttgggcagaatctggaggtgcagctgagctctgcgaggaccgagaacacgactgtggtgtggaaaagcttccatgacagcatcaccctcattgttctgtcatctgaggtgggcatctctgagctgaggctggagagactactccaaatggtgtttggagccatggtccttcttgtgggacttgaagaactgaccaatatccgcaacgtggagagactgaagaaggacttgagggctggtcccttcttcctctcctaggccagttattgcctcatcgacagcttcctgggggactcggagctcatcggggacctgacccagtgtgtggactgcgtgattcctccagaggggtccctcttgcaggaagccctctccgggttcgctgaggccgcgggcacgaccttcgtcagtctggtggtgtccggccgggtggtggcagcaacagagggttggtggcggctggggacgcccgaggccgtgctgctcccctggctggtggggtccctgccgccgcagaccgctcgcgactacccggtgtacctgccgcacgggagccccacggtcccacaccggctcctgaccctgactctgctgccgagcctggagctgtgtctactctgcgggccgagcccacccctcagccagttgtatccacagcttctggagcgctggtggcagccactgctggacccgttgcgggcctgtctgccgttgggaccccgggcgctgcccagtggcttcccccttcacacagacatcctcgggctgctgctcctccacctggaactgaagcgctgcctcttcaccgtggagcccttgggggataaagagccttcaccagaacagcgccggcgcctcctccgaaacttctataccctggtcacctccacgcacttcccaccagagccagggccaccagagaagacagaagatgaggtctaccaggcccagctgcccagagcttgctacctggtgttggggactgaggaaccaggcacaggagtgcgtctggtggccttgcagctggggcttcggcggctgctgctgctgctgtctccccagagtcccacccatgggctgcgaagcctggccacccacactctgcatgccctcaccccacttctttgactacctagcagtgggtgatggacacagacatggggctgttagcgtctctctgtttattcgctcacaataatacacagcccctggatggggagggggtaggaggggctacaacagggtggggtgggaggggaggagacatccacttccctggcccctctcccctctgtgcttgggggggaaagggagggagggggactccccctaaccccccagaatgtaaacagcagcagatgaacaaaaataaaaatacaaaaggccggaggaaag

SEQ ID NO: 356051 - DNA, 267 bp, Homo sapiens
gtgtggaaaagcttccatgacaggtccccaggagggaacgtgggacagggacagggcctgggtgatagtccctgttgaagatgaccccggaggccttccagctctctaaaagcagctgttaatttggctatgggatctttagcaagccagttaccctctttgatccctgatgttctctataagaaaggcaggttggtctgagagaggatgtatctggtgttctaggatcaatgggcggactccaacataccccttcctgattcccca

SEQ ID NO: 356052 - DNA, 1004 bp, Homo sapiens
  misc_feature (885)..(885): n is a, c, g, or t
  misc_feature (892)..(892): n is a, c, g, or t
gggaggtgcctgaatagggtttgagggtctgtttgagttgggtgaagaaggcgggaagttaatcctcttccaatcagctccccatctcgccctctggcggctccggaccacaggccgagttactctgattaccgccatgctccaagacccgcactgacagtccccacctcccgttctctgtcatcggttccctcaatggagtccacatgtttgggcagaatctggaggtgcagctgagctctgcgaggaccgagaacacgactgtggtgtggaaaagcttccatgacagcatcaccctcattgttctgtcatctgaggtgggcatctctgagctgaggctggagagactactccaaatggtgtttggagccatggtccttcttgtgggacttgaagaactgaccaatatccgcaacgtggagagactgaagaaggacttgagggccagttattgcctcatcgacagcttcctgggggactcggagctcatcggggacctgacccagtgtgtggactgcgtgattcctccagaggggtccctcttgcaggaagccctctccgggttcgctgaggccgcgggcacgaccttcgtcagtctggtggtgtccggccgggtggtggcagcaacagagggttggtggcggctggggacgcccgaggccgtgctgctcccctggctggtggggtccctgccgccgcagaccgctcgcgactacccggtgtacctgccgcacgggagccccacggtcccacaccggctcctgaccctgactctgctgccgagcctggagctgtgtctactctgcgggccgagcccacccctcagccagttgtatccacagttctggagcgctggggagcatgtggaccgttggggcctgttgncgtgggnccggctgccaggttcccttacagaattcggggggctccggagggggcttccggcttgggaaggccacagcggcccaatacggctcccaccgccgaaagttcgctttggggaa

SEQ ID NO: 356053 - DNA, 1609 bp, Homo sapiens
gggaggtgcctgaatagggtttgagggtctgtttgagttgggtgaagaaggcgggaagttaatcctcttccaatcagctccccatctcgccctctggcggctccggaccacaggccgagttactctgattaccgccatgctccaagacccgcactgacagtccccacgtgagggaccgcggtgggagtcctaaatgggggaggaggggacgggcggcactgtgcatctgctgtgcctcgcggcctccagcggggtccccctattctgcaggagcagtcgcggcggcgcccccgcccgtcagcagctcccgttctctgtcatcggttccctcaatggagtccacatgtttgggcagaatctggaggtgcagctgagctctgcgaggaccgagaacacgactgtggtccttcttgtgggacttgaagaactgaccaatatccgcaacgtggagagactgaagaaggacttgagggccagttattgcctcatcgacagcttcctgggggactcggagctcatcggggacctgacccagtgtgtggactgcgtgattcctccagaggggtccctcttgcaggaagccctctccgggttcgctgaggccgcgggcacgaccttcgtcagtctggtggtgtccggccgggtggtggcagcaacagagggttggtggcggctggggacgcccgaggccgtgctgctcccctggctggtggggtccctgccgccgcagaccgctcgcgactacccggtgtacctgccgcacgggagccccacggtcccacaccggctcctgaccctgactctgctgccgagcctggagctgtgtctactctgcgggccgagcccacccctcagccagttgtatccacagcttctggagcgctggtggcagccactgctggacccgttgcgggcctgtctgccgttgggaccccgggcgctgcccagtggcttcccccttcacacagacatcctcgggctgctgctcctccacctggaactgaagcgctgcctcttcaccgtggagcccttgggggataaagagccttcaccagaacagcgccggcgcctcctccgaaacttctataccctggtcacctccacgcacttcccaccagagccagggccaccagagaagacagaagatgaggtctaccaggcccagctgcccagagcttgctacctggtgttggggactgaggaaccaggcacaggagtgcgtctggtggccttgcagctggggcttcggcggctgctgctgctgctgtctccccagagtcccacccatgggctgcgaagcctggccacccacactctgcatgccctcaccccacttctttgactacctagcagtgggtgatggacacagacatggggctgttagcgtctctctgtttattcgctcacaataatacacagcccctggatggggagggggtaggaggggctacaacagggtggggtgggaggggaggagacatccacttccctggcccctctcccctctgtgcttgggggggaaagggagggagggggactccccctaaccccccagaatgtaaacagcagcagatgaacaaaaataaaaatacaaaaggccggaggaaag

SEQ ID NO: 356054 - DNA, 1580 bp, Homo sapiens
gggaggtgcctgaatagggtttgagggtctgtttgagttgggtgaagaaggcgggaagttaatcctcttccaatcagctccccatctcgccctctggcggctccggaccacaggccgagttactctgattaccgccatgctccaagacccgcactgacagtccccacctcccgttctctgtcatcggttccctcaatggagtccacatgtttgggcagaatctggaggtgcagctgagctctgcgaggaccgagaacacgactgtggtgtggaaaagcttccatgacagcatcaccctcattgttctgtcatctgaggtgggcatctctgagctgaggctggagagactactccaaatggtgtttggagccatggtccttcttgtgggacttgaagaactgaccaatatccgcaacgtggagagactgaagaaggacttgagggccagttattgcctcatcgacagcttcctgggggactcggagctcatcggggacctgacccagtgtgtggactgcgtgattcctccagaggggtccctcttgcaggaagccctctccgggttcgctgaggccgcgggcacgaccttcgtcagtctggtggtgtccggccgggtggtggcagcaacagagggttggtggcggctggggacgcccgaggccgtgctgctcccctggctggtggggtccctgccgccgcagaccgctcgcgactacccggtgtacctgccgcacgggagccccacggtcccacaccggctcctgaccctgactctgctgccgagcctggagctgtgtctactctgcgggccgagcccacccctcagccagttgtatccacagcttctggagcgctggtggcagccactgctggacccgttgcgggcctgtctgccgttgggaccccgggcgctgcccagtggcttcccccttcacacagacatcctcgggctgctgctcctccacctggaactgaagcgctgcctcttcaccgtggagcccttgggggataaagagccttcaccagaacagcgccggcgcctcctccgaaacttctataccctggtcacctccacgcacttcccaccagagccagggccaccagagaagacagaagatgaggtctaccaggcccagctgcccagagcttgctacctggtgttggggactgaggaaccaggcacaggagtgcgtctggtggccttgcagctggggcttcggcggctgctgctgctgctgtctccccagagtcccacccatgggctgcgaagcctggccacccacactctgcatgccctcaccccacttctttgactacctagcagtgggtgatggacacagacatggggctgttagcgtctctctgtttattcgctcacaataatacacagcccctggatggggagggggtaggaggggctacaacagggtggggtgggaggggaggagacatccacttccctggcccctctcccctctgtgcttgggggggaaagggagggagggggactccccctaaccccccagaatgtaaacagcagcagatgaacaaaaataaaaatacaaaaggccggaggaaag

SEQ ID NO: 356055 - DNA, 1885 bp, Homo sapiens
gggaggtgcctgaatagggtttgagggtctgtttgagttgggtgaagaaggcgggaagttaatcctcttccaatcagctccccatctcgccctctggcggctccggaccacaggccgagttactctgattaccgccatgctccaagacccgcactgacagtccccacgtgagggaccgcggtgggagtcctaaatgggggaggaggggacgggcggcactgtgcatctgctgtgcctcgcggcctccagcggggtccccctattctgcaggagcagtcgcggcggcgcccccgcccgtcagcagctcccgttctctgtcatcggttccctcaatggagtccacatgtttgggcagaatctggaggtgcagctgagctctgcgaggaccgagaacacgactgtggtgtggaaaagcttccatgacaggtccccaggagggaacgtgggacagggacagggcctgggtgatagtccctgttgaagatgaccccggaggccttccagctctctaaaagcagctgttaatttggctatgggatctttagcaagccagttaccctctttgatccctgatgttctctataagaaaggcagcatcaccctcattgttctgtcatctgaggtgggcatctctgagctgaggctggagagactactccaaatggtgtttggagccatggtccttcttgtgggacttgaagaactgaccaatatccgcaacgtggagagactgaagaaggacttgagggccagttattgcctcatcgacagcttcctgggggactcggagctcatcggggacctgacccagtgtgtggactgcgtgattcctccagaggggtccctcttgcaggaagccctctccgggttcgctgaggccgcgggcacgaccttcgtcagtctggtggtgtccggccgggtggtggcagcaacagagggttggtggcggctggggacgcccgaggccgtgctgctcccctggctggtggggtccctgccgccgcagaccgctcgcgactacccggtgtacctgccgcacgggagccccacggtcccacaccggctcctgaccctgactctgctgccgagcctggagctgtgtctactctgcgggccgagcccacccctcagccagttgtatccacagcttctggagcgctggtggcagccactgctggacccgttgcgggcctgtctgccgttgggaccccgggcgctgcccagtggcttcccccttcacacagacatcctcgggctgctgctcctccacctggaactgaagcgctgcctcttcaccgtggagcccttgggggataaagagccttcaccagaacagcgccggcgcctcctccgaaacttctataccctggtcacctccacgcacttcccaccagagccagggccaccagagaagacagaagatgaggtctaccaggcccagctgcccagagcttgctacctggtgttggggactgaggaaccaggcacaggagtgcgtctggtggccttgcagctggggcttcggcggctgctgctgctgctgtctccccagagtcccacccatgggctgcgaagcctggccacccacactctgcatgccctcaccccacttctttgactacctagcagtgggtgatggacacagacatggggctgttagcgtctctctgtttattcgctcacaataatacacagcccctggatggggagggggtaggaggggctacaacagggtggggtgggaggggaggagacatccacttccctggcccctctcccctctgtgcttgggggggaaagggagggagggggactccccctaaccccccagaatgtaaacagcagcagatgaacaaaaataaaaatacaaaaggccggaggaaag

SEQ ID NO: 356056 - DNA, 1098 bp, Homo sapiens
  misc_feature (19)..(19): n is a, c, g, or t
tacggctaggtacgaggcngggtgtgtgtggactgcgtgattcctccagaggggtccctcttgcaggaagccctctccgggttcgctgaggccgcgggcacgaccttcgtcagtctggtggtgtccggccgggtggtggcagcaacagagggttggtggcggctggggacgcccgaggccgtgctgctcccctggctggtggggtccctgccgccgcagaccgctcgcgactacccggtgtacctgccgcacgggagccccacggtcccacaccggctcctgaccctgactctgctgccgagcctggagctgtgtctactctgcgggccgagcccacccctcagccagttgtatccacagcttctggagcgctggtggcagccactgctggacccgttgcgggcctgtctgccgttgggaccccgggcgctgcccagtggcttcccccttcacacagacatcctcgggctgctgctcctccacctggaactgaagcgctgcctcttcaccgtggagcccttgggggataaagagccttcaccagaacagcgccggcgcctcctccgaaacttctataccctggtcacctccacgcacttcccaccagagccagggccaccagagaagacagaagatgaggtctaccaggcccagctgcccagagcttgctacctggtgttggggactgaggaaccaggcacaggagtgcgtctggtggccttgcagctggggcttcggcggctgctgctgctgctgtctccccagagtcccacccatgggctgcgaagcctggccacccacactctgcatgccctcaccccacttctttgactacctagcagtgggtgatggacacagacatggggctgttagcgtctctctgtttattcgctcacaataatacacagcccctggatggggagggggtaggaggggctacaacagggtggggtgggaggggaggagacatccacttccctggcccctctcccctctgtgcttgggggggaaagggagggagggggactccccctaaccccccagaatgtaaacagcagcagatgaacaaaaataaaaatacaaaaggccggaggaaag

SEQ ID NO: 356057 - DNA, 1053 bp, Homo sapiens
  misc_feature (23)..(23): n is a, c, g, or t
  misc_feature (41)..(41): n is a, c, g, or t
aagaataggctagtacgaggctngtgttaatcggccgaggntgaggccgcgggcacgaccttcgtcagtctggtggtgtccggccgggtggtggcagcaacagagggttggtggcggctggggacgcccgaggccgtgctgctcccctggctggtggggtccctgccgccgcagaccgctcgcgactacccggtgtacctgccgcacgggagccccacggtcccacaccggctcctgaccctgactctgctgccgagcctggagctgtgtctactctgcgggccgagcccacccctcagccagttgtatccacagcttctggagcgctggtggcagccactgctggacccgttgcgggcctgtctgccgttgggaccccgggcgctgcccagtggcttcccccttcacacagacatcctcgggctgctgctcctccacctggaactgaagcgctgcctcttcaccgtggagcccttgggggataaagagccttcaccagaacagcgccggcgcctcctccgaaacttctataccctggtcacctccacgcacttcccaccagagccagggccaccagagaagacagaagatgaggtctaccaggcccagctgcccagagcttgctacctggtgttggggactgaggaaccaggcacaggagtgcgtctggtggccttgcagctggggcttcggcggctgctgctgctgctgtctccccagagtcccacccatgggctgcgaagcctggccacccacactctgcatgccctcaccccacttctttgactacctagcagtgggtgatggacacagacatggggctgttagcgtctctctgtttattcgctcacaataatacacagcccctggatggggagggggtaggaggggctacaacagggtggggtgggaggggaggagacatccacttccctggcccctctcccctctgtgcttgggggggaaagggagggagggggactccccctaaccccccagaatgtaaacagcagcagatgaacaaaaataaaaatacaaaaggccggaggaaag

SEQ ID NO: 356058 - DNA, 9654 bp, Homo sapiens
ccaagaattcggcacgagggcctgctgcactcggccttcttcggggaccagacgctgcaggagctgaagatggcgagctccgtggcgccctacgagcagctggtgaggcaggtggaggccttgaaggctgagaacagccacctgaggcaggagctaagggacaactccagccacctgtccaagctggagacagagacgtcgggcatgaaggaggtcctgaagcacctacagggaaaactggagcaggaggcccgagtgctggtgtcctcggggcagacggaggtgctggagcagctgaaggccctacagatggacatcaccagcctgtacaacctcaagttccagccgcccaccctgggcccggagcctgccgcccggacccccgagggcagcccagtacacggctccgggccctccaaggacagctttggggagctgagccgggccaccatccggctgctggaggaactggaccgggaacggtgtttcctgctgaatgagattgagaaggaggagaaggagaagctctggtactactctcagctgcagggcctgtccaagcgcctggacgaagctgctgcaggttgactatgagatgcacaagatgacccgggacccgctgaacctggcgctgcgccgctacgcgggcatgaccctcaccaacctcacctttggggacgttgccaacaaggccaccctgtgtgcgcgccgcggctgcatggaggccatcgtggcccagctggcctccgacagtgaggagctccaccaggtggtgtccagcatccttcggaacttgtcctggagggccgacatcaacagcaagaaggtgctgagggaggcgggcagcgtgactgccctggtgcagtgtgtcctgcgggccaccaaggagtccaccctgaagagcgtgctgagcgccctgtggaatctgtctgcacacagcacagagaacaaggcggccatctgccaggtggatggcgccctgggcttcctggtgagcaccctgacctacaagtgtcagagcaactcgctggccatcatcgagagcggcggcggcatcctccgcaatgtgtccagcctcgtcgccacccgtgaggactacaggcaggtgctccgggatcacaactgtctgcagacgctgctgcagcatctgacttcgcacagcctgaccatcgtgagcaacgcgtgcggcacgctctggaacctgtcggcccgcagcgcccgtgaccaggagctgctgtgggacctgggcgccgtgggcatgctgcgtaatctggtgcactccaagcacaagatgatcgccatgggcagcgccgccgccctgcgcaacctgctggcccatcggcccgccaagcaccaggcggccgccaccgccgtgtccccaggcagctgcgtgcccagcctgtacgtgcgcaagcagcgggcgctggaggccgagctggacgcacggcacctcgcgcaggcgctggagcacctggagaagcagggcccgccggcagccgaggccgccactaagaagccgctgccgcccctgcgacacctggacggcctggcccaagactatgcttccgattcgggctgctttgacgacgacgatgcaccgtcatccctggctgcggccgcggccaccggggagccagccagccctgccgcgctgtccctcttcctgggcagccccttcctgcaggggcaggcgctggctcgcaccccgcccacccgccgaggcggcaaggaggcagagaaggacaccagtggggaggcagccgtggcggccaaggccaaggccaagctggcgcttgcagtggcgcgcatcgaccagctggtggaggacatctccgccctgcacacctcgtccgacgatagcttcagcctcagctctggagacccgggacaggaggcgccacgggagggccgcgcccagtcctgctcgccatgccgcggcccggagggcgggcggcgagaggcaggaagccgggcgcacccgctgctgcggctcaaggcggcccacgccagcctctccaacgacagcctcaacagcggcagtgccagcgacgggtactgcccacgcgaacatatgctgccctgcccgctggccgcactggcttcgcgccgcgaggaccccaggtgtgggcagcctcggcccagccggcttgaccttgacctgcccggctgccaggccgagcccccggcccgcgaggccacctccgccgacgcccgcgtgcgcaccatcaagctgtcgcctacctatcagcacgtgccactgcttgagggtgcctcaagggcgggtgcagagcccctcgcggggcctggaatctctccaggggcccggaagcaggcctggctgccggcagaccacctgagcaaggttcccgagaagctggcggctgccccgctgtctgtggccagcaaggcactgcagaaactggcggcgcaagaggggccactctcgctgtcccgatgcagctccctttcctcgctgtcctcggccggccgcccaggccccagcgagggtggtgacctggatgacagtgactcctccctggaggggctggaggaggccggccccagcgaggctgagctggacagcacgtggcgggcgcccggggccacctcgctgcccgtagccattccggctccccggcgtaaccgaggccggggcctgggggtggaagacgccacgccgtccagctcgtcggagaactacgtgcaggagacaccgcttgtgctgagccgctgcagctctgtgagctcgctgggcagcttcgagagcccgtccatcgccagctccatccccagtgaaccttgcagcgggcagggcagcggcaccatcagccctagcgagctgcccgacagccccggacagaccatgcctcccagccggagcaagacgccaccgctggcgcccgcgccacagggtccccccgaggccacccagttcagcctgcagtgggagagctacgtgaagcgcttcctggacatcgccgactgccgggagcgctgccggctgccatctgagctggacgcaggcagcgtgcgctttaccgtggagaagccagacgagaacttctcgtgcgcctccagcctcagcgcgctggccttgcacgagcactacgtgcagcaggacgtggagctgcggctgctgccctcggcctgccccgagcgcggcgggggcgccgggggcgccggcctccactttgcagggcaccggcggcgggaggaggggccggcgcccacgggttctcgccctcgcggcgccgcggaccaggagctggaactgctgcgggagtgcctgggagccgccgtgcctgcccggctgcgcaaggtggcctccgcgctggtgccaggtcgccgcgcactccccgtgcccgtctacatgttggtgcccgccccggccccggcccaggaggacgactcctgcactgactccgcggagggcacgccggtcaacttctctagcgccgcctcgctcagcgacgagacgctgcagggaccccccagggaccagcccgggggaccagcgggcaggcaaagacccaccggccgccccacctctgccagacaggccatggggcaccggcacaaggcgggaggcgccggccgcagcgcggagcagtctcggggcgcgggcaagaaccgagcagggctggagctgcccctgggccggcccccgagcgcccccgcagacaaggacggctcaaagcccggccggacccgcggggacggggcgctccagtcgctgtgcctcacgacgcccactgaggaggccgtgtactgcttctacggcaacgactcggacgaggagcccccggcggccgcgcccacgccaacccaccggcgcacatcggccatccctcgcgcttttacgcgggagcgtccgcagggccggaaggaggcccctgccccgtccaaggctgcaccagctgccccgccgcccgcccggacccagcccagcctcattgctgacgagaccccgccctgctactccctgagctcctccgccagctccctcagcgagcccgagccctcggagccgccggccgtccatccacgaggccgggagcccgcggtcaccaaggacccgggcccaggaggcggacgcgacagctcgcccagcccgcgggccgcggaggagcttctgcagcggtgcatcagctcggccctgcccaggcgccggccccccgtgtctggcctgcggcgccgcaagccccgagccacccggctggatgagcggcccgcagaggggtcccgggaacgcggcgaggaggcagcgggctcggaccgggcctccgacctggatagcgtggagtggcgcgccatccaggagggcgccaattcaattgtcacgtggctgcaccaggcagcagctgccacgcgggaggcctcgtccgagtccgactccatcctgtccttcgtatccgggctgtcagtgggatccaccctacagccccccaagcacaggaagggacgacaggcggagggagaaatgggcagtgcccggcggccagagaaaaggggcgcagcctcagtcaagaccagcgggagcccccgttcccctgcaggccccgagaagccacgtggcacacagaagaccacgcccggggtgccagctgtgctccggggacgaacagtgatctacgtccccagcccggcaccccgtgcccagcccaaagggacccccggcccccgcgccacaccgcggaaggtggcgcccccttgcctggcacagcccgcggctccagccaaagtcccgagccccgggcagcagcggtcgcggagcctacaccggcctgccaagacctcggagctggcgacgctgagccagccccccagaagcgccacaccgcccgcccgcctcgccaagaccccctcctccagctcctcccagacctcgcccgcctcccagcccctgcccagaaagcgccccccggtcacccaggctgctggggccctgcccggccccggagcctccccggtgcccaaaacgccggcgcgcacccttctggcgaagcagcacaagacgcagagatcgcccgtgcggatcccgttcatgcagaggccggcccggcgtgggccgccaccgctggctcgggcagtcccggagccgggccccaggggccgggcggggaccgaggcgggcccgggggcgcgcgggggccgcctgggcctggtgcgtgtggcctcagccctctccagcggcagcgagtcctccgaccgctcgggcttccggcgacagctaaccttcatcaaggagtcgccgggcttgcggcgccgccgctccgagctgtcctcggccgagtccgcggcctctgccccccagggcgcctcgccccgccgcggccggcccgcgctgcccgccgtcttcctctgctcctcgcgctgcgaagagctccgagcggcaccccggcagggcccggccccggcccggcagcggccccccgcggcccgacccagccctggcgagcgccctgcccggcgcaccacctccgagagcccgtcccgcctgcctgtgcgcgcgcccgccgcccggccggagactgtcaagcgctacgcgtcgctgccgcacatcagcgtggcccgcaggcccgacggcgccgtccccgcggcccctgcctcagccgacgccgcgcgccgcagcagcgacggggagccccggccgctccccagggtggccgcgccgggcacgacctggcggcgcatccgagatgaggacgtgccccacatcctgcgcagcacgcttcccgccacggccctgccactgcggggctccacgcccgaggacgccccggccgggcccccgccgcgcaagaccagcgacgccgtggtccagaccgaggaggtcgccgcccccaagaccaactccagcacgtccccgagcctggagaccagggagccccccggggcccccgccggcggccagctctccctcctcggcagcgacgtggacggtcccagcctcgccaaggctcccatctccgcacccttcgtgcacgagggcctgggggtcgccgtggggggcttccccgccagccggcacggctcccccagccgctcggcccgagtaccccccttcaactatgtgcccagccccatggtggtcgcagccaccaccgactcggccgcggagaaagccccggccactgcctccgccaccctcctggaatagtggcctaggccggccttctggaacgttctctcccggccctgcggcgcggtctggctgccccatgggcctgcgctgtagacgtcccccataggtcgccccagggcctctgcccacccgagccccaccactctcagaacccccgcccagcgcacggcgacctcgcgcctcaccggaagaccttgcctctgtgccgcggaggtccaggaggaaacggggcggccgctaggcctcaagtcccgaccgtggagcgctggcaagggcgtcctggcccagccctgagcgcgcggcccttcccctgtcggaagccgttgcttgaccccgggcgagggaggcggtagcctccgggtccgggtctgggtctgggtccgctgcttcgcagggacagcgctggggaggtgacggcgcccgccgcaggtggggcgaggctgggggagggcggcgccgcggcgggcctgccagctgggggcctttgcggcgcgcaggggcgaagcctgtaatcactgcagccgccggtaattcgctaatgagggctttgcagggattgttttcattctcagccccagctgtgggagtgcgggtgggggtgtggccgagccccggcaggaagccccgcccagacggtgttcagggaacccggagcccaagcgctccggcggagcccaaaagggtgggggtgggaggggcagaggccaacggatccccctgcctgtcgcaccccttggcgggagacgggaaggcagcgggctgcgtacgatgggaccctggtgcagacgccgggccggctgacatttggaccccatcccagaggagatgctggctaccagctggggcgaccccaagggtcgctggagtcagtatcggcccggcgcagccgcggcgggcgaggccaatggaaaggagactgaggggagtcccggcagtgagcccgaggccctgggacctggagcccgcgctggcctctccccagcggagcctgcacgttacggagaccatcacatgtgggcgtggtcagtgcccaggaccgcaccgctgctcatcttgtcccttttcaattcccttctggttcatgatgcataaagcgctaggccctagaactccagaaacagcacagctggggcggggacccagccttgccctccacccgaggctctgggacaaggcgggaggttcgggggccttccggcaggtgaacgcagggctggagagtatttggtgccagatgaggtgaaagcttatagaagggcctgaggggctcggctgcctcatcccctggcgggggaggctgggagctgggcctcctgcgtggggtgggactcgcaggggccgggtctccgtgactggggcaacgcctcgtcctgcagagggagccgacgacctcttttctgcagaaaagctccagcaggcgctgccttcacccacggatctgcccaggctgaaggcacacgctcaatgccccacgtgccttctccaggaggaacgaagcagggtttgagggttgggtggatggagctcagaaggaaaccccagccccaccacggatgacaccatccctcccgtcccatccccagcatgggcaaggccagcctttctggcagaaggagctgtcctcaactcagggccgctgtgagcaaagctgaccccagcccccacccccagttaacactgctgcttctctgaatgcatgtcacgctgcaccccatgctccgggcccacaccctgcaggacaaggagctccagacaggacgtccataagtcaccgaggtgtgccacccagcaggtgctggaggtgcccaatgctccctcctaggacctcgcagccaggcaaggctgtcaggttgttttgggggaagagggggtcatggatggctgagcagagagcggggaaaatgcaggctgagtggggcgacctcctgcctgccaggagccccctttcaggacacagcgggggtctcacacttgctgtccccatccatggcccgagggggaacctggtggtctcttctgagcttttggacttggggatgccaaacacgtgctcaccctcacactcgccccggcccgctgcgcccctaattgccaaagggtagggaaatggcgaagccagccaccaggtcgctggtgacagggccagggttatgcaggaaggtggtgcggcattgccttccacatatgtaagtctctgggcggcgccctcccagctccctgcctctgtttccccatgtgggccgtggggaactcccagagctacctcttgggggagcgtggtggcagcgatgatggggagacgcctggaagctcacagaacttgggtctggctggctcctgcccgtgacgccttgcccagcagcaaggtgcgcaacatggctgccagccccgcctcccacccccaccccgagtcctgagctcactttcgccttctccatcccctgccgtgggggccacagccacacctcaccgcccagtccagctgtctccagaaggggacaggcagtccgcggtctctggacaatcaactcaaggtacgcccactgcaaggcctccctcccaccgcggcccctgcctggccacctggcctctctgcaccagggtgacaaggggtcctcgtctgccccccaatgctccagggccagtcctaaggagctgagggtctgaggacgcagggagggtggaggtgtcctgaggctgatggacagtgaccgccactggcccccaacatgaccacacgtgggtgctgaactcggggcgccgtgcccaccggcatggtcctcccgagctccgacagcattacctcacccggccccatctgttgccccggtccagccctgatggcgcgcgcctggtctgtctgattcccctagccgccaccccacgtttctgtaccgggtctctgcagtgttaaacggacgtgtaaatagtggtaaatagtgaaagcctgtccttccctaaatgtaaagccatctgtccggcgtaaggacgacaccgtcagctgtccgactcgcacacatttaataaactgagctcttgcattgaaaaaaaaaaaaaaaaaaacaaaaaaaacacaaaaacaaaaaaagaaaaacaaaatacacagagagacacaaacacaaacaataaaacaaacaaaaaaaaaaccaggagggagcggcaggaaagacaacaaaacacgccaggagaagagaaaaaacaaaagaaagacgaaaaagaagaaggagaacaaagacaagaaacgcaccacacaaaaaagaaagaacactaaacacaaagaaaacaagaacagacgaagaacaggagagaaaaaaaaagagcagagcagagggaaagagaaacaacaaagacactcaggaacgaacggagagaaaccacggggaggagagaagacacgaagacaaaaacaccaggagccgggggaggacagaaaacaacaaaagaagcaaacagaacatacaccagcagaagcaagaggaaacacaagcaagagcagagggaaaaagaaa

SEQ ID NO: 356059 - DNA, 9278 bp, Homo sapiens
ccaagaattcggcacgagggcctgctgcactcggccttcttcggggaccagacgctgcaggagctgaagatggcgagctccgtggcgccctacgagcagctggtgaggcaggtggaggccttgaaggctgagaacagccacctgaggcaggagctaagggacaactccagccacctgtccaagctggagacagagacgtcgggcatgaaggaggtcctgaagcacctacagggaaaactggagcaggaggcccgagtgctggtgtcctcggggcagacggaggtgctggagcagctgaaggccctacagatggacatcaccagcctgtacaacctcaagttccagccgcccaccctgggcccggagcctgccgcccggacccccgagggcagcccagtacacggctccgggccctccaaggacagctttggggagctgagccgggccaccatccggctgctggaggaactggaccgggaacggtgtttcctgctgaatgagattgagaaggaggagaaggagaagctctggtactactctcagctgcagggcctgtccaagcgcctggacgaagctgctgcaggttgactatgagatgcacaagatgacccgggacccgctgaacctggcgctgcgccgctacgcgggcatgaccctcaccaacctcacctttggggacgttgccaacaaggccaccctgtgtgcgcgccgcggctgcatggaggccatcgtggcccagctggcctccgacagtgaggagctccaccaggtggtgtccagcatccttcggaacttgtcctggagggccgacatcaacagcaagaaggtgctgagggaggcgggcagcgtgactgccctggtgcagtgtgtcctgcgggccaccaaggagtccaccctgaagagcgtgctgagcgccctgtggaatctgtctgcacacagcacagagaacaaggcggccatctgccaggtggatggcgccctgggcttcctggtgagcaccctgacctacaagtgtcagagcaactcgctggccatcatcgagagcggcggcggcatcctccgcaatgtgtccagcctcgtcgccacccgtgaggactacaggcaggtgctccgggatcacaactgtctgcagacgctgctgcagcatctgacttcgcacagcctgaccatcgtgagcaacgcgtgcggcacgctctggaacctgtcggcccgcagcgcccgtgaccaggagctgctgtgggacctgggcgccgtgggcatgctgcgtaatctggtgcactccaagcacaagatgatcgccatgggcagcgccgccgccctgcgcaacctgctggcccatcggcccgccaagcaccaggcggccgccaccgccgtgtccccaggcagctgcgtgcccagcctgtacgtgcgcaagcagcgggcgctggaggccgagctggacgcacggcacctcgcgcaggcgctggagcacctggagaagcagggcccgccggcagccgaggccgccactaagaagccgctgccgcccctgcgacacctggacggcctggcccaagactatgcttccgattcgggctgctttgacgacgacgatgcaccgtcatccctggctgcggccgcggccaccggggagccagccagccctgccgcgctgtccctcttcctgggcagccccttcctgcaggggcaggcgctggctcgcaccccgcccacccgccgaggcggcaaggaggcagagaaggacaccagtggggaggcagccgtggcggccaaggccaaggccaagctggcgcttgcagtggcgcgcatcgaccagctggtggaggacatctccgccctgcacacctcgtccgacgatagcttcagcctcagctctggagacccgggacaggaggcgccacgggagggccgcgcccagtcctgctcgccatgccgcggcccggagggcgggcggcgagaggcaggaagccgggcgcacccgctgctgcggctcaaggcggcccacgccagcctctccaacgacagcctcaacagcggcagtgccagcgacgggtactgcccacgcgaacatatgctgccctgcccgctggccgcactggcttcgcgccgcgaggaccccaggtgtgggcagcctcggcccagccggcttgaccttgacctgcccggctgccaggccgagcccccggcccgcgaggccacctccgccgacgcccgcgtgcgcaccatcaagctgtcgcctacctatcagcacgtgccactgcttgagggtgcctcaagggcgggtgcagagcccctcgcggggcctggaatctctccaggggcccggaagcaggcctggctgccggcagaccacctgagcaaggttcccgagaagctggcggctgccccgctgtctgtggccagcaaggcactgcagaaactggcggcgcaagaggggccactctcgctgtcccgatgcagctccctttcctcgctgtcctcggccggccgcccaggccccagcgagggtggtgacctggatgacagtgactcctccctggaggggctggaggaggccggccccagcgaggctgagctggacagcacgtggcgggcgcccggggccacctcgctgcccgtagccattccggctccccggcgtaaccgaggccggggcctgggggtggaagacgccacgccgtccagctcgtcggagaactacgtgcaggagacaccgcttgtgctgagccgctgcagctctgtgagctcgctgggcagcttcgagagcccgtccatcgccagctccatccccagtgaaccttgcagcgggcagggcagcggcaccatcagccctagcgagctgcccgacagccccggacagaccatgcctcccagccggagcaagacgccaccgctggcgcccgcgccacagggtccccccgaggccacccagttcagcctgcagtgggagagctacgtgaagcgcttcctggacatcgccgactgccgggagcgctgccggctgccatctgagctggacgcaggcagcgtgcgctttaccgtggagaagccagacgagaacttctcgtgcgcctccagcctcagcgcgctggccttgcacgagcactacgtgcagcaggacgtggagctgcggctgctgccctcggcctgccccgagcgcggcgggggcgccgggggcgccggcctccactttgcagggcaccggcggcgggaggaggggccggcgcccacgggttctcgccctcgcggcgccgcggaccaggagctggaactgctgcgggagtgcctgggagccgccgtgcctgcccggctgcgcaaggtggcctccgcgctggtgccaggtcgccgcgcactccccgtgcccgtctacatgttggtgcccgccccggccccggcccaggaggacgactcctgcactgactccgcggagggcacgccggtcaacttctctagcgccgcctcgctcagcgacgagacgctgcagggaccccccagggaccagcccgggggaccagcgggcaggcaaagacccaccggccgccccacctctgccagacaggccatggggcaccggcacaaggcgggaggcgccggccgcagcgcggagcagtctcggggcgcgggcaagaaccgagcagggctggagctgcccctgggccggcccccgagcgcccccgcagacaaggacggctcaaagcccggccggacccgcggggacggggcgctccagtcgctgtgcctcacgacgcccactgaggaggccgtgtactgcttctacggcaacgactcggacgaggagcccccggcggccgcgcccacgccaacccaccggcgcacatcggccatccctcgcgcttttacgcgggagcgtccgcagggccggaaggaggcccctgccccgtccaaggctgcaccagctgccccgccgcccgcccggacccagcccagcctcattgctgacgagaccccgccctgctactccctgagctcctccgccagctccctcagcgagcccgagccctcggagccgccggccgtccatccacgaggccgggagcccgcggtcaccaaggacccgggcccaggaggcggacgcgacagctcgcccagcccgcgggccgcggaggagcttctgcagcggtgcatcagctcggccctgcccaggcgccggccccccgtgtctggcctgcggcgccgcaagccccgagccacccggctggatgagcggcccgcagaggggtcccgggaacgcggcgaggaggcagcgggctcggaccgggcctccgacctggatagcgtggagtggcgcgccatccaggagggcgccaattcaattgtcacgtggctgcaccaggcagcagctgccacgcgggaggcctcgtccgagtccgactccatcctgtccttcgtatccgggctgtcagtgggatccaccctacagccccccaagcacaggaagggacgacaggcggagggagaaatgggcagtgcccggcggccagagaaaaggggcgcagcctcagtcaagaccagcgggagcccccgttcccctgcaggccccgagaagccacgtggcacacagaagaccacgcccggggtgccagctgtgctccggggacgaacagtgatctacgtccccagcccggcaccccgtgcccagcccaaagggacccccggcccccgcgccacaccgcggaaggtggcgcccccttgcctggcacagcccgcggctccagccaaagtcccgagccccgggcagcagcggtcgcggagcctacaccggcctgccaagacctcggagctggcgacgctgagccagccccccagaagcgccacaccgcccgcccgcctcgccaagaccccctcctccagctcctcccagacctcgcccgcctcccagcccctgcccagaaagcgccccccggtcacccaggctgctggggccctgcccggccccggagcctccccggtgcccaaaacgccggcgcgcacccttctggcgaagcagcacaagacgcagagatcgcccgtgcggatcccgttcatgcagaggccggcccggcgtgggccgccaccgctggctcgggcagtcccggagccgggccccaggggccgggcggggaccgaggcgggcccgggggcgcgcgggggccgcctgggcctggtgcgtgtggcctcagccctctccagcggcagcgagtcctccgaccgctcgggcttccggcgacagctaaccttcatcaaggagtcgccgggcttgcggcgccgccgctccgagctgtcctcggccgagtccgcggcctctgccccccagggcgcctcgccccgccgcggccggcccgcgctgcccgccgtcttcctctgctcctcgcgctgcgaagagctccgagcggcaccccggcagggcccggccccggcccggcagcggccccccgcggcccgacccagccctggcgagcgccctgcccggcgcaccacctccgagagcccgtcccgcctgcctgtgcgcgcgcccgccgcccggccggagactgtcaagcgctacgcgtcgctgccgcacatcagcgtggcccgcaggcccgacggcgccgtccccgcggcccctgcctcagccgacgccgcgcgccgcagcagcgacggggagccccggccgctccccagggtggccgcgccgggcacgacctggcggcgcatccgagatgaggacgtgccccacatcctgcgcagcacgcttcccgccacggccctgccactgcggggctccacgcccgaggacgccccggccgggcccccgccgcgcaagaccagcgacgccgtggtccagaccgaggaggtcgccgcccccaagaccaactccagcacgtccccgagcctggagaccagggagccccccggggcccccgccggcggccagctctccctcctcggcagcgacgtggacggtcccagcctcgccaaggctcccatctccgcacccttcgtgcacgagggcctgggggtcgccgtggggggcttccccgccagccggcacggctcccccagccgctcggcccgagtaccccccttcaactatgtgcccagccccatggtggtcgcagccaccaccgactcggccgcggagaaagccccggccactgcctccgccaccctcctggaatagtggcctaggccggccttctggaacgttctctcccggccctgcggcgcggtctggctgccccatgggcctgcgctgtagacgtcccccataggtcgccccagggcctctgcccacccgagccccaccactctcagaacccccgcccagcgcacggcgacctcgcgcctcaccggaagaccttgcctctgtgccgcggaggtccaggaggaaacggggcggccgctaggcctcaagtcccgaccgtggagcgctggcaagggcgtcctggcccagccctgagcgcgcggcccttcccctgtcggaagccgttgcttgaccccgggcgagggaggcggtagcctccgggtccgggtctgggtctgggtccgctgcttcgcagggacagcgctggggaggtgacggcgcccgccgcaggtggggcgaggctgggggagggcggcgccgcggcgggcctgccagctgggggcctttgcggcgcgcaggggcgaagcctgtaatcactgcagccgccggtaattcgctaatgagggctttgcagggattgttttcattctcagccccagctgtgggagtgcgggtgggggtgtggccgagccccggcaggaagccccgcccagacggtgttcagggaacccggagcccaagcgctccggcggagcccaaaagggtgggggtgggaggggcagaggccaacggatccccctgcctgtcgcaccccttggcgggagacgggaaggcagcgggctgcgtacgatgggaccctggtgcagacgccgggccggctgacatttggaccccatcccagaggagatgctggctaccagctggggcgaccccaagggtcgctggagtcagtatcggcccggcgcagccgcggcgggcgaggccaatggaaaggagactgaggggagtcccggcagtgagcccgaggccctgggacctggagcccgcgctggcctctccccagcggagcctgcacgttacggagaccatcacatgtgggcgtggtcagtgcccaggaccgcaccgctgctcatcttgtcccttttcaattcccttctggttcatgatgcataaagcgctaggccctagaactccagaaacagcacagctggggcggggacccagccttgccctccacccgaggctctgggacaaggcgggaggttcgggggccttccggcaggtgaacgcagggctggagagtatttggtgccagatgaggtgaaagcttatagaagggcctgaggggctcggctgcctcatcccctggcgggggaggctgggagctgggcctcctgcgtggggtgggactcgcaggggccgggtctccgtgactggggcaacgcctcgtcctgcagagggagccgacgacctcttttctgcagaaaagctccagcaggcgctgccttcacccacggatctgcccaggctgaaggcacacgctcaatgccccacgtgccttctccaggaggaacgaagcagggtttgagggttgggtggatggagctcagaaggaaaccccagccccaccacggatgacaccatccctcccgtcccatccccagcatgggcaaggccagcctttctggcagaaggagctgtcctcaactcagggccgctgtgagcaaagctgaccccagcccccacccccagttaacactgctgcttctctgaatgcatgtcacgctgcaccccatgctccgggcccacaccctgcaggacaaggagctccagacaggacgtccataagtcaccgaggtgtgccacccagcaggtgctggaggtgcccaatgctccctcctaggacctcgcagccaggcaaggctgtcaggttgttttgggggaagagggggtcatggatggctgagcagagagcggggaaaatgcaggctgagtggggcgacctcctgcctgccaggagccccctttcaggacacagcgggggtctcacacttgctgtccccatccatggcccgagggggaacctggtggtctcttctgagcttttggacttggggatgccaaacacgtgctcaccctcacactcgccccggcccgctgcgcccctaattgccaaagggtagggaaatggcgaagccagccaccaggtcgctggtgacagggccagggttatgcaggaaggtggtgcggcattgccttccacatatgtaagtctctgggcggcgccctcccagctccctgcctctgtttccccatgtgggccgtggggaactcccagagctacctcttgggggagcgtggtggcagcgatgatggggagacgcctggaagctcacagaacttgggtctggctggctcctgcccgtgacgccttgcccagcagcaaggtgcgcaacatggctgccagccccgcctcccacccccaccccgagtcctgagctcactttcgccttctccatcccctgccgtgggggccacagccacacctcaccgcccagtccagctgtctccagaaggggacaggcagtccgcggtctctggacaatcaactcaaggtacgcccactgcaaggcctccctcccaccgcggcccctgcctggccacctggcctctctgcaccagggtgacaaggggtcctcgtctgccccccaatgctccagggccagtcctaaggagctgagggtctgaggacgcagggagggtggaggtgtcctgaggctgatggacagtgaccgccactggcccccaacatgaccacacgtgggtgctgaactcggggcgccgtgcccaccggcatggtcctcccgagctccgacagcattacctcacccggccccatctgttgccccggtccagccctgatggcgcgcgcctggtctgtctgattcccctagccgccaccccacgtttctgtaccgggtctctgcagtgttaaacggacgtgtaaatagtggtaaatagtgaaagcctgtcgggctagtcggggccccgactagcccgacagctcctgggctcaggctccccgttgggaagcctccgtctcgttcagccctggaactgtaggaagaattgggttgcatggggtctgtgatctgtgcagacgcggggggtgattctcatccatgcgtgtcgtgctagtcgggggggtaccgag

SEQ ID NO: 356060 - DNA, 8771 bp, Homo sapiens
ttttttttttttttaactccatctcaaaaaaataaaaataaaataatttagtctctgtcatgcaatctttgggatatacttataccaaaaattagtctttccaagatccaaacctaaccagatgcgtttacttttacctgccacatctggcccccccatccttcggtgggcaggggagggtggggggtggcccaggctaacccgccctgtgcctacaggcaggtgctccgggatcacaactgtctgcagacgctgctgcagcatctgacttcgcacagcctgaccatcgtgagcaacgcgtgcggcacgctctggaacctgtcggcccgcagcgcccgtgaccaggagctgctgtgggacctgggcgccgtgggcatgctgcgtaatctggtgcactccaagcacaagatgatcgccatgggcagcgccgccgccctgcgcaacctgctggcccatcggcccgccaagcaccaggcggccgccaccgccgtgtccccaggcagctgcgtgcccagcctgtacgtgcgcaagcagcgggcgctggaggccgagctggacgcacggcacctcgcgcaggcgctggagcacctggagaagcagggcccgccggcagccgaggccgccactaagaagccgctgccgcccctgcgacacctggacggcctggcccaagactatgcttccgattcgggctgctttgacgacgacgatgcaccgtcatccctggctgcggccgcggccaccggggagccagccagccctgccgcgctgtccctcttcctgggcagccccttcctgcaggggcaggcgctggctcgcaccccgcccacccgccgaggcggcaaggaggcagagaaggacaccagtggggaggcagccgtggcggccaaggccaaggccaagctggcgcttgcagtggcgcgcatcgaccagctggtggaggacatctccgccctgcacacctcgtccgacgatagcttcagcctcagctctggagacccgggacaggaggcgccacgggagggccgcgcccagtcctgctcgccatgccgcggcccggagggcgggcggcgagaggcaggaagccgggcgcacccgctgctgcggctcaaggcggcccacgccagcctctccaacgacagcctcaacagcggcagtgccagcgacgggtactgcccacgcgaacatatgctgccctgcccgctggccgcactggcttcgcgccgcgaggaccccaggtgtgggcagcctcggcccagccggcttgaccttgacctgcccggctgccaggccgagcccccggcccgcgaggccacctccgccgacgcccgcgtgcgcaccatcaagctgtcgcctacctatcagcacgtgccactgcttgagggtgcctcaagggcgggtgcagagcccctcgcggggcctggaatctctccaggggcccggaagcaggcctggctgccggcagaccacctgagcaaggttcccgagaagctggcggctgccccgctgtctgtggccagcaaggcactgcagaaactggcggcgcaagaggggccactctcgctgtcccgatgcagctccctttcctcgctgtcctcggccggccgcccaggccccagcgagggtggtgacctggatgacagtgactcctccctggaggggctggaggaggccggccccagcgaggctgagctggacagcacgtggcgggcgcccggggccacctcgctgcccgtagccattccggctccccggcgtaaccgaggccggggcctgggggtggaagacgccacgccgtccagctcgtcggagaactacgtgcaggagacaccgcttgtgctgagccgctgcagctctgtgagctcgctgggcagcttcgagagcccgtccatcgccagctccatccccagtgaaccttgcagcgggcagggcagcggcaccatcagccctagcgagctgcccgacagccccggacagaccatgcctcccagccggagcaagacgccaccgctggcgcccgcgccacagggtccccccgaggccacccagttcagcctgcagtgggagagctacgtgaagcgcttcctggacatcgccgactgccgggagcgctgccggctgccatctgagctggacgcaggcagcgtgcgctttaccgtggagaagccagacgagaacttctcgtgcgcctccagcctcagcgcgctggccttgcacgagcactacgtgcagcaggacgtggagctgcggctgctgccctcggcctgccccgagcgcggcgggggcgccgggggcgccggcctccactttgcagggcaccggcggcgggaggaggggccggcgcccacgggttctcgccctcgcggcgccgcggaccaggagctggaactgctgcgggagtgcctgggagccgccgtgcctgcccggctgcgcaaggtggcctccgcgctggtgccaggtcgccgcgcactccccgtgcccgtctacatgttggtgcccgccccggccccggcccaggaggacgactcctgcactgactccgcggagggcacgccggtcaacttctctagcgccgcctcgctcagcgacgagacgctgcagggaccccccagggaccagcccgggggaccagcgggcaggcaaagacccaccggccgccccacctctgccagacaggccatggggcaccggcacaaggcgggaggcgccggccgcagcgcggagcagtctcggggcgcgggcaagaaccgagcagggctggagctgcccctgggccggcccccgagcgcccccgcagacaaggacggctcaaagcccggccggacccgcggggacggggcgctccagtcgctgtgcctcacgacgcccactgaggaggccgtgtactgcttctacggcaacgactcggacgaggagcccccggcggccgcgcccacgccaacccaccggcgcacatcggccatccctcgcgcttttacgcgggagcgtccgcagggccggaaggaggcccctgccccgtccaaggctgcaccagctgccccgccgcccgcccggacccagcccagcctcattgctgacgagaccccgccctgctactccctgagctcctccgccagctccctcagcgagcccgagccctcggagccgccggccgtccatccacgaggccgggagcccgcggtcaccaaggacccgggcccaggaggcggacgcgacagctcgcccagcccgcgggccgcggaggagcttctgcagcggtgcatcagctcggccctgcccaggcgccggccccccgtgtctggcctgcggcgccgcaagccccgagccacccggctggatgagcggcccgcagaggggtcccgggaacgcggcgaggaggcagcgggctcggaccgggcctccgacctggatagcgtggagtggcgcgccatccaggagggcgccaattcaattgtcacgtggctgcaccaggcagcagctgccacgcgggaggcctcgtccgagtccgactccatcctgtccttcgtatccgggctgtcagtgggatccaccctacagccccccaagcacaggaagggacgacaggcggagggagaaatgggcagtgcccggcggccagagaaaaggggcgcagcctcagtcaagaccagcgggagcccccgttcccctgcaggccccgagaagccacgtggcacacagaagaccacgcccggggtgccagctgtgctccggggacgaacagtgatctacgtccccagcccggcaccccgtgcccagcccaaagggacccccggcccccgcgccacaccgcggaaggtggcgcccccttgcctggcacagcccgcggctccagccaaagtcccgagccccgggcagcagcggtcgcggagcctacaccggcctgccaagacctcggagctggcgacgctgagccagccccccagaagcgccacaccgcccgcccgcctcgccaagaccccctcctccagctcctcccagacctcgcccgcctcccagcccctgcccagaaagcgccccccggtcacccaggctgctggggccctgcccggccccggagcctccccggtgcccaaaacgccggcgcgcacccttctggcgaagcagcacaagacgcagagatcgcccgtgcggatcccgttcatgcagaggccggcccggcgtgggccgccaccgctggctcgggcagtcccggagccgggccccaggggccgggcggggaccgaggcgggcccgggggcgcgcgggggccgcctgggcctggtgcgtgtggcctcagccctctccagcggcagcgagtcctccgaccgctcgggcttccggcgacagctaaccttcatcaaggagtcgccgggcttgcggcgccgccgctccgagctgtcctcggccgagtccgcggcctctgccccccagggcgcctcgccccgccgcggccggcccgcgctgcccgccgtcttcctctgctcctcgcgctgcgaagagctccgagcggcaccccggcagggcccggccccggcccggcagcggccccccgcggcccgacccagccctggcgagcgccctgcccggcgcaccacctccgagagcccgtcccgcctgcctgtgcgcgcgcccgccgcccggccggagactgtcaagcgctacgcgtcgctgccgcacatcagcgtggcccgcaggcccgacggcgccgtccccgcggcccctgcctcagccgacgccgcgcgccgcagcagcgacggggagccccggccgctccccagggtggccgcgccgggcacgacctggcggcgcatccgagatgaggacgtgccccacatcctgcgcagcacgcttcccgccacggccctgccactgcggggctccacgcccgaggacgccccggccgggcccccgccgcgcaagaccagcgacgccgtggtccagaccgaggaggtcgccgcccccaagaccaactccagcacgtccccgagcctggagaccagggagccccccggggcccccgccggcggccagctctccctcctcggcagcgacgtggacggtcccagcctcgccaaggctcccatctccgcacccttcgtgcacgagggcctgggggtcgccgtggggggcttccccgccagccggcacggctcccccagccgctcggcccgagtaccccccttcaactatgtgcccagccccatggtggtcgcagccaccaccgactcggccgcggagaaagccccggccactgcctccgccaccctcctggaatagtggcctaggccggccttctggaacgttctctcccggccctgcggcgcggtctggctgccccatgggcctgcgctgtagacgtcccccataggtcgccccagggcctctgcccacccgagccccaccactctcagaacccccgcccagcgcacggcgacctcgcgcctcaccggaagaccttgcctctgtgccgcggaggtccaggaggaaacggggcggccgctaggcctcaagtcccgaccgtggagcgctggcaagggcgtcctggcccagccctgagcgcgcggcccttcccctgtcggaagccgttgcttgaccccgggcgagggaggcggtagcctccgggtccgggtctgggtctgggtccgctgcttcgcagggacagcgctggggaggtgacggcgcccgccgcaggtggggcgaggctgggggagggcggcgccgcggcgggcctgccagctgggggcctttgcggcgcgcaggggcgaagcctgtaatcactgcagccgccggtaattcgctaatgagggctttgcagggattgttttcattctcagccccagctgtgggagtgcgggtgggggtgtggccgagccccggcaggaagccccgcccagacggtgttcagggaacccggagcccaagcgctccggcggagcccaaaagggtgggggtgggaggggcagaggccaacggatccccctgcctgtcgcaccccttggcgggagacgggaaggcagcgggctgcgtacgatgggaccctggtgcagacgccgggccggctgacatttggaccccatcccagaggagatgctggctaccagctggggcgaccccaagggtcgctggagtcagtatcggcccggcgcagccgcggcgggcgaggccaatggaaaggagactgaggggagtcccggcagtgagcccgaggccctgggacctggagcccgcgctggcctctccccagcggagcctgcacgttacggagaccatcacatgtgggcgtggtcagtgcccaggaccgcaccgctgctcatcttgtcccttttcaattcccttctggttcatgatgcataaagcgctaggccctagaactccagaaacagcacagctggggcggggacccagccttgccctccacccgaggctctgggacaaggcgggaggttcgggggccttccggcaggtgaacgcagggctggagagtatttggtgccagatgaggtgaaagcttatagaagggcctgaggggctcggctgcctcatcccctggcgggggaggctgggagctgggcctcctgcgtggggtgggactcgcaggggccgggtctccgtgactggggcaacgcctcgtcctgcagagggagccgacgacctcttttctgcagaaaagctccagcaggcgctgccttcacccacggatctgcccaggctgaaggcacacgctcaatgccccacgtgccttctccaggaggaacgaagcagggtttgagggttgggtggatggagctcagaaggaaaccccagccccaccacggatgacaccatccctcccgtcccatccccagcatgggcaaggccagcctttctggcagaaggagctgtcctcaactcagggccgctgtgagcaaagctgaccccagcccccacccccagttaacactgctgcttctctgaatgcatgtcacgctgcaccccatgctccgggcccacaccctgcaggacaaggagctccagacaggacgtccataagtcaccgaggtgtgccacccagcaggtgctggaggtgcccaatgctccctcctaggacctcgcagccaggcaaggctgtcaggttgttttgggggaagagggggtcatggatggctgagcagagagcggggaaaatgcaggctgagtggggcgacctcctgcctgccaggagccccctttcaggacacagcgggggtctcacacttgctgtccccatccatggcccgagggggaacctggtggtctcttctgagcttttggacttggggatgccaaacacgtgctcaccctcacactcgccccggcccgctgcgcccctaattgccaaagggtagggaaatggcgaagccagccaccaggtcgctggtgacagggccagggttatgcaggaaggtggtgcggcattgccttccacatatgtaagtctctgggcggcgccctcccagctccctgcctctgtttccccatgtgggccgtggggaactcccagagctacctcttgggggagcgtggtggcagcgatgatggggagacgcctggaagctcacagaacttgggtctggctggctcctgcccgtgacgccttgcccagcagcaaggtgcgcaacatggctgccagccccgcctcccacccccaccccgagtcctgagctcactttcgccttctccatcccctgccgtgggggccacagccacacctcaccgcccagtccagctgtctccagaaggggacaggcagtccgcggtctctggacaatcaactcaaggtacgcccactgcaaggcctccctcccaccgcggcccctgcctggccacctggcctctctgcaccagggtgacaaggggtcctcgtctgccccccaatgctccagggccagtcctaaggagctgagggtctgaggacgcagggagggtggaggtgtcctgaggctgatggacagtgaccgccactggcccccaacatgaccacacgtgggtgctgaactcggggcgccgtgcccaccggcatggtcctcccgagctccgacagcattacctcacccggccccatctgttgccccggtccagccctgatggcgcgcgcctggtctgtctgattcccctagccgccaccccacgtttctgtaccgggtctctgcagtgttaaacggacgtgtaaatagtggtaaatagtgaaagcctgtccttccctaaatgtaaagccatctgtccggcgtaaggacgacaccgtcagctgtccgactcgcacacatttaataaactgagctcttgcattgaaaaaaaaaaaaaaaaaaacaaaaaaaacacaaaaacaaaaaaagaaaaacaaaatacacagagagacacaaacacaaacaataaaacaaacaaaaaaaaaaccaggagggagcggcaggaaagacaacaaaacacgccaggagaagagaaaaaacaaaagaaagacgaaaaagaagaaggagaacaaagacaagaaacgcaccacacaaaaaagaaagaacactaaacacaaagaaaacaagaacagacgaagaacaggagagaaaaaaaaagagcagagcagagggaaagagaaacaacaaagacactcaggaacgaacggagagaaaccacggggaggagagaagacacgaagacaaaaacaccaggagccgggggaggacagaaaacaacaaaagaagcaaacagaacatacaccagcagaagcaagaggaaacacaagcaagagcagagggaaaaagaaa

SEQ ID NO: 356061 - DNA, 11452 bp, Homo sapiens
gggtttggggagcaggaggcagacatgtgttgctttgcacgtcatctggtccttccacctggctgggcatgggatggtgacctcagctggaacatggggctcgagccagacctcagggtctccctgcgtgtagcccccaaccccaagcctgatccccaccggagacctgaacagccttggacatcatcggatcagggtgggaggtgccagcctctgccacctgacttccagtccctgtgcccctcccaccctgcccttgggcactcctgccctgcaggttcctcagaggggcaacccaaagccagagaggggcgggtcttgtcgggcctccagcctggacttcccagcccctctggggcagcatctgggtgccagacctcggttcctagggcctcgtttctccctctgggaacagccaaatggtggtccctgagactcaggacagaccaagaagaagccggatgacatggcaagccacacactgcgtcccctgagcaggacgggacagcccgactccatcctcccacctgcgactgagcccccacccctactcctgtcccagccgtgcccctggtgacatttgggtgggaggggaggggatgagggggcacctgggggtcagagaacaaatgacgggtgaatacatgtgtgtggccaggtggaggagggaggggaggagcaggtgggctggacagggccggtgtgaggaaggggctcaggctggcagggggaggtggcaagagggatgggctgccattggtggtctgagacaaaggcggagggaggaggcgagcgctgatgggaaaggaacaaagagggaaggggggcgtgaagggggttccggcgggagggccgagccgagggaggaggcgccggccagctggacagagggaggaggccaggccagagccagaagacggccagaggcacaaagaagccagcgcgctggcagagtcaagggatggggcagaggctgccggggccagcagggaccagctgaaggctgcgcagggggtgcgggccacacagacgctgcaggagctgaagatggcgagctccgtggcgccctacgagcagctggtgaggcaggtggaggccttgaaggctgagaacagccacctgaggcaggagctaagggacaactccagccacctgtccaagctggagacagagacgtcgggcatgaaggaggtcctgaagcacctacagggaaaactggagcaggaggcccgagtgctggtgtcctcggggcagacggaggtgctggagcagctgaaggccctacagatggacatcaccagcctgtacaacctcaagttccagccgcccaccctgggcccggagcctgccgcccggacccccgagggcagcccagtacacggctccgggccctccaaggacagctttggggagctgagccgggccaccatccggctgctggaggaactggaccgggaacggtgtttcctgctgaatgagattgagaaggaggagaaggagaagctctggtactactctcagctgcagggcctgtccaagcgcctggacgagctgccgcacgtggagacgcgttctcgatgcagatggacctgatccggcagcagcttgagttcgaggcccagcacatccgctcgctgatggaggagcgcttcggcacctcggacgagatggtgcagcgggcacagatccgcgcctcgcgcctggagcagattgacaaggagctgctggaggcgcaggaccgagtgcagcagacggagccccaggccttgctggcggtgaagtcggtgccggtggacgaggaccccgagacagaggtccccacacaccctgaggatggcacccctcagccgggcaacagcaaggtggaggtggtcttctggctgttgtccatgttggcgacgcgcgaccaggaggatacagcgcgcacgctgctggccatgtccagctcgcccgagagctgcgtggccatgcgccgctcgggctgtctgcctctgctgctgcaaatcctccacggcaccgaggccgcggccgggggtcgcgccggggccccaggggcaccgggcgccaaggacgcacgcatgcgcgccaacgcggcgctgcacaacatcgtcttctcgcagccggaccagggcctggcgcgcaaggagatgcgcgtcctgcacgtgctggagcagatccgggcctactgcgagacctgctgggactggctgcaggcccgagacggcgggcccgagggaggtggcgccggcagcgccccgatccccatcgagccgcagatctgccaggccacctgtgctgttatgaagctgtcctttgatgaggagtaccgccgtgccatgaacgagctaggtgggctgcaggccgtggcagagctgctgcaggttgactatgagatgcacaagatgacccgggacccgctgaacctggcgctgcgccgctacgcgggcatgaccctcaccaacctcacctttggggacgttgccaacaaggccaccctgtgtgcgcgccgcggctgcatggaggccatcgtggcccagctggcctccgacagtgaggagctccaccaggtggtgtccagcatccttcggaacttgtcctggagggccgacatcaacagcaagaaggtgctgagggaggcgggcagcgtgactgccctggtgcagtgtgtcctgcgggccaccaaggagtccaccctgaagagcgtgctgagcgccctgtggaatctgtctgcacacagcacagagaacaaggcggccatctgccaggtggatggcgccctgggcttcctggtgagcaccctgacctacaagtgtcagagcaactcgctggccatcatcgagagcggcggcggcatcctccgcaatgtgtccagcctcgtcgccacccgtgaggactacaggcaggtgctccgggatcacaactgtctgcagacgctgctgcagcatctgacttcgcacagcctgaccatcgtgagcaacgcgtgcggcacgctctggaacctgtcggcccgcagcgcccgtgaccaggagctgctgtgggacctgggcgccgtgggcatgctgcgtaatctggtgcactccaagcacaagatgatcgccatgggcagcgccgccgccctgcgcaacctgctggcccatcggcccgccaagcaccaggcggccgccaccgccgtgtccccaggcagctgcgtgcccagcctgtacgtgcgcaagcagcgggcgctggaggccgagctggacgcacggcacctcgcgcaggcgctggagcacctggagaagcagggcccgccggcagccgaggccgccactaagaagccgctgccgcccctgcgacacctggacggcctggcccaagactatgcttccgattcgggctgctttgacgacgacgatgcaccgtcatccctggctgcggccgcggccaccggggagccagccagccctgccgcgctgtccctcttcctgggcagccccttcctgcaggggcaggcgctggctcgcaccccgcccacccgccgaggcggcaaggaggcagagaaggacaccagtggggaggcagccgtggcggccaaggccaaggccaagctggcgcttgcagtggcgcgcatcgaccagctggtggaggacatctccgccctgcacacctcgtccgacgatagcttcagcctcagctctggagacccgggacaggaggcgccacgggagggccgcgcccagtcctgctcgccatgccgcggcccggagggcgggcggcgagaggcaggaagccgggcgcacccgctgctgcggctcaaggcggcccacgccagcctctccaacgacagcctcaacagcggcagtgccagcgacgggtactgcccacgcgaacatatgctgccctgcccgctggccgcactggcttcgcgccgcgaggaccccaggtgtgggcagcctcggcccagccggcttgaccttgacctgcccggctgccaggccgagcccccggcccgcgaggccacctccgccgacgcccgcgtgcgcaccatcaagctgtcgcctacctatcagcacgtgccactgcttgagggtgcctcaagggcgggtgcagagcccctcgcggggcctggaatctctccaggggcccggaagcaggcctggctgccggcagaccacctgagcaaggttcccgagaagctggcggctgccccgctgtctgtggccagcaaggcactgcagaaactggcggcgcaagaggggccactctcgctgtcccgatgcagctccctttcctcgctgtcctcggccggccgcccaggccccagcgagggtggtgacctggatgacagtgactcctccctggaggggctggaggaggccggccccagcgaggctgagctggacagcacgtggcgggcgcccggggccacctcgctgcccgtagccattccggctccccggcgtaaccgaggccggggcctgggggtggaagacgccacgccgtccagctcgtcggagaactacgtgcaggagacaccgcttgtgctgagccgctgcagctctgtgagctcgctgggcagcttcgagagcccgtccatcgccagctccatccccagtgaaccttgcagcgggcagggcagcggcaccatcagccctagcgagctgcccgacagccccggacagaccatgcctcccagccggagcaagacgccaccgctggcgcccgcgccacagggtccccccgaggccacccagttcagcctgcagtgggagagctacgtgaagcgcttcctggacatcgccgactgccgggagcgctgccggctgccatctgagctggacgcaggcagcgtgcgctttaccgtggagaagccagacgagaacttctcgtgcgcctccagcctcagcgcgctggccttgcacgagcactacgtgcagcaggacgtggagctgcggctgctgccctcggcctgccccgagcgcggcgggggcgccgggggcgccggcctccactttgcagggcaccggcggcgggaggaggggccggcgcccacgggttctcgccctcgcggcgccgcggaccaggagctggaactgctgcgggagtgcctgggagccgccgtgcctgcccggctgcgcaaggtggcctccgcgctggtgccaggtcgccgcgcactccccgtgcccgtctacatgttggtgcccgccccggccccggcccaggaggacgactcctgcactgactccgcggagggcacgccggtcaacttctctagcgccgcctcgctcagcgacgagacgctgcagggaccccccagggaccagcccgggggaccagcgggcaggcaaagacccaccggccgccccacctctgccagacaggccatggggcaccggcacaaggcgggaggcgccggccgcagcgcggagcagtctcggggcgcgggcaagaaccgagcagggctggagctgcccctgggccggcccccgagcgcccccgcagacaaggacggctcaaagcccggccggacccgcggggacggggcgctccagtcgctgtgcctcacgacgcccactgaggaggccgtgtactgcttctacggcaacgactcggacgaggagcccccggcggccgcgcccacgccaacccaccggcgcacatcggccatccctcgcgcttttacgcgggagcgtccgcagggccggaaggaggcccctgccccgtccaaggctgcaccagctgccccgccgcccgcccggacccagcccagcctcattgctgacgagaccccgccctgctactccctgagctcctccgccagctccctcagcgagcccgagccctcggagccgccggccgtccatccacgaggccgggagcccgcggtcaccaaggacccgggcccaggaggcggacgcgacagctcgcccagcccgcgggccgcggaggagcttctgcagcggtgcatcagctcggccctgcccaggcgccggccccccgtgtctggcctgcggcgccgcaagccccgagccacccggctggatgagcggcccgcagaggggtcccgggaacgcggcgaggaggcagcgggctcggaccgggcctccgacctggatagcgtggagtggcgcgccatccaggagggcgccaattcaattgtcacgtggctgcaccaggcagcagctgccacgcgggaggcctcgtccgagtccgactccatcctgtccttcgtatccgggctgtcagtgggatccaccctacagccccccaagcacaggaagggacgacaggcggagggagaaatgggcagtgcccggcggccagagaaaaggggcgcagcctcagtcaagaccagcgggagcccccgttcccctgcaggccccgagaagccacgtggcacacagaagaccacgcccggggtgccagctgtgctccggggacgaacagtgatctacgtccccagcccggcaccccgtgcccagcccaaagggacccccggcccccgcgccacaccgcggaaggtggcgcccccttgcctggcacagcccgcggctccagccaaagtcccgagccccgggcagcagcggtcgcggagcctacaccggcctgccaagacctcggagctggcgacgctgagccagccccccagaagcgccacaccgcccgcccgcctcgccaagaccccctcctccagctcctcccagacctcgcccgcctcccagcccctgcccagaaagcgccccccggtcacccaggctgctggggccctgcccggccccggagcctccccggtgcccaaaacgccggcgcgcacccttctggcgaagcagcacaagacgcagagatcgcccgtgcggatcccgttcatgcagaggccggcccggcgtgggccgccaccgctggctcgggcagtcccggagccgggccccaggggccgggcggggaccgaggcgggcccgggggcgcgcgggggccgcctgggcctggtgcgtgtggcctcagccctctccagcggcagcgagtcctccgaccgctcgggcttccggcgacagctaaccttcatcaaggagtcgccgggcttgcggcgccgccgctccgagctgtcctcggccgagtccgcggcctctgccccccagggcgcctcgccccgccgcggccggcccgcgctgcccgccgtcttcctctgctcctcgcgctgcgaagagctccgagcggcaccccggcagggcccggccccggcccggcagcggccccccgcggcccgacccagccctggcgagcgccctgcccggcgcaccacctccgagagcccgtcccgcctgcctgtgcgcgcgcccgccgcccggccggagactgtcaagcgctacgcgtcgctgccgcacatcagcgtggcccgcaggcccgacggcgccgtccccgcggcccctgcctcagccgacgccgcgcgccgcagcagcgacggggagccccggccgctccccagggtggccgcgccgggcacgacctggcggcgcatccgagatgaggacgtgccccacatcctgcgcagcacgcttcccgccacggccctgccactgcggggctccacgcccgaggacgccccggccgggcccccgccgcgcaagaccagcgacgccgtggtccagaccgaggaggtcgccgcccccaagaccaactccagcacgtccccgagcctggagaccagggagccccccggggcccccgccggcggccagctctccctcctcggcagcgacgtggacggtcccagcctcgccaaggctcccatctccgcacccttcgtgcacgagggcctgggggtcgccgtggggggcttccccgccagccggcacggctcccccagccgctcggcccgagtaccccccttcaactatgtgcccagccccatggtggtcgcagccaccaccgactcggccgcggagaaagccccggccactgcctccgccaccctcctggaatagtggcctaggccggccttctggaacgttctctcccggccctgcggcgcggtctggctgccccatgggcctgcgctgtagacgtcccccataggtcgccccagggcctctgcccacccgagccccaccactctcagaacccccgcccagcgcacggcgacctcgcgcctcaccggaagaccttgcctctgtgccgcggaggtccaggaggaaacggggcggccgctaggcctcaagtcccgaccgtggagcgctggcaagggcgtcctggcccagccctgagcgcgcggcccttcccctgtcggaagccgttgcttgaccccgggcgagggaggcggtagcctccgggtccgggtctgggtctgggtccgctgcttcgcagggacagcgctggggaggtgacggcgcccgccgcaggtggggcgaggctgggggagggcggcgccgcggcgggcctgccagctgggggcctttgcggcgcgcaggggcgaagcctgtaatcactgcagccgccggtaattcgctaatgagggctttgcagggattgttttcattctcagccccagctgtgggagtgcgggtgggggtgtggccgagccccggcaggaagccccgcccagacggtgttcagggaacccggagcccaagcgctccggcggagcccaaaagggtgggggtgggaggggcagaggccaacggatccccctgcctgtcgcaccccttggcgggagacgggaaggcagcgggctgcgtacgatgggaccctggtgcagacgccgggccggctgacatttggaccccatcccagaggagatgctggctaccagctggggcgaccccaagggtcgctggagtcagtatcggcccggcgcagccgcggcgggcgaggccaatggaaaggagactgaggggagtcccggcagtgagcccgaggccctgggacctggagcccgcgctggcctctccccagcggagcctgcacgttacggagaccatcacatgtgggcgtggtcagtgcccaggaccgcaccgctgctcatcttgtcccttttcaattcccttctggttcatgatgcataaagcgctaggccctagaactccagaaacagcacagctggggcggggacccagccttgccctccacccgaggctctgggacaaggcgggaggttcgggggccttccggcaggtgaacgcagggctggagagtatttggtgccagatgaggtgaaagcttatagaagggcctgaggggctcggctgcctcatcccctggcgggggaggctgggagctgggcctcctgcgtggggtgggactcgcaggggccgggtctccgtgactggggcaacgcctcgtcctgcagagggagccgacgacctcttttctgcagaaaagctccagcaggcgctgccttcacccacggatctgcccaggctgaaggcacacgctcaatgccccacgtgccttctccaggaggaacgaagcagggtttgagggttgggtggatggagctcagaaggaaaccccagccccaccacggatgacaccatccctcccgtcccatccccagcatgggcaaggccagcctttctggcagaaggagctgtcctcaactcagggccgctgtgagcaaagctgaccccagcccccacccccagttaacactgctgcttctctgaatgcatgtcacgctgcaccccatgctccgggcccacaccctgcaggacaaggagctccagacaggacgtccataagtcaccgaggtgtgccacccagcaggtgctggaggtgcccaatgctccctcctaggacctcgcagccaggcaaggctgtcaggttgttttgggggaagagggggtcatggatggctgagcagagagcggggaaaatgcaggctgagtggggcgacctcctgcctgccaggagccccctttcaggacacagcgggggtctcacacttgctgtccccatccatggcccgagggggaacctggtggtctcttctgagcttttggacttggggatgccaaacacgtgctcaccctcacactcgccccggcccgctgcgcccctaattgccaaagggtagggaaatggcgaagccagccaccaggtcgctggtgacagggccagggttatgcaggaaggtggtgcggcattgccttccacatatgtaagtctctgggcggcgccctcccagctccctgcctctgtttccccatgtgggccgtggggaactcccagagctacctcttgggggagcgtggtggcagcgatgatggggagacgcctggaagctcacagaacttgggtctggctggctcctgcccgtgacgccttgcccagcagcaaggtgcgcaacatggctgccagccccgcctcccacccccaccccgagtcctgagctcactttcgccttctccatcccctgccgtgggggccacagccacacctcaccgcccagtccagctgtctccagaaggggacaggcagtccgcggtctctggacaatcaactcaaggtacgcccactgcaaggcctccctcccaccgcggcccctgcctggccacctggcctctctgcaccagggtgacaaggggtcctcgtctgccccccaatgctccagggccagtcctaaggagctgagggtctgaggacgcagggagggtggaggtgtcctgaggctgatggacagtgaccgccactggcccccaacatgaccacacgtgggtgctgaactcggggcgccgtgcccaccggcatggtcctcccgagctccgacagcattacctcacccggccccatctgttgccccggtccagccctgatggcgcgcgcctggtctgtctgattcccctagccgccaccccacgtttctgtaccgggtctctgcagtgttaaacggacgtgtaaatagtggtaaatagtgaaagcctgtccttccctaaatgtaaagccatctgtccggcgtaaggacgacaccgtcagctgtccgactcgcacacatttaataaactgagctcttgcattgaaaaaaaaaaaaaaaaaaacaaaaaaaacacaaaaacaaaaaaagaaaaacaaaatacacagagagacacaaacacaaacaataaaacaaacaaaaaaaaaaccaggagggagcggcaggaaagacaacaaaacacgccaggagaagagaaaaaacaaaagaaagacgaaaaagaagaaggagaacaaagacaagaaacgcaccacacaaaaaagaaagaacactaaacacaaagaaaacaagaacagacgaagaacaggagagaaaaaaaaagagcagagcagagggaaagagaaacaacaaagacactcaggaacgaacggagagaaaccacggggaggagagaagacacgaagacaaaaacaccaggagccgggggaggacagaaaacaacaaaagaagcaaacagaacatacaccagcagaagcaagaggaaacacaagcaagagcagagggaaaaagaaa

SEQ ID NO: 356062 - DNA, 10464 bp, Homo sapiens
ggctcctgagcctgctgcactcggccttcttcggggaccagacgctgcaggagctgaagatggcgagctccgtggcgccctacgagcagctggtgaggcaggtggaggccttgaaggctgagaacagccacctgaggcaggagctaagggacaactccagccacctgtccaagctggagacagagacgtcgggcatgaaggaggtcctgaagcacctacagggaaaactggagcaggaggcccgagtgctggtgtcctcggggcagacggaggtgctggagcagctgaaggccctacagatggacatcaccagcctgtacaacctcaagttccagccgcccaccctgggcccggagcctgccgcccggacccccgagggcagcccagtacacggctccgggccctccaaggacagctttggggagctgagccgggccaccatccggctgctggaggaactggaccgggaacggtgtttcctgctgaatgagattgagaaggaggagaaggagaagctctggtactactctcagctgcagggcctgtccaagcgcctggacgagctgccgcacgtggagacgcgttctcgatgcagatggacctgatccggcagcagcttgagttcgaggcccagcacatccgctcgctgatggaggagcgcttcggcacctcggacgagatggtgcagcgggcacagatccgcgcctcgcgcctggagcagattgacaaggagctgctggaggcgcaggaccgagtgcagcagacggagccccaggccttgctggcggtgaagtcggtgccggtggacgaggaccccgagacagaggtccccacacaccctgaggatggcacccctcagccgggcaacagcaaggtggaggtggtcttctggctgttgtccatgttggcgacgcgcgaccaggaggatacagcgcgcacgctgctggccatgtccagctcgcccgagagctgcgtggccatgcgccgctcgggctgtctgcctctgctgctgcaaatcctccacggcaccgaggccgcggccgggggtcgcgccggggccccaggggcaccgggcgccaaggacgcacgcatgcgcgccaacgcggcgctgcacaacatcgtcttctcgcagccggaccagggcctggcgcgcaaggagatgcgcgtcctgcacgtgctggagcagatccgggcctactgcgagacctgctgggactggctgcaggcccgagacggcgggcccgagggaggtggcgccggcagcgccccgatccccatcgagccgcagatctgccaggccacctgtgctgttatgaagctgtcctttgatgaggagtaccgccgtgccatgaacgagctaggtgggctgcaggccgtggcagagctgctgcaggttgactatgagatgcacaagatgacccgggacccgctgaacctggcgctgcgccgctacgcgggcatgaccctcaccaacctcacctttggggacgttgccaacaaggccaccctgtgtgcgcgccgcggctgcatggaggccatcgtggcccagctggcctccgacagtgaggagctccaccaggtggtgtccagcatccttcggaacttgtcctggagggccgacatcaacagcaagaaggtgctgagggaggcgggcagcgtgactgccctggtgcagtgtgtcctgcgggccaccaaggagtccaccctgaagagcgtgctgagcgccctgtggaatctgtctgcacacagcacagagaacaaggcggccatctgccaggtggatggcgccctgggcttcctggtgagcaccctgacctacaagtgtcagagcaactcgctggccatcatcgagagcggcggcggcatcctccgcaatgtgtccagcctcgtcgccacccgtgaggactacaggcaggtgctccgggatcacaactgtctgcagacgctgctgcagcatctgacttcgcacagcctgaccatcgtgagcaacgcgtgcggcacgctctggaacctgtcggcccgcagcgcccgtgaccaggagctgctgtgggacctgggcgccgtgggcatgctgcgtaatctggtgcactccaagcacaagatgatcgccatgggcagcgccgccgccctgcgcaacctgctggcccatcggcccgccaagcaccaggcggccgccaccgccgtgtccccaggcagctgcgtgcccagcctgtacgtgcgcaagcagcgggcgctggaggccgagctggacgcacggcacctcgcgcaggcgctggagcacctggagaagcagggcccgccggcagccgaggccgccactaagaagccgctgccgcccctgcgacacctggacggcctggcccaagactatgcttccgattcgggctgctttgacgacgacgatgcaccgtcatccctggctgcggccgcggccaccggggagccagccagccctgccgcgctgtccctcttcctgggcagccccttcctgcaggggcaggcgctggctcgcaccccgcccacccgccgaggcggcaaggaggcagagaaggacaccagtggggaggcagccgtggcggccaaggccaaggccaagctggcgcttgcagtggcgcgcatcgaccagctggtggaggacatctccgccctgcacacctcgtccgacgatagcttcagcctcagctctggagacccgggacaggaggcgccacgggagggccgcgcccagtcctgctcgccatgccgcggcccggagggcgggcggcgagaggcaggaagccgggcgcacccgctgctgcggctcaaggcggcccacgccagcctctccaacgacagcctcaacagcggcagtgccagcgacgggtactgcccacgcgaacatatgctgccctgcccgctggccgcactggcttcgcgccgcgaggaccccaggtgtgggcagcctcggcccagccggcttgaccttgacctgcccggctgccaggccgagcccccggcccgcgaggccacctccgccgacgcccgcgtgcgcaccatcaagctgtcgcctacctatcagcacgtgccactgcttgagggtgcctcaagggcgggtgcagagcccctcgcggggcctggaatctctccaggggcccggaagcaggcctggctgccggcagaccacctgagcaaggttcccgagaagctggcggctgccccgctgtctgtggccagcaaggcactgcagaaactggcggcgcaagaggggccactctcgctgtcccgatgcagctccctttcctcgctgtcctcggccggccgcccaggccccagcgagggtggtgacctggatgacagtgactcctccctggaggggctggaggaggccggccccagcgaggctgagctggacagcacgtggcgggcgcccggggccacctcgctgcccgtagccattccggctccccggcgtaaccgaggccggggcctgggggtggaagacgccacgccgtccagctcgtcggagaactacgtgcaggagacaccgcttgtgctgagccgctgcagctctgtgagctcgctgggcagcttcgagagcccgtccatcgccagctccatccccagtgaaccttgcagcgggcagggcagcggcaccatcagccctagcgagctgcccgacagccccggacagaccatgcctcccagccggagcaagacgccaccgctggcgcccgcgccacagggtccccccgaggccacccagttcagcctgcagtgggagagctacgtgaagcgcttcctggacatcgccgactgccgggagcgctgccggctgccatctgagctggacgcaggcagcgtgcgctttaccgtggagaagccagacgagaacttctcgtgcgcctccagcctcagcgcgctggccttgcacgagcactacgtgcagcaggacgtggagctgcggctgctgccctcggcctgccccgagcgcggcgggggcgccgggggcgccggcctccactttgcagggcaccggcggcgggaggaggggccggcgcccacgggttctcgccctcgcggcgccgcggaccaggagctggaactgctgcgggagtgcctgggagccgccgtgcctgcccggctgcgcaaggtggcctccgcgctggtgccaggtcgccgcgcactccccgtgcccgtctacatgttggtgcccgccccggccccggcccaggaggacgactcctgcactgactccgcggagggcacgccggtcaacttctctagcgccgcctcgctcagcgacgagacgctgcagggaccccccagggaccagcccgggggaccagcgggcaggcaaagacccaccggccgccccacctctgccagacaggccatggggcaccggcacaaggcgggaggcgccggccgcagcgcggagcagtctcggggcgcgggcaagaaccgagcagggctggagctgcccctgggccggcccccgagcgcccccgcagacaaggacggctcaaagcccggccggacccgcggggacggggcgctccagtcgctgtgcctcacgacgcccactgaggaggccgtgtactgcttctacggcaacgactcggacgaggagcccccggcggccgcgcccacgccaacccaccggcgcacatcggccatccctcgcgcttttacgcgggagcgtccgcagggccggaaggaggcccctgccccgtccaaggctgcaccagctgccccgccgcccgcccggacccagcccagcctcattgctgacgagaccccgccctgctactccctgagctcctccgccagctccctcagcgagcccgagccctcggagccgccggccgtccatccacgaggccgggagcccgcggtcaccaaggacccgggcccaggaggcggacgcgacagctcgcccagcccgcgggccgcggaggagcttctgcagcggtgcatcagctcggccctgcccaggcgccggccccccgtgtctggcctgcggcgccgcaagccccgagccacccggctggatgagcggcccgcagaggggtcccgggaacgcggcgaggaggcagcgggctcggaccgggcctccgacctggatagcgtggagtggcgcgccatccaggagggcgccaattcaattgtcacgtggctgcaccaggcagcagctgccacgcgggaggcctcgtccgagtccgactccatcctgtccttcgtatccgggctgtcagtgggatccaccctacagccccccaagcacaggaagggacgacaggcggagggagaaatgggcagtgcccggcggccagagaaaaggggcgcagcctcagtcaagaccagcgggagcccccgttcccctgcaggccccgagaagccacgtggcacacagaagaccacgcccggggtgccagctgtgctccggggacgaacagtgatctacgtccccagcccggcaccccgtgcccagcccaaagggacccccggcccccgcgccacaccgcggaaggtggcgcccccttgcctggcacagcccgcggctccagccaaagtcccgagccccgggcagcagcggtcgcggagcctacaccggcctgccaagacctcggagctggcgacgctgagccagccccccagaagcgccacaccgcccgcccgcctcgccaagaccccctcctccagctcctcccagacctcgcccgcctcccagcccctgcccagaaagcgccccccggtcacccaggctgctggggccctgcccggccccggagcctccccggtgcccaaaacgccggcgcgcacccttctggcgaagcagcacaagacgcagagatcgcccgtgcggatcccgttcatgcagaggccggcccggcgtgggccgccaccgctggctcgggcagtcccggagccgggccccaggggccgggcggggaccgaggcgggcccgggggcgcgcgggggccgcctgggcctggtgcgtgtggcctcagccctctccagcggcagcgagtcctccgaccgctcgggcttccggcgacagctaaccttcatcaaggagtcgccgggcttgcggcgccgccgctccgagctgtcctcggccgagtccgcggcctctgccccccagggcgcctcgccccgccgcggccggcccgcgctgcccgccgtcttcctctgctcctcgcgctgcgaagagctccgagcggcaccccggcagggcccggccccggcccggcagcggccccccgcggcccgacccagccctggcgagcgccctgcccggcgcaccacctccgagagcccgtcccgcctgcctgtgcgcgcgcccgccgcccggccggagactgtcaagcgctacgcgtcgctgccgcacatcagcgtggcccgcaggcccgacggcgccgtccccgcggcccctgcctcagccgacgccgcgcgccgcagcagcgacggggagccccggccgctccccagggtggccgcgccgggcacgacctggcggcgcatccgagatgaggacgtgccccacatcctgcgcagcacgcttcccgccacggccctgccactgcggggctccacgcccgaggacgccccggccgggcccccgccgcgcaagaccagcgacgccgtggtccagaccgaggaggtcgccgcccccaagaccaactccagcacgtccccgagcctggagaccagggagccccccggggcccccgccggcggccagctctccctcctcggcagcgacgtggacggtcccagcctcgccaaggctcccatctccgcacccttcgtgcacgagggcctgggggtcgccgtggggggcttccccgccagccggcacggctcccccagccgctcggcccgagtaccccccttcaactatgtgcccagccccatggtggtcgcagccaccaccgactcggccgcggagaaagccccggccactgcctccgccaccctcctggaatagtggcctaggccggccttctggaacgttctctcccggccctgcggcgcggtctggctgccccatgggcctgcgctgtagacgtcccccataggtcgccccagggcctctgcccacccgagccccaccactctcagaacccccgcccagcgcacggcgacctcgcgcctcaccggaagaccttgcctctgtgccgcggaggtccaggaggaaacggggcggccgctaggcctcaagtcccgaccgtggagcgctggcaagggcgtcctggcccagccctgagcgcgcggcccttcccctgtcggaagccgttgcttgaccccgggcgagggaggcggtagcctccgggtccgggtctgggtctgggtccgctgcttcgcagggacagcgctggggaggtgacggcgcccgccgcaggtggggcgaggctgggggagggcggcgccgcggcgggcctgccagctgggggcctttgcggcgcgcaggggcgaagcctgtaatcactgcagccgccggtaattcgctaatgagggctttgcagggattgttttcattctcagccccagctgtgggagtgcgggtgggggtgtggccgagccccggcaggaagccccgcccagacggtgttcagggaacccggagcccaagcgctccggcggagcccaaaagggtgggggtgggaggggcagaggccaacggatccccctgcctgtcgcaccccttggcgggagacgggaaggcagcgggctgcgtacgatgggaccctggtgcagacgccgggccggctgacatttggaccccatcccagaggagatgctggctaccagctggggcgaccccaagggtcgctggagtcagtatcggcccggcgcagccgcggcgggcgaggccaatggaaaggagactgaggggagtcccggcagtgagcccgaggccctgggacctggagcccgcgctggcctctccccagcggagcctgcacgttacggagaccatcacatgtgggcgtggtcagtgcccaggaccgcaccgctgctcatcttgtcccttttcaattcccttctggttcatgatgcataaagcgctaggccctagaactccagaaacagcacagctggggcggggacccagccttgccctccacccgaggctctgggacaaggcgggaggttcgggggccttccggcaggtgaacgcagggctggagagtatttggtgccagatgaggtgaaagcttatagaagggcctgaggggctcggctgcctcatcccctggcgggggaggctgggagctgggcctcctgcgtggggtgggactcgcaggggccgggtctccgtgactggggcaacgcctcgtcctgcagagggagccgacgacctcttttctgcagaaaagctccagcaggcgctgccttcacccacggatctgcccaggctgaaggcacacgctcaatgccccacgtgccttctccaggaggaacgaagcagggtttgagggttgggtggatggagctcagaaggaaaccccagccccaccacggatgacaccatccctcccgtcccatccccagcatgggcaaggccagcctttctggcagaaggagctgtcctcaactcagggccgctgtgagcaaagctgaccccagcccccacccccagttaacactgctgcttctctgaatgcatgtcacgctgcaccccatgctccgggcccacaccctgcaggacaaggagctccagacaggacgtccataagtcaccgaggtgtgccacccagcaggtgctggaggtgcccaatgctccctcctaggacctcgcagccaggcaaggctgtcaggttgttttgggggaagagggggtcatggatggctgagcagagagcggggaaaatgcaggctgagtggggcgacctcctgcctgccaggagccccctttcaggacacagcgggggtctcacacttgctgtccccatccatggcccgagggggaacctggtggtctcttctgagcttttggacttggggatgccaaacacgtgctcaccctcacactcgccccggcccgctgcgcccctaattgccaaagggtagggaaatggcgaagccagccaccaggtcgctggtgacagggccagggttatgcaggaaggtggtgcggcattgccttccacatatgtaagtctctgggcggcgccctcccagctccctgcctctgtttccccatgtgggccgtggggaactcccagagctacctcttgggggagcgtggtggcagcgatgatggggagacgcctggaagctcacagaacttgggtctggctggctcctgcccgtgacgccttgcccagcagcaaggtgcgcaacatggctgccagccccgcctcccacccccaccccgagtcctgagctcactttcgccttctccatcccctgccgtgggggccacagccacacctcaccgcccagtccagctgtctccagaaggggacaggcagtccgcggtctctggacaatcaactcaaggtacgcccactgcaaggcctccctcccaccgcggcccctgcctggccacctggcctctctgcaccagggtgacaaggggtcctcgtctgccccccaatgctccagggccagtcctaaggagctgagggtctgaggacgcagggagggtggaggtgtcctgaggctgatggacagtgaccgccactggcccccaacatgaccacacgtgggtgctgaactcggggcgccgtgcccaccggcatggtcctcccgagctccgacagcattacctcacccggccccatctgttgccccggtccagccctgatggcgcgcgcctggtctgtctgattcccctagccgccaccccacgtttctgtaccgggtctctgcagtgttaaacggacgtgtaaatagtggtaaatagtgaaagcctgtccttccctaaatgtaaagccatctgtccggcgtaaggacgacaccgtcagctgtccgactcgcacacatttaataaactgagctcttgcattgaaaaaaaaaaaaaaaaaaacaaaaaaaacacaaaaacaaaaaaagaaaaacaaaatacacagagagacacaaacacaaacaataaaacaaacaaaaaaaaaaccaggagggagcggcaggaaagacaacaaaacacgccaggagaagagaaaaaacaaaagaaagacgaaaaagaagaaggagaacaaagacaagaaacgcaccacacaaaaaagaaagaacactaaacacaaagaaaacaagaacagacgaagaacaggagagaaaaaaaaagagcagagcagagggaaagagaaacaacaaagacactcaggaacgaacggagagaaaccacggggaggagagaagacacgaagacaaaaacaccaggagccgggggaggacagaaaacaacaaaagaagcaaacagaacatacaccagcagaagcaagaggaaacacaagcaagagcagagggaaaaagaaa

SEQ ID NO: 356063 - DNA, 2185 bp, Homo sapiens
  misc_feature (13)..(13): n is a, c, g, or t
gctcgcgatctanaaccggacgcgtgggctggggcaacgcctcgtcctgcagagggagccgacgacctcttttctgcagaaaagctccagcaggcgctgccttcacccacggatctgcccaggctgaaggcacacgctcaatgccccacgtgccttctccaggaggaacgaagcagggtttgagggttgggtggatggagctcagaaggaaaccccagccccaccacggatgacaccatccctcccgtcccatccccagcatgggcaaggccagcctttctggcagaaggagctgtcctcaactcagggccgctgtgagcaaagctgaccccagcccccacccccagttaacactgctgcttctctgaatgcatgtcacgctgcaccccatgctccgggcccacaccctgcaggacaaggagctccagacaggacgtccataagtcaccgaggtgtgccacccagcaggtgctggaggtgcccaatgctccctcctaggacctcgcagccaggcaaggctgtcaggttgttttgggggaagagggggtcatggatggctgagcagagagcggggaaaatgcaggctgagtggggcgacctcctgcctgccaggagccccctttcaggacacagcgggggtctcacacttgctgtccccatccatggcccgagggggaacctggtggtctcttctgagcttttggacttggggatgccaaacacgtgctcaccctcacactcgccccggcccgctgcgcccctaattgccaaagggtagggaaatggcgaagccagccaccaggtcgctggtgacagggccagggttatgcaggaaggtggtgcggcattgccttccacatatgtaagtctctgggcggcgccctcccagctccctgcctctgtttccccatgtgggccgtggggaactcccagagctacctcttgggggagcgtggtggcagcgatgatggggagacgcctggaagctcacagaacttgggtctggctggctcctgcccgtgacgccttgcccagcagcaaggtgcgcaacatggctgccagccccgcctcccacccccaccccgagtcctgagctcactttcgccttctccatcccctgccgtgggggccacagccacacctcaccgcccagtccagctgtctccagaaggggacaggcagtccgcggtctctggacaatcaactcaaggtacgcccactgcaaggcctccctcccaccgcggcccctgcctggccacctggcctctctgcaccagggtgacaaggggtcctcgtctgccccccaatgctccagggccagtcctaaggagctgagggtctgaggacgcagggagggtggaggtgtcctgaggctgatggacagtgaccgccactggcccccaacatgaccacacgtgggtgctgaactcggggcgccgtgcccaccggcatggtcctcccgagctccgacagcattacctcacccggccccatctgttgccccggtccagccctgatggcgcgcgcctggtctgtctgattcccctagccgccaccccacgtttctgtaccgggtctctgcagtgttaaacggacgtgtaaatagtggtaaatagtgaaagcctgtccttccctaaatgtaaagccatctgtccggcgtaaggacgacaccgtcagctgtccgactcgcacacatttaataaactgagctcttgcattgaaaaaaaaaaaaaaaaaaacaaaaaaaacacaaaaacaaaaaaagaaaaacaaaatacacagagagacacaaacacaaacaataaaacaaacaaaaaaaaaaccaggagggagcggcaggaaagacaacaaaacacgccaggagaagagaaaaaacaaaagaaagacgaaaaagaagaaggagaacaaagacaagaaacgcaccacacaaaaaagaaagaacactaaacacaaagaaaacaagaacagacgaagaacaggagagaaaaaaaaagagcagagcagagggaaagagaaacaacaaagacactcaggaacgaacggagagaaaccacggggaggagagaagacacgaagacaaaaacaccaggagccgggggaggacagaaaacaacaaaagaagcaaacagaacatacaccagcagaagcaagaggaaacacaagcaagagcagagggaaaaagaaa

SEQ ID NO: 356064 - DNA, 1422 bp, Homo sapiens
cgggcacattggtgcacaggcggttttgggcgcggcgttgttatagtgtcggcgctttcccccgtgttccgtggtggccattgtttaccctgctctcgttgtgtagtgtctgtcgcgtgggccgccctgccgtctgtcgttattgagctagttttggcattacgccgtgggcgatggttgcccgcgagtctcccggcctcgccctgtttgtggttccgctaactcggggtttggtgtttttttttctggacaacagagcgagaccctgtctcgtcagttttatttttaaaaagggcagaagcacagctgaaaggtgtggtgctccaggaactacctcgcctcccttcccaaggctgagtgagagaggccaccccatcatcccatcttagagaggctgggaaaggaagtcccaactttgcagccatttgcaaagctcccgggatccttcaggcctggggcgggcgggttgcgggaccttcgggagtcacctgggacatttcctgggaatgggggctctgatctggtccctgtgcccacagccccgatccccatcgagccgcagatctgccaggccacctgtgctgttatgaagctgtcctttgatgaggagtaccgccgtgccatgaacgagctaggtgagtgtcccaggtcctctgggaagccatcctccagcccccgaacaggtggtggctcctcggccgctaaagggacacaggctgggtcatctgagcttgggctggggattggagcccggagagggacagactccctggagtcacatagcacctctcatgagtggaccgtcaccctgggccctctgtccccatgagctgcgtgtggcctcccgatctggtctgaggcttcgggggtgactttcagccctaagttccctggggctcagaacagggaacggaccagaagggcaaagatagatagaagacaggcccagaattggaactgtagggggtgttttacgtttgaggacattgcaacatcttctctttgtcaatataaaaagtaattgaggccgggcgaggctgctcatacctgtaatcccagcagtttgggaggccaaggcaggaggatgactttagctcagaagttcgagaccaggctgggcaaaaatagtgagaccccatcactacaaaaaaaaaattagtcccagctactggggaggctgaggtgggaggatctcttgagcccaggaggttaaaggtgcaaggagctatgatcatgccaccacactccagactgggcaacagagccagaccctgtctcaaaaagaaaagtcttgctgtaacttttttttgagacagagtctcactctgttgcccaggctggagtgcagtggtacaatctcagctcactgcaaactccacctccgagtagctgggattacaggtgcccgcccccacacctgac

SEQ ID NO: 356065 - DNA, 1181 bp, Homo sapiens
  misc_feature (1157)..(1157): n is a, c, g, or t
  misc_feature (1161)..(1161): n is a, c, g, or t
cgggcacattggtgcacaggcggttttgggcgcggcgttgttatagtgtcggcgctttcccccgtgttccgtggtggccattgtttaccctgctctcgttgtgtagtgtctgtcgcgtgggccgccctgccgtctgtcgttattgagctagttttggcattacgccgtgggcgatggttgcccgcgagtctcccggcctcgccctgtttgtggttccgctaactcggggtttggtgtttttttttctggacaacagagcgagaccctgtctcgtcagttttatttttaaaaagggcagaagcacagctgaaaggtgtggtgctccaggaactacctcgcctcccttcccaaggctgagtgagagaggccaccccatcatcccatcttagagaggctgggaaaggaagtcccaactttgcagccatttgcaaagctcccgggatccttcaggcctggggcgggcgggttgcgggaccttcgggagtcacctgggacatttcctgggaatgggggctctgatctggtccctgtgcccacagccccgatccccatcgagccgcagatctgccaggccacctgtgctgttatgaagctgtcctttgatgaggagtaccgccgtgccatgaacgagctaggtgagtgtcccaggtcctctgggaagccatcctccagcccccgaacaggtggtggctcctcggccgctaaagggacacaggctgggtcatctgagcttgggctggggattggagcccggagagggacagactccctggagtcacatagcacctctcatgagtggaccgtcaccctgggccctctgtccccatgagctgcgtgtggcctcccgatctggtctgaggcttcgggggtgactttcagccctaagttccctggggctcagaacagggaacggaccagaagggcaaagatagatagaagacaggcccagaattggaactgtagggggtgttttacgtttgaggacattgcaacatcttctctttgtcaatataaaaagtaattgaggccgggcgaggctgctcatacctgtaatcccagcagtttgggaggccaaggcaggaggatgactttagctcagaagttcgagaccaggctgggcaaaaatagtgagaccccatcactacaaaaaaaaacancacncagcctcgtacctagccctc

SEQ ID NO: 356066 - DNA, 639 bp, Homo sapiens
gtgcagcagacggagccccaggtaccgggtggggcagagccagggaccaggggtggtgtcggcccaggcagaacggggctcctcgagttctgcccgcccccgcccacatcatcacgggtgagcagactgggtgctctgggactgtacccccgaccctggtgctctccctgcaggccttgctggcggtgaagtcggtgccggtggacgaggaccccgagacagaggtccccacacaccctgaggatggcacccctcagccgggcaacagcaaggtgagggggagggtgaaacgggggctggcgcagctgtctgggctggaagggggatcaggtctgcatcctcgccagtggtggtgccctcccatgcctccatccagcaccccctcgggtgtaggaaggcccctctggcgtgcagctcatgcagaagctgcgggcctggcgaggtggatggggaaatacgtcccgtagcgggggctaagtggggcaccatagacgtccccgtggagtcccttggctctgcgcggccaccctaggaatgccaggtgaggggggccagcctccccgaagcacgtgtgcagcctcctagcgtcccctcatctgtcccccaggtgggcgtggggctgcccttggggacggggca

SEQ ID NO: 356067 - DNA, 364 bp, Homo sapiens
cagttgatcgcaaagttaatatgggggccgggcgctgtgactcacacctgtgatcccagcactttggaaggcagaagcaggagaattgcttgagcccaggaatttggggctgcagtgagctgagatcatgctactgcactccagtctggacaacagagcgagaccctgtctcgtcagttttatttttaaaaagggcagaagcacagctgaaaggtgtggtgctccaggaactacctcgcctcccttcccaaggctgagtgagagaggccaccccatcatcccatcttagagaggctgggaaaggaagtcccaactttgcagccatttgcaaagctcccgggatccttcaggcctggggcgggcg

SEQ ID NO: 356068 - DNA, 12117 bp, Homo sapiens
gggtttggggagcaggaggcagacatgtgttgctttgcacgtcatctggtccttccacctggctgggcatgggatggtgacctcagctggaacatggggctcgagccagacctcagggtctccctgcgtgtagcccccaaccccaagcctgatccccaccggagacctgaacagccttggacatcatcggatcagggtgggaggtgccagcctctgccacctgacttccagtccctgtgcccctcccaccctgcccttgggcactcctgccctgcaggttcctcagaggggcaacccaaagccagagaggggcgggtcttgtcgggcctccagcctggacttcccagcccctctggggcagcatctgggtgccagacctcggttcctagggcctcgtttctccctctgggaacagccaaatggtggtccctgagactcaggacagaccaagaagaagccggatgacatggcaagccacacactgcgtcccctgagcaggacgggacagcccgactccatcctcccacctgcgactgagcccccacccctactcctgtcccagccgtgcccctggtgacatttgggtgggaggggaggggatgagggggcacctgggggtcagagaacaaatgacgggtgaatacatgtgtgtggccaggtggaggagggaggggaggagcaggtgggctggacagggccggtgtgaggaaggggctcaggctggcagggggaggtggcaagagggatgggctgccattggtggtctgagacaaaggcggagggaggaggcgagcgctgatgggaaaggaacaaagagggaaggggggcgtgaagggggttccggcgggagggccgagccgagggaggaggcgccggccagctggacagagggaggaggccaggccagagccagaagacggccagaggcacaaagaagccagcgcgctggcagagtcaagggatggggcagaggctgccggggccagcagggaccagctgaaggctgcgcagggggtgcgggccacacaggtagccaccctgagctcagccaccgatggagggtcgtggggctgctgcggtgatggcggtgggcttgggtccatctgtcctgccgtttctgcacagcttaggtgtcacccactggccttcgtggtgttttcattgtccatcggcagggacagctggtggtctgtctgccccgcctgtctggctgtcagcctctgggcaggcttgcttttatgggggagggtcctgtctgtctgtctgtcgccctctctggctgtgagcctgggggtgctgggctggccagtcggcttgctgggttaggctgtcccagctgtctgagtgtttgtccggctgtcaggatgtgtcctgggggctgggaaggagaggccgacccatcgtctgtcggtcgactggtcagttggacgttcagctgtctgtacgtctgtctgctggcccatctgtctccccttggggccacctctcactccacctgcccctctgcgccccggattgcctggccaccaccacgtgggcctgtacttgtccacaccagtgactcctgcctgagaccccccccaacccaggatcaggcaggacggctggggcttaggtcaggggccgtctgtccggaaggcatcaccgcgccctccccagaccatcagctgaaccctctgaccctgtgatcccagacgctgcaggagctgaagatggcgagctccgtggcgccctacgagcagctggtgaggcaggtggaggccttgaaggctgagaacagccacctgaggcaggagctaagggacaactccagccacctgtccaagctggagacagagacgtcgggcatgaaggaggtcctgaagcacctacagggaaaactggagcaggaggcccgagtgctggtgtcctcggggcagacggaggtgctggagcagctgaaggccctacagatggacatcaccagcctgtacaacctcaagttccagccgcccaccctgggcccggagcctgccgcccggacccccgagggcagcccagtacacggctccgggccctccaaggacagctttggggagctgagccgggccaccatccggctgctggaggaactggaccgggaacggtgtttcctgctgaatgagattgagaaggaggagaaggagaagctctggtactactctcagctgcagggcctgtccaagcgcctggacgagctgccgcacgtggagacgcgttctcgatgcagatggacctgatccggcagcagcttgagttcgaggcccagcacatccgctcgctgatggaggagcgcttcggcacctcggacgagatggtgcagcgggcacagatccgcgcctcgcgcctggagcagattgacaaggagctgctggaggcgcaggaccgagtgcagcagacggagccccaggccttgctggcggtgaagtcggtgccggtggacgaggaccccgagacagaggtccccacacaccctgaggatggcacccctcagccgggcaacagcaaggtggaggtggtcttctggctgttgtccatgttggcgacgcgcgaccaggaggatacagcgcgcacgctgctggccatgtccagctcgcccgagagctgcgtggccatgcgccgctcgggctgtctgcctctgctgctgcaaatcctccacggcaccgaggccgcggccgggggtcgcgccggggccccaggggcaccgggcgccaaggacgcacgcatgcgcgccaacgcggcgctgcacaacatcgtcttctcgcagccggaccagggcctggcgcgcaaggagatgcgcgtcctgcacgtgctggagcagatccgggcctactgcgagacctgctgggactggctgcaggcccgagacggcgggcccgagggaggtggcgccggcagcgccccgatccccatcgagccgcagatctgccaggccacctgtgctgttatgaagctgtcctttgatgaggagtaccgccgtgccatgaacgagctaggtgggctgcaggccgtggcagagctgctgcaggttgactatgagatgcacaagatgacccgggacccgctgaacctggcgctgcgccgctacgcgggcatgaccctcaccaacctcacctttggggacgttgccaacaaggccaccctgtgtgcgcgccgcggctgcatggaggccatcgtggcccagctggcctccgacagtgaggagctccaccaggtggtgtccagcatccttcggaacttgtcctggagggccgacatcaacagcaagaaggtgctgagggaggcgggcagcgtgactgccctggtgcagtgtgtcctgcgggccaccaaggagtccaccctgaagagcgtgctgagcgccctgtggaatctgtctgcacacagcacagagaacaaggcggccatctgccaggtggatggcgccctgggcttcctggtgagcaccctgacctacaagtgtcagagcaactcgctggccatcatcgagagcggcggcggcatcctccgcaatgtgtccagcctcgtcgccacccgtgaggactacaggcaggtgctccgggatcacaactgtctgcagacgctgctgcagcatctgacttcgcacagcctgaccatcgtgagcaacgcgtgcggcacgctctggaacctgtcggcccgcagcgcccgtgaccaggagctgctgtgggacctgggcgccgtgggcatgctgcgtaatctggtgcactccaagcacaagatgatcgccatgggcagcgccgccgccctgcgcaacctgctggcccatcggcccgccaagcaccaggcggccgccaccgccgtgtccccaggcagctgcgtgcccagcctgtacgtgcgcaagcagcgggcgctggaggccgagctggacgcacggcacctcgcgcaggcgctggagcacctggagaagcagggcccgccggcagccgaggccgccactaagaagccgctgccgcccctgcgacacctggacggcctggcccaagactatgcttccgattcgggctgctttgacgacgacgatgcaccgtcatccctggctgcggccgcggccaccggggagccagccagccctgccgcgctgtccctcttcctgggcagccccttcctgcaggggcaggcgctggctcgcaccccgcccacccgccgaggcggcaaggaggcagagaaggacaccagtggggaggcagccgtggcggccaaggccaaggccaagctggcgcttgcagtggcgcgcatcgaccagctggtggaggacatctccgccctgcacacctcgtccgacgatagcttcagcctcagctctggagacccgggacaggaggcgccacgggagggccgcgcccagtcctgctcgccatgccgcggcccggagggcgggcggcgagaggcaggaagccgggcgcacccgctgctgcggctcaaggcggcccacgccagcctctccaacgacagcctcaacagcggcagtgccagcgacgggtactgcccacgcgaacatatgctgccctgcccgctggccgcactggcttcgcgccgcgaggaccccaggtgtgggcagcctcggcccagccggcttgaccttgacctgcccggctgccaggccgagcccccggcccgcgaggccacctccgccgacgcccgcgtgcgcaccatcaagctgtcgcctacctatcagcacgtgccactgcttgagggtgcctcaagggcgggtgcagagcccctcgcggggcctggaatctctccaggggcccggaagcaggcctggctgccggcagaccacctgagcaaggttcccgagaagctggcggctgccccgctgtctgtggccagcaaggcactgcagaaactggcggcgcaagaggggccactctcgctgtcccgatgcagctccctttcctcgctgtcctcggccggccgcccaggccccagcgagggtggtgacctggatgacagtgactcctccctggaggggctggaggaggccggccccagcgaggctgagctggacagcacgtggcgggcgcccggggccacctcgctgcccgtagccattccggctccccggcgtaaccgaggccggggcctgggggtggaagacgccacgccgtccagctcgtcggagaactacgtgcaggagacaccgcttgtgctgagccgctgcagctctgtgagctcgctgggcagcttcgagagcccgtccatcgccagctccatccccagtgaaccttgcagcgggcagggcagcggcaccatcagccctagcgagctgcccgacagccccggacagaccatgcctcccagccggagcaagacgccaccgctggcgcccgcgccacagggtccccccgaggccacccagttcagcctgcagtgggagagctacgtgaagcgcttcctggacatcgccgactgccgggagcgctgccggctgccatctgagctggacgcaggcagcgtgcgctttaccgtggagaagccagacgagaacttctcgtgcgcctccagcctcagcgcgctggccttgcacgagcactacgtgcagcaggacgtggagctgcggctgctgccctcggcctgccccgagcgcggcgggggcgccgggggcgccggcctccactttgcagggcaccggcggcgggaggaggggccggcgcccacgggttctcgccctcgcggcgccgcggaccaggagctggaactgctgcgggagtgcctgggagccgccgtgcctgcccggctgcgcaaggtggcctccgcgctggtgccaggtcgccgcgcactccccgtgcccgtctacatgttggtgcccgccccggccccggcccaggaggacgactcctgcactgactccgcggagggcacgccggtcaacttctctagcgccgcctcgctcagcgacgagacgctgcagggaccccccagggaccagcccgggggaccagcgggcaggcaaagacccaccggccgccccacctctgccagacaggccatggggcaccggcacaaggcgggaggcgccggccgcagcgcggagcagtctcggggcgcgggcaagaaccgagcagggctggagctgcccctgggccggcccccgagcgcccccgcagacaaggacggctcaaagcccggccggacccgcggggacggggcgctccagtcgctgtgcctcacgacgcccactgaggaggccgtgtactgcttctacggcaacgactcggacgaggagcccccggcggccgcgcccacgccaacccaccggcgcacatcggccatccctcgcgcttttacgcgggagcgtccgcagggccggaaggaggcccctgccccgtccaaggctgcaccagctgccccgccgcccgcccggacccagcccagcctcattgctgacgagaccccgccctgctactccctgagctcctccgccagctccctcagcgagcccgagccctcggagccgccggccgtccatccacgaggccgggagcccgcggtcaccaaggacccgggcccaggaggcggacgcgacagctcgcccagcccgcgggccgcggaggagcttctgcagcggtgcatcagctcggccctgcccaggcgccggccccccgtgtctggcctgcggcgccgcaagccccgagccacccggctggatgagcggcccgcagaggggtcccgggaacgcggcgaggaggcagcgggctcggaccgggcctccgacctggatagcgtggagtggcgcgccatccaggagggcgccaattcaattgtcacgtggctgcaccaggcagcagctgccacgcgggaggcctcgtccgagtccgactccatcctgtccttcgtatccgggctgtcagtgggatccaccctacagccccccaagcacaggaagggacgacaggcggagggagaaatgggcagtgcccggcggccagagaaaaggggcgcagcctcagtcaagaccagcgggagcccccgttcccctgcaggccccgagaagccacgtggcacacagaagaccacgcccggggtgccagctgtgctccggggacgaacagtgatctacgtccccagcccggcaccccgtgcccagcccaaagggacccccggcccccgcgccacaccgcggaaggtggcgcccccttgcctggcacagcccgcggctccagccaaagtcccgagccccgggcagcagcggtcgcggagcctacaccggcctgccaagacctcggagctggcgacgctgagccagccccccagaagcgccacaccgcccgcccgcctcgccaagaccccctcctccagctcctcccagacctcgcccgcctcccagcccctgcccagaaagcgccccccggtcacccaggctgctggggccctgcccggccccggagcctccccggtgcccaaaacgccggcgcgcacccttctggcgaagcagcacaagacgcagagatcgcccgtgcggatcccgttcatgcagaggccggcccggcgtgggccgccaccgctggctcgggcagtcccggagccgggccccaggggccgggcggggaccgaggcgggcccgggggcgcgcgggggccgcctgggcctggtgcgtgtggcctcagccctctccagcggcagcgagtcctccgaccgctcgggcttccggcgacagctaaccttcatcaaggagtcgccgggcttgcggcgccgccgctccgagctgtcctcggccgagtccgcggcctctgccccccagggcgcctcgccccgccgcggccggcccgcgctgcccgccgtcttcctctgctcctcgcgctgcgaagagctccgagcggcaccccggcagggcccggccccggcccggcagcggccccccgcggcccgacccagccctggcgagcgccctgcccggcgcaccacctccgagagcccgtcccgcctgcctgtgcgcgcgcccgccgcccggccggagactgtcaagcgctacgcgtcgctgccgcacatcagcgtggcccgcaggcccgacggcgccgtccccgcggcccctgcctcagccgacgccgcgcgccgcagcagcgacggggagccccggccgctccccagggtggccgcgccgggcacgacctggcggcgcatccgagatgaggacgtgccccacatcctgcgcagcacgcttcccgccacggccctgccactgcggggctccacgcccgaggacgccccggccgggcccccgccgcgcaagaccagcgacgccgtggtccagaccgaggaggtcgccgcccccaagaccaactccagcacgtccccgagcctggagaccagggagccccccggggcccccgccggcggccagctctccctcctcggcagcgacgtggacggtcccagcctcgccaaggctcccatctccgcacccttcgtgcacgagggcctgggggtcgccgtggggggcttccccgccagccggcacggctcccccagccgctcggcccgagtaccccccttcaactatgtgcccagccccatggtggtcgcagccaccaccgactcggccgcggagaaagccccggccactgcctccgccaccctcctggaatagtggcctaggccggccttctggaacgttctctcccggccctgcggcgcggtctggctgccccatgggcctgcgctgtagacgtcccccataggtcgccccagggcctctgcccacccgagccccaccactctcagaacccccgcccagcgcacggcgacctcgcgcctcaccggaagaccttgcctctgtgccgcggaggtccaggaggaaacggggcggccgctaggcctcaagtcccgaccgtggagcgctggcaagggcgtcctggcccagccctgagcgcgcggcccttcccctgtcggaagccgttgcttgaccccgggcgagggaggcggtagcctccgggtccgggtctgggtctgggtccgctgcttcgcagggacagcgctggggaggtgacggcgcccgccgcaggtggggcgaggctgggggagggcggcgccgcggcgggcctgccagctgggggcctttgcggcgcgcaggggcgaagcctgtaatcactgcagccgccggtaattcgctaatgagggctttgcagggattgttttcattctcagccccagctgtgggagtgcgggtgggggtgtggccgagccccggcaggaagccccgcccagacggtgttcagggaacccggagcccaagcgctccggcggagcccaaaagggtgggggtgggaggggcagaggccaacggatccccctgcctgtcgcaccccttggcgggagacgggaaggcagcgggctgcgtacgatgggaccctggtgcagacgccgggccggctgacatttggaccccatcccagaggagatgctggctaccagctggggcgaccccaagggtcgctggagtcagtatcggcccggcgcagccgcggcgggcgaggccaatggaaaggagactgaggggagtcccggcagtgagcccgaggccctgggacctggagcccgcgctggcctctccccagcggagcctgcacgttacggagaccatcacatgtgggcgtggtcagtgcccaggaccgcaccgctgctcatcttgtcccttttcaattcccttctggttcatgatgcataaagcgctaggccctagaactccagaaacagcacagctggggcggggacccagccttgccctccacccgaggctctgggacaaggcgggaggttcgggggccttccggcaggtgaacgcagggctggagagtatttggtgccagatgaggtgaaagcttatagaagggcctgaggggctcggctgcctcatcccctggcgggggaggctgggagctgggcctcctgcgtggggtgggactcgcaggggccgggtctccgtgactggggcaacgcctcgtcctgcagagggagccgacgacctcttttctgcagaaaagctccagcaggcgctgccttcacccacggatctgcccaggctgaaggcacacgctcaatgccccacgtgccttctccaggaggaacgaagcagggtttgagggttgggtggatggagctcagaaggaaaccccagccccaccacggatgacaccatccctcccgtcccatccccagcatgggcaaggccagcctttctggcagaaggagctgtcctcaactcagggccgctgtgagcaaagctgaccccagcccccacccccagttaacactgctgcttctctgaatgcatgtcacgctgcaccccatgctccgggcccacaccctgcaggacaaggagctccagacaggacgtccataagtcaccgaggtgtgccacccagcaggtgctggaggtgcccaatgctccctcctaggacctcgcagccaggcaaggctgtcaggttgttttgggggaagagggggtcatggatggctgagcagagagcggggaaaatgcaggctgagtggggcgacctcctgcctgccaggagccccctttcaggacacagcgggggtctcacacttgctgtccccatccatggcccgagggggaacctggtggtctcttctgagcttttggacttggggatgccaaacacgtgctcaccctcacactcgccccggcccgctgcgcccctaattgccaaagggtagggaaatggcgaagccagccaccaggtcgctggtgacagggccagggttatgcaggaaggtggtgcggcattgccttccacatatgtaagtctctgggcggcgccctcccagctccctgcctctgtttccccatgtgggccgtggggaactcccagagctacctcttgggggagcgtggtggcagcgatgatggggagacgcctggaagctcacagaacttgggtctggctggctcctgcccgtgacgccttgcccagcagcaaggtgcgcaacatggctgccagccccgcctcccacccccaccccgagtcctgagctcactttcgccttctccatcccctgccgtgggggccacagccacacctcaccgcccagtccagctgtctccagaaggggacaggcagtccgcggtctctggacaatcaactcaaggtacgcccactgcaaggcctccctcccaccgcggcccctgcctggccacctggcctctctgcaccagggtgacaaggggtcctcgtctgccccccaatgctccagggccagtcctaaggagctgagggtctgaggacgcagggagggtggaggtgtcctgaggctgatggacagtgaccgccactggcccccaacatgaccacacgtgggtgctgaactcggggcgccgtgcccaccggcatggtcctcccgagctccgacagcattacctcacccggccccatctgttgccccggtccagccctgatggcgcgcgcctggtctgtctgattcccctagccgccaccccacgtttctgtaccgggtctctgcagtgttaaacggacgtgtaaatagtggtaaatagtgaaagcctgtccttccctaaatgtaaagccatctgtccggcgtaaggacgacaccgtcagctgtccgactcgcacacatttaataaactgagctcttgcattgaaaaaaaaaaaaaaaaaaacaaaaaaaacacaaaaacaaaaaaagaaaaacaaaatacacagagagacacaaacacaaacaataaaacaaacaaaaaaaaaaccaggagggagcggcaggaaagacaacaaaacacgccaggagaagagaaaaaacaaaagaaagacgaaaaagaagaaggagaacaaagacaagaaacgcaccacacaaaaaagaaagaacactaaacacaaagaaaacaagaacagacgaagaacaggagagaaaaaaaaagagcagagcagagggaaagagaaacaacaaagacactcaggaacgaacggagagaaaccacggggaggagagaagacacgaagacaaaaacaccaggagccgggggaggacagaaaacaacaaaagaagcaaacagaacatacaccagcagaagcaagaggaaacacaagcaagagcagagggaaaaagaaa

SEQ ID NO: 356069 - DNA, 10613 bp, Homo sapiens
gcagcgccgcctgcccaggcccggaccgggctttgtccgccccggagcccctgcccgcgccgcggagaccccggagcccgcgcgctccgaggccaccccgggccgggatttccggtggggcccgcggagccgcgcagagggaggaggccccagacccaggcgccccgccagcccagctgcacgtaagcggacgctgcaggagctgaagatggcgagctccgtggcgccctacgagcagctggtgaggcaggtggaggccttgaaggctgagaacagccacctgaggcaggagctaagggacaactccagccacctgtccaagctggagacagagacgtcgggcatgaaggaggtcctgaagcacctacagggaaaactggagcaggaggcccgagtgctggtgtcctcggggcagacggaggtgctggagcagctgaaggccctacagatggacatcaccagcctgtacaacctcaagttccagccgcccaccctgggcccggagcctgccgcccggacccccgagggcagcccagtacacggctccgggccctccaaggacagctttggggagctgagccgggccaccatccggctgctggaggaactggaccgggaacggtgtttcctgctgaatgagattgagaaggaggagaaggagaagctctggtactactctcagctgcagggcctgtccaagcgcctggacgagctgccgcacgtggagacgcgttctcgatgcagatggacctgatccggcagcagcttgagttcgaggcccagcacatccgctcgctgatggaggagcgcttcggcacctcggacgagatggtgcagcgggcacagatccgcgcctcgcgcctggagcagattgacaaggagctgctggaggcgcaggaccgagtgcagcagacggagccccaggccttgctggcggtgaagtcggtgccggtggacgaggaccccgagacagaggtccccacacaccctgaggatggcacccctcagccgggcaacagcaaggtggaggtggtcttctggctgttgtccatgttggcgacgcgcgaccaggaggatacagcgcgcacgctgctggccatgtccagctcgcccgagagctgcgtggccatgcgccgctcgggctgtctgcctctgctgctgcaaatcctccacggcaccgaggccgcggccgggggtcgcgccggggccccaggggcaccgggcgccaaggacgcacgcatgcgcgccaacgcggcgctgcacaacatcgtcttctcgcagccggaccagggcctggcgcgcaaggagatgcgcgtcctgcacgtgctggagcagatccgggcctactgcgagacctgctgggactggctgcaggcccgagacggcgggcccgagggaggtggcgccggcagcgccccgatccccatcgagccgcagatctgccaggccacctgtgctgttatgaagctgtcctttgatgaggagtaccgccgtgccatgaacgagctaggtgggctgcaggccgtggcagagctgctgcaggttgactatgagatgcacaagatgacccgggacccgctgaacctggcgctgcgccgctacgcgggcatgaccctcaccaacctcacctttggggacgttgccaacaaggccaccctgtgtgcgcgccgcggctgcatggaggccatcgtggcccagctggcctccgacagtgaggagctccaccaggtggtgtccagcatccttcggaacttgtcctggagggccgacatcaacagcaagaaggtgctgagggaggcgggcagcgtgactgccctggtgcagtgtgtcctgcgggccaccaaggagtccaccctgaagagcgtgctgagcgccctgtggaatctgtctgcacacagcacagagaacaaggcggccatctgccaggtggatggcgccctgggcttcctggtgagcaccctgacctacaagtgtcagagcaactcgctggccatcatcgagagcggcggcggcatcctccgcaatgtgtccagcctcgtcgccacccgtgaggactacaggcaggtgctccgggatcacaactgtctgcagacgctgctgcagcatctgacttcgcacagcctgaccatcgtgagcaacgcgtgcggcacgctctggaacctgtcggcccgcagcgcccgtgaccaggagctgctgtgggacctgggcgccgtgggcatgctgcgtaatctggtgcactccaagcacaagatgatcgccatgggcagcgccgccgccctgcgcaacctgctggcccatcggcccgccaagcaccaggcggccgccaccgccgtgtccccaggcagctgcgtgcccagcctgtacgtgcgcaagcagcgggcgctggaggccgagctggacgcacggcacctcgcgcaggcgctggagcacctggagaagcagggcccgccggcagccgaggccgccactaagaagccgctgccgcccctgcgacacctggacggcctggcccaagactatgcttccgattcgggctgctttgacgacgacgatgcaccgtcatccctggctgcggccgcggccaccggggagccagccagccctgccgcgctgtccctcttcctgggcagccccttcctgcaggggcaggcgctggctcgcaccccgcccacccgccgaggcggcaaggaggcagagaaggacaccagtggggaggcagccgtggcggccaaggccaaggccaagctggcgcttgcagtggcgcgcatcgaccagctggtggaggacatctccgccctgcacacctcgtccgacgatagcttcagcctcagctctggagacccgggacaggaggcgccacgggagggccgcgcccagtcctgctcgccatgccgcggcccggagggcgggcggcgagaggcaggaagccgggcgcacccgctgctgcggctcaaggcggcccacgccagcctctccaacgacagcctcaacagcggcagtgccagcgacgggtactgcccacgcgaacatatgctgccctgcccgctggccgcactggcttcgcgccgcgaggaccccaggtgtgggcagcctcggcccagccggcttgaccttgacctgcccggctgccaggccgagcccccggcccgcgaggccacctccgccgacgcccgcgtgcgcaccatcaagctgtcgcctacctatcagcacgtgccactgcttgagggtgcctcaagggcgggtgcagagcccctcgcggggcctggaatctctccaggggcccggaagcaggcctggctgccggcagaccacctgagcaaggttcccgagaagctggcggctgccccgctgtctgtggccagcaaggcactgcagaaactggcggcgcaagaggggccactctcgctgtcccgatgcagctccctttcctcgctgtcctcggccggccgcccaggccccagcgagggtggtgacctggatgacagtgactcctccctggaggggctggaggaggccggccccagcgaggctgagctggacagcacgtggcgggcgcccggggccacctcgctgcccgtagccattccggctccccggcgtaaccgaggccggggcctgggggtggaagacgccacgccgtccagctcgtcggagaactacgtgcaggagacaccgcttgtgctgagccgctgcagctctgtgagctcgctgggcagcttcgagagcccgtccatcgccagctccatccccagtgaaccttgcagcgggcagggcagcggcaccatcagccctagcgagctgcccgacagccccggacagaccatgcctcccagccggagcaagacgccaccgctggcgcccgcgccacagggtccccccgaggccacccagttcagcctgcagtgggagagctacgtgaagcgcttcctggacatcgccgactgccgggagcgctgccggctgccatctgagctggacgcaggcagcgtgcgctttaccgtggagaagccagacgagaacttctcgtgcgcctccagcctcagcgcgctggccttgcacgagcactacgtgcagcaggacgtggagctgcggctgctgccctcggcctgccccgagcgcggcgggggcgccgggggcgccggcctccactttgcagggcaccggcggcgggaggaggggccggcgcccacgggttctcgccctcgcggcgccgcggaccaggagctggaactgctgcgggagtgcctgggagccgccgtgcctgcccggctgcgcaaggtggcctccgcgctggtgccaggtcgccgcgcactccccgtgcccgtctacatgttggtgcccgccccggccccggcccaggaggacgactcctgcactgactccgcggagggcacgccggtcaacttctctagcgccgcctcgctcagcgacgagacgctgcagggaccccccagggaccagcccgggggaccagcgggcaggcaaagacccaccggccgccccacctctgccagacaggccatggggcaccggcacaaggcgggaggcgccggccgcagcgcggagcagtctcggggcgcgggcaagaaccgagcagggctggagctgcccctgggccggcccccgagcgcccccgcagacaaggacggctcaaagcccggccggacccgcggggacggggcgctccagtcgctgtgcctcacgacgcccactgaggaggccgtgtactgcttctacggcaacgactcggacgaggagcccccggcggccgcgcccacgccaacccaccggcgcacatcggccatccctcgcgcttttacgcgggagcgtccgcagggccggaaggaggcccctgccccgtccaaggctgcaccagctgccccgccgcccgcccggacccagcccagcctcattgctgacgagaccccgccctgctactccctgagctcctccgccagctccctcagcgagcccgagccctcggagccgccggccgtccatccacgaggccgggagcccgcggtcaccaaggacccgggcccaggaggcggacgcgacagctcgcccagcccgcgggccgcggaggagcttctgcagcggtgcatcagctcggccctgcccaggcgccggccccccgtgtctggcctgcggcgccgcaagccccgagccacccggctggatgagcggcccgcagaggggtcccgggaacgcggcgaggaggcagcgggctcggaccgggcctccgacctggatagcgtggagtggcgcgccatccaggagggcgccaattcaattgtcacgtggctgcaccaggcagcagctgccacgcgggaggcctcgtccgagtccgactccatcctgtccttcgtatccgggctgtcagtgggatccaccctacagccccccaagcacaggaagggacgacaggcggagggagaaatgggcagtgcccggcggccagagaaaaggggcgcagcctcagtcaagaccagcgggagcccccgttcccctgcaggccccgagaagccacgtggcacacagaagaccacgcccggggtgccagctgtgctccggggacgaacagtgatctacgtccccagcccggcaccccgtgcccagcccaaagggacccccggcccccgcgccacaccgcggaaggtggcgcccccttgcctggcacagcccgcggctccagccaaagtcccgagccccgggcagcagcggtcgcggagcctacaccggcctgccaagacctcggagctggcgacgctgagccagccccccagaagcgccacaccgcccgcccgcctcgccaagaccccctcctccagctcctcccagacctcgcccgcctcccagcccctgcccagaaagcgccccccggtcacccaggctgctggggccctgcccggccccggagcctccccggtgcccaaaacgccggcgcgcacccttctggcgaagcagcacaagacgcagagatcgcccgtgcggatcccgttcatgcagaggccggcccggcgtgggccgccaccgctggctcgggcagtcccggagccgggccccaggggccgggcggggaccgaggcgggcccgggggcgcgcgggggccgcctgggcctggtgcgtgtggcctcagccctctccagcggcagcgagtcctccgaccgctcgggcttccggcgacagctaaccttcatcaaggagtcgccgggcttgcggcgccgccgctccgagctgtcctcggccgagtccgcggcctctgccccccagggcgcctcgccccgccgcggccggcccgcgctgcccgccgtcttcctctgctcctcgcgctgcgaagagctccgagcggcaccccggcagggcccggccccggcccggcagcggccccccgcggcccgacccagccctggcgagcgccctgcccggcgcaccacctccgagagcccgtcccgcctgcctgtgcgcgcgcccgccgcccggccggagactgtcaagcgctacgcgtcgctgccgcacatcagcgtggcccgcaggcccgacggcgccgtccccgcggcccctgcctcagccgacgccgcgcgccgcagcagcgacggggagccccggccgctccccagggtggccgcgccgggcacgacctggcggcgcatccgagatgaggacgtgccccacatcctgcgcagcacgcttcccgccacggccctgccactgcggggctccacgcccgaggacgccccggccgggcccccgccgcgcaagaccagcgacgccgtggtccagaccgaggaggtcgccgcccccaagaccaactccagcacgtccccgagcctggagaccagggagccccccggggcccccgccggcggccagctctccctcctcggcagcgacgtggacggtcccagcctcgccaaggctcccatctccgcacccttcgtgcacgagggcctgggggtcgccgtggggggcttccccgccagccggcacggctcccccagccgctcggcccgagtaccccccttcaactatgtgcccagccccatggtggtcgcagccaccaccgactcggccgcggagaaagccccggccactgcctccgccaccctcctggaatagtggcctaggccggccttctggaacgttctctcccggccctgcggcgcggtctggctgccccatgggcctgcgctgtagacgtcccccataggtcgccccagggcctctgcccacccgagccccaccactctcagaacccccgcccagcgcacggcgacctcgcgcctcaccggaagaccttgcctctgtgccgcggaggtccaggaggaaacggggcggccgctaggcctcaagtcccgaccgtggagcgctggcaagggcgtcctggcccagccctgagcgcgcggcccttcccctgtcggaagccgttgcttgaccccgggcgagggaggcggtagcctccgggtccgggtctgggtctgggtccgctgcttcgcagggacagcgctggggaggtgacggcgcccgccgcaggtggggcgaggctgggggagggcggcgccgcggcgggcctgccagctgggggcctttgcggcgcgcaggggcgaagcctgtaatcactgcagccgccggtaattcgctaatgagggctttgcagggattgttttcattctcagccccagctgtgggagtgcgggtgggggtgtggccgagccccggcaggaagccccgcccagacggtgttcagggaacccggagcccaagcgctccggcggagcccaaaagggtgggggtgggaggggcagaggccaacggatccccctgcctgtcgcaccccttggcgggagacgggaaggcagcgggctgcgtacgatgggaccctggtgcagacgccgggccggctgacatttggaccccatcccagaggagatgctggctaccagctggggcgaccccaagggtcgctggagtcagtatcggcccggcgcagccgcggcgggcgaggccaatggaaaggagactgaggggagtcccggcagtgagcccgaggccctgggacctggagcccgcgctggcctctccccagcggagcctgcacgttacggagaccatcacatgtgggcgtggtcagtgcccaggaccgcaccgctgctcatcttgtcccttttcaattcccttctggttcatgatgcataaagcgctaggccctagaactccagaaacagcacagctggggcggggacccagccttgccctccacccgaggctctgggacaaggcgggaggttcgggggccttccggcaggtgaacgcagggctggagagtatttggtgccagatgaggtgaaagcttatagaagggcctgaggggctcggctgcctcatcccctggcgggggaggctgggagctgggcctcctgcgtggggtgggactcgcaggggccgggtctccgtgactggggcaacgcctcgtcctgcagagggagccgacgacctcttttctgcagaaaagctccagcaggcgctgccttcacccacggatctgcccaggctgaaggcacacgctcaatgccccacgtgccttctccaggaggaacgaagcagggtttgagggttgggtggatggagctcagaaggaaaccccagccccaccacggatgacaccatccctcccgtcccatccccagcatgggcaaggccagcctttctggcagaaggagctgtcctcaactcagggccgctgtgagcaaagctgaccccagcccccacccccagttaacactgctgcttctctgaatgcatgtcacgctgcaccccatgctccgggcccacaccctgcaggacaaggagctccagacaggacgtccataagtcaccgaggtgtgccacccagcaggtgctggaggtgcccaatgctccctcctaggacctcgcagccaggcaaggctgtcaggttgttttgggggaagagggggtcatggatggctgagcagagagcggggaaaatgcaggctgagtggggcgacctcctgcctgccaggagccccctttcaggacacagcgggggtctcacacttgctgtccccatccatggcccgagggggaacctggtggtctcttctgagcttttggacttggggatgccaaacacgtgctcaccctcacactcgccccggcccgctgcgcccctaattgccaaagggtagggaaatggcgaagccagccaccaggtcgctggtgacagggccagggttatgcaggaaggtggtgcggcattgccttccacatatgtaagtctctgggcggcgccctcccagctccctgcctctgtttccccatgtgggccgtggggaactcccagagctacctcttgggggagcgtggtggcagcgatgatggggagacgcctggaagctcacagaacttgggtctggctggctcctgcccgtgacgccttgcccagcagcaaggtgcgcaacatggctgccagccccgcctcccacccccaccccgagtcctgagctcactttcgccttctccatcccctgccgtgggggccacagccacacctcaccgcccagtccagctgtctccagaaggggacaggcagtccgcggtctctggacaatcaactcaaggtacgcccactgcaaggcctccctcccaccgcggcccctgcctggccacctggcctctctgcaccagggtgacaaggggtcctcgtctgccccccaatgctccagggccagtcctaaggagctgagggtctgaggacgcagggagggtggaggtgtcctgaggctgatggacagtgaccgccactggcccccaacatgaccacacgtgggtgctgaactcggggcgccgtgcccaccggcatggtcctcccgagctccgacagcattacctcacccggccccatctgttgccccggtccagccctgatggcgcgcgcctggtctgtctgattcccctagccgccaccccacgtttctgtaccgggtctctgcagtgttaaacggacgtgtaaatagtggtaaatagtgaaagcctgtccttccctaaatgtaaagccatctgtccggcgtaaggacgacaccgtcagctgtccgactcgcacacatttaataaactgagctcttgcattgaaaaaaaaaaaaaaaaaaacaaaaaaaacacaaaaacaaaaaaagaaaaacaaaatacacagagagacacaaacacaaacaataaaacaaacaaaaaaaaaaccaggagggagcggcaggaaagacaacaaaacacgccaggagaagagaaaaaacaaaagaaagacgaaaaagaagaaggagaacaaagacaagaaacgcaccacacaaaaaagaaagaacactaaacacaaagaaaacaagaacagacgaagaacaggagagaaaaaaaaagagcagagcagagggaaagagaaacaacaaagacactcaggaacgaacggagagaaaccacggggaggagagaagacacgaagacaaaaacaccaggagccgggggaggacagaaaacaacaaaagaagcaaacagaacatacaccagcagaagcaagaggaaacacaagcaagagcagagggaaaaagaaa

SEQ ID NO: 356070 - DNA, 9738 bp, Homo sapiens
cgggcacattggtgcacaggcggttttgggcgcggcgttgttatagtgtcggcgctttcccccgtgttccgtggtggccattgtttaccctgctctcgttgtgtagtgtctgtcgcgtgggccgccctgccgtctgtcgttattgagctagttttggcattacgccgtgggcgatggttgcccgcgagtctcccggcctcgccctgtttgtggttccgctaactcggggtttggtgtttttttttctggacaacagagcgagaccctgtctcgtcagttttatttttaaaaagggcagaagcacagctgaaaggtgtggtgctccaggaactacctcgcctcccttcccaaggctgagtgagagaggccaccccatcatcccatcttagagaggctgggaaaggaagtcccaactttgcagccatttgcaaagctcccgggatccttcaggcctggggcgggcgggttgcgggaccttcgggagtcacctgggacatttcctgggaatgggggctctgatctggtccctgtgcccacagccccgatccccatcgagccgcagatctgccaggccacctgtgctgttatgaagctgtcctttgatgaggagtaccgccgtgccatgaacgagctaggtgggctgcaggccgtggcagagctgctgcaggttgactatgagatgcacaagatgacccgggacccgctgaacctggcgctgcgccgctacgcgggcatgaccctcaccaacctcacctttggggacgttgccaacaaggccaccctgtgtgcgcgccgcggctgcatggaggccatcgtggcccagctggcctccgacagtgaggagctccaccaggtggtgtccagcatccttcggaacttgtcctggagggccgacatcaacagcaagaaggtgctgagggaggcgggcagcgtgactgccctggtgcagtgtgtcctgcgggccaccaaggagtccaccctgaagagcgtgctgagcgccctgtggaatctgtctgcacacagcacagagaacaaggcggccatctgccaggtggatggcgccctgggcttcctggtgagcaccctgacctacaagtgtcagagcaactcgctggccatcatcgagagcggcggcggcatcctccgcaatgtgtccagcctcgtcgccacccgtgaggactacaggcaggtgctccgggatcacaactgtctgcagacgctgctgcagcatctgacttcgcacagcctgaccatcgtgagcaacgcgtgcggcacgctctggaacctgtcggcccgcagcgcccgtgaccaggagctgctgtgggacctgggcgccgtgggcatgctgcgtaatctggtgcactccaagcacaagatgatcgccatgggcagcgccgccgccctgcgcaacctgctggcccatcggcccgccaagcaccaggcggccgccaccgccgtgtccccaggcagctgcgtgcccagcctgtacgtgcgcaagcagcgggcgctggaggccgagctggacgcacggcacctcgcgcaggcgctggagcacctggagaagcagggcccgccggcagccgaggccgccactaagaagccgctgccgcccctgcgacacctggacggcctggcccaagactatgcttccgattcgggctgctttgacgacgacgatgcaccgtcatccctggctgcggccgcggccaccggggagccagccagccctgccgcgctgtccctcttcctgggcagccccttcctgcaggggcaggcgctggctcgcaccccgcccacccgccgaggcggcaaggaggcagagaaggacaccagtggggaggcagccgtggcggccaaggccaaggccaagctggcgcttgcagtggcgcgcatcgaccagctggtggaggacatctccgccctgcacacctcgtccgacgatagcttcagcctcagctctggagacccgggacaggaggcgccacgggagggccgcgcccagtcctgctcgccatgccgcggcccggagggcgggcggcgagaggcaggaagccgggcgcacccgctgctgcggctcaaggcggcccacgccagcctctccaacgacagcctcaacagcggcagtgccagcgacgggtactgcccacgcgaacatatgctgccctgcccgctggccgcactggcttcgcgccgcgaggaccccaggtgtgggcagcctcggcccagccggcttgaccttgacctgcccggctgccaggccgagcccccggcccgcgaggccacctccgccgacgcccgcgtgcgcaccatcaagctgtcgcctacctatcagcacgtgccactgcttgagggtgcctcaagggcgggtgcagagcccctcgcggggcctggaatctctccaggggcccggaagcaggcctggctgccggcagaccacctgagcaaggttcccgagaagctggcggctgccccgctgtctgtggccagcaaggcactgcagaaactggcggcgcaagaggggccactctcgctgtcccgatgcagctccctttcctcgctgtcctcggccggccgcccaggccccagcgagggtggtgacctggatgacagtgactcctccctggaggggctggaggaggccggccccagcgaggctgagctggacagcacgtggcgggcgcccggggccacctcgctgcccgtagccattccggctccccggcgtaaccgaggccggggcctgggggtggaagacgccacgccgtccagctcgtcggagaactacgtgcaggagacaccgcttgtgctgagccgctgcagctctgtgagctcgctgggcagcttcgagagcccgtccatcgccagctccatccccagtgaaccttgcagcgggcagggcagcggcaccatcagccctagcgagctgcccgacagccccggacagaccatgcctcccagccggagcaagacgccaccgctggcgcccgcgccacagggtccccccgaggccacccagttcagcctgcagtgggagagctacgtgaagcgcttcctggacatcgccgactgccgggagcgctgccggctgccatctgagctggacgcaggcagcgtgcgctttaccgtggagaagccagacgagaacttctcgtgcgcctccagcctcagcgcgctggccttgcacgagcactacgtgcagcaggacgtggagctgcggctgctgccctcggcctgccccgagcgcggcgggggcgccgggggcgccggcctccactttgcagggcaccggcggcgggaggaggggccggcgcccacgggttctcgccctcgcggcgccgcggaccaggagctggaactgctgcgggagtgcctgggagccgccgtgcctgcccggctgcgcaaggtggcctccgcgctggtgccaggtcgccgcgcactccccgtgcccgtctacatgttggtgcccgccccggccccggcccaggaggacgactcctgcactgactccgcggagggcacgccggtcaacttctctagcgccgcctcgctcagcgacgagacgctgcagggaccccccagggaccagcccgggggaccagcgggcaggcaaagacccaccggccgccccacctctgccagacaggccatggggcaccggcacaaggcgggaggcgccggccgcagcgcggagcagtctcggggcgcgggcaagaaccgagcagggctggagctgcccctgggccggcccccgagcgcccccgcagacaaggacggctcaaagcccggccggacccgcggggacggggcgctccagtcgctgtgcctcacgacgcccactgaggaggccgtgtactgcttctacggcaacgactcggacgaggagcccccggcggccgcgcccacgccaacccaccggcgcacatcggccatccctcgcgcttttacgcgggagcgtccgcagggccggaaggaggcccctgccccgtccaaggctgcaccagctgccccgccgcccgcccggacccagcccagcctcattgctgacgagaccccgccctgctactccctgagctcctccgccagctccctcagcgagcccgagccctcggagccgccggccgtccatccacgaggccgggagcccgcggtcaccaaggacccgggcccaggaggcggacgcgacagctcgcccagcccgcgggccgcggaggagcttctgcagcggtgcatcagctcggccctgcccaggcgccggccccccgtgtctggcctgcggcgccgcaagccccgagccacccggctggatgagcggcccgcagaggggtcccgggaacgcggcgaggaggcagcgggctcggaccgggcctccgacctggatagcgtggagtggcgcgccatccaggagggcgccaattcaattgtcacgtggctgcaccaggcagcagctgccacgcgggaggcctcgtccgagtccgactccatcctgtccttcgtatccgggctgtcagtgggatccaccctacagccccccaagcacaggaagggacgacaggcggagggagaaatgggcagtgcccggcggccagagaaaaggggcgcagcctcagtcaagaccagcgggagcccccgttcccctgcaggccccgagaagccacgtggcacacagaagaccacgcccggggtgccagctgtgctccggggacgaacagtgatctacgtccccagcccggcaccccgtgcccagcccaaagggacccccggcccccgcgccacaccgcggaaggtggcgcccccttgcctggcacagcccgcggctccagccaaagtcccgagccccgggcagcagcggtcgcggagcctacaccggcctgccaagacctcggagctggcgacgctgagccagccccccagaagcgccacaccgcccgcccgcctcgccaagaccccctcctccagctcctcccagacctcgcccgcctcccagcccctgcccagaaagcgccccccggtcacccaggctgctggggccctgcccggccccggagcctccccggtgcccaaaacgccggcgcgcacccttctggcgaagcagcacaagacgcagagatcgcccgtgcggatcccgttcatgcagaggccggcccggcgtgggccgccaccgctggctcgggcagtcccggagccgggccccaggggccgggcggggaccgaggcgggcccgggggcgcgcgggggccgcctgggcctggtgcgtgtggcctcagccctctccagcggcagcgagtcctccgaccgctcgggcttccggcgacagctaaccttcatcaaggagtcgccgggcttgcggcgccgccgctccgagctgtcctcggccgagtccgcggcctctgccccccagggcgcctcgccccgccgcggccggcccgcgctgcccgccgtcttcctctgctcctcgcgctgcgaagagctccgagcggcaccccggcagggcccggccccggcccggcagcggccccccgcggcccgacccagccctggcgagcgccctgcccggcgcaccacctccgagagcccgtcccgcctgcctgtgcgcgcgcccgccgcccggccggagactgtcaagcgctacgcgtcgctgccgcacatcagcgtggcccgcaggcccgacggcgccgtccccgcggcccctgcctcagccgacgccgcgcgccgcagcagcgacggggagccccggccgctccccagggtggccgcgccgggcacgacctggcggcgcatccgagatgaggacgtgccccacatcctgcgcagcacgcttcccgccacggccctgccactgcggggctccacgcccgaggacgccccggccgggcccccgccgcgcaagaccagcgacgccgtggtccagaccgaggaggtcgccgcccccaagaccaactccagcacgtccccgagcctggagaccagggagccccccggggcccccgccggcggccagctctccctcctcggcagcgacgtggacggtcccagcctcgccaaggctcccatctccgcacccttcgtgcacgagggcctgggggtcgccgtggggggcttccccgccagccggcacggctcccccagccgctcggcccgagtaccccccttcaactatgtgcccagccccatggtggtcgcagccaccaccgactcggccgcggagaaagccccggccactgcctccgccaccctcctggaatagtggcctaggccggccttctggaacgttctctcccggccctgcggcgcggtctggctgccccatgggcctgcgctgtagacgtcccccataggtcgccccagggcctctgcccacccgagccccaccactctcagaacccccgcccagcgcacggcgacctcgcgcctcaccggaagaccttgcctctgtgccgcggaggtccaggaggaaacggggcggccgctaggcctcaagtcccgaccgtggagcgctggcaagggcgtcctggcccagccctgagcgcgcggcccttcccctgtcggaagccgttgcttgaccccgggcgagggaggcggtagcctccgggtccgggtctgggtctgggtccgctgcttcgcagggacagcgctggggaggtgacggcgcccgccgcaggtggggcgaggctgggggagggcggcgccgcggcgggcctgccagctgggggcctttgcggcgcgcaggggcgaagcctgtaatcactgcagccgccggtaattcgctaatgagggctttgcagggattgttttcattctcagccccagctgtgggagtgcgggtgggggtgtggccgagccccggcaggaagccccgcccagacggtgttcagggaacccggagcccaagcgctccggcggagcccaaaagggtgggggtgggaggggcagaggccaacggatccccctgcctgtcgcaccccttggcgggagacgggaaggcagcgggctgcgtacgatgggaccctggtgcagacgccgggccggctgacatttggaccccatcccagaggagatgctggctaccagctggggcgaccccaagggtcgctggagtcagtatcggcccggcgcagccgcggcgggcgaggccaatggaaaggagactgaggggagtcccggcagtgagcccgaggccctgggacctggagcccgcgctggcctctccccagcggagcctgcacgttacggagaccatcacatgtgggcgtggtcagtgcccaggaccgcaccgctgctcatcttgtcccttttcaattcccttctggttcatgatgcataaagcgctaggccctagaactccagaaacagcacagctggggcggggacccagccttgccctccacccgaggctctgggacaaggcgggaggttcgggggccttccggcaggtgaacgcagggctggagagtatttggtgccagatgaggtgaaagcttatagaagggcctgaggggctcggctgcctcatcccctggcgggggaggctgggagctgggcctcctgcgtggggtgggactcgcaggggccgggtctccgtgactggggcaacgcctcgtcctgcagagggagccgacgacctcttttctgcagaaaagctccagcaggcgctgccttcacccacggatctgcccaggctgaaggcacacgctcaatgccccacgtgccttctccaggaggaacgaagcagggtttgagggttgggtggatggagctcagaaggaaaccccagccccaccacggatgacaccatccctcccgtcccatccccagcatgggcaaggccagcctttctggcagaaggagctgtcctcaactcagggccgctgtgagcaaagctgaccccagcccccacccccagttaacactgctgcttctctgaatgcatgtcacgctgcaccccatgctccgggcccacaccctgcaggacaaggagctccagacaggacgtccataagtcaccgaggtgtgccacccagcaggtgctggaggtgcccaatgctccctcctaggacctcgcagccaggcaaggctgtcaggttgttttgggggaagagggggtcatggatggctgagcagagagcggggaaaatgcaggctgagtggggcgacctcctgcctgccaggagccccctttcaggacacagcgggggtctcacacttgctgtccccatccatggcccgagggggaacctggtggtctcttctgagcttttggacttggggatgccaaacacgtgctcaccctcacactcgccccggcccgctgcgcccctaattgccaaagggtagggaaatggcgaagccagccaccaggtcgctggtgacagggccagggttatgcaggaaggtggtgcggcattgccttccacatatgtaagtctctgggcggcgccctcccagctccctgcctctgtttccccatgtgggccgtggggaactcccagagctacctcttgggggagcgtggtggcagcgatgatggggagacgcctggaagctcacagaacttgggtctggctggctcctgcccgtgacgccttgcccagcagcaaggtgcgcaacatggctgccagccccgcctcccacccccaccccgagtcctgagctcactttcgccttctccatcccctgccgtgggggccacagccacacctcaccgcccagtccagctgtctccagaaggggacaggcagtccgcggtctctggacaatcaactcaaggtacgcccactgcaaggcctccctcccaccgcggcccctgcctggccacctggcctctctgcaccagggtgacaaggggtcctcgtctgccccccaatgctccagggccagtcctaaggagctgagggtctgaggacgcagggagggtggaggtgtcctgaggctgatggacagtgaccgccactggcccccaacatgaccacacgtgggtgctgaactcggggcgccgtgcccaccggcatggtcctcccgagctccgacagcattacctcacccggccccatctgttgccccggtccagccctgatggcgcgcgcctggtctgtctgattcccctagccgccaccccacgtttctgtaccgggtctctgcagtgttaaacggacgtgtaaatagtggtaaatagtgaaagcctgtccttccctaaatgtaaagccatctgtccggcgtaaggacgacaccgtcagctgtccgactcgcacacatttaataaactgagctcttgcattgaaaaaaaaaaaaaaaaaaacaaaaaaaacacaaaaacaaaaaaagaaaaacaaaatacacagagagacacaaacacaaacaataaaacaaacaaaaaaaaaaccaggagggagcggcaggaaagacaacaaaacacgccaggagaagagaaaaaacaaaagaaagacgaaaaagaagaaggagaacaaagacaagaaacgcaccacacaaaaaagaaagaacactaaacacaaagaaaacaagaacagacgaagaacaggagagaaaaaaaaagagcagagcagagggaaagagaaacaacaaagacactcaggaacgaacggagagaaaccacggggaggagagaagacacgaagacaaaaacaccaggagccgggggaggacagaaaacaacaaaagaagcaaacagaacatacaccagcagaagcaagaggaaacacaagcaagagcagagggaaaaagaaa

SEQ ID NO: 356071 - DNA, 9687 bp, Homo sapiens
tgagaacagtcacatttgcctctgttgtctttgaagagggagaaaagtgttttggtgacaagtcctcctctccctctgactcacaggcgccatctccccgttgatttcccccttttgtaatggggaagcggggcgagtgaagagggtgggtgtggccgtcacccatccctacagccctgtctgtgctggggatgctgctctccatctgatggtcttggggtgtattattagaggactcagggggccttccccgaggcacctatcaaacagggcagggaagaacattccaggctgagggaacaacaggtgcagaggcccagtggctggaggaagcgtgagccaggaccgagggctgacaggaggcgggggtggcagtcacagggcactgggggtacccctgtgggtctggcagcagggtgaggccataccggctcctggaggaggtctcagacttgggcctggaaggggaacttgagggcaggtctggggcatagggagggcctctgggcaagggagtgaggtggggcgctgggcagcaggcagggtcatccctgccacccaccaaccttgttgggtcctcacaggtgggctgcaggccgtggcagagctgctgcaggttgactatgagatgcacaagatgacccgggacccgctgaacctggcgctgcgccgctacgcgggcatgaccctcaccaacctcacctttggggacgttgccaacaaggccaccctgtgtgcgcgccgcggctgcatggaggccatcgtggcccagctggcctccgacagtgaggagctccaccaggtggtgtccagcatccttcggaacttgtcctggagggccgacatcaacagcaagaaggtgctgagggaggcgggcagcgtgactgccctggtgcagtgtgtcctgcgggccaccaaggagtccaccctgaagagcgtgctgagcgccctgtggaatctgtctgcacacagcacagagaacaaggcggccatctgccaggtggatggcgccctgggcttcctggtgagcaccctgacctacaagtgtcagagcaactcgctggccatcatcgagagcggcggcggcatcctccgcaatgtgtccagcctcgtcgccacccgtgaggactacaggcaggtgctccgggatcacaactgtctgcagacgctgctgcagcatctgacttcgcacagcctgaccatcgtgagcaacgcgtgcggcacgctctggaacctgtcggcccgcagcgcccgtgaccaggagctgctgtgggacctgggcgccgtgggcatgctgcgtaatctggtgcactccaagcacaagatgatcgccatgggcagcgccgccgccctgcgcaacctgctggcccatcggcccgccaagcaccaggcggccgccaccgccgtgtccccaggcagctgcgtgcccagcctgtacgtgcgcaagcagcgggcgctggaggccgagctggacgcacggcacctcgcgcaggcgctggagcacctggagaagcagggcccgccggcagccgaggccgccactaagaagccgctgccgcccctgcgacacctggacggcctggcccaagactatgcttccgattcgggctgctttgacgacgacgatgcaccgtcatccctggctgcggccgcggccaccggggagccagccagccctgccgcgctgtccctcttcctgggcagccccttcctgcaggggcaggcgctggctcgcaccccgcccacccgccgaggcggcaaggaggcagagaaggacaccagtggggaggcagccgtggcggccaaggccaaggccaagctggcgcttgcagtggcgcgcatcgaccagctggtggaggacatctccgccctgcacacctcgtccgacgatagcttcagcctcagctctggagacccgggacaggaggcgccacgggagggccgcgcccagtcctgctcgccatgccgcggcccggagggcgggcggcgagaggcaggaagccgggcgcacccgctgctgcggctcaaggcggcccacgccagcctctccaacgacagcctcaacagcggcagtgccagcgacgggtactgcccacgcgaacatatgctgccctgcccgctggccgcactggcttcgcgccgcgaggaccccaggtgtgggcagcctcggcccagccggcttgaccttgacctgcccggctgccaggccgagcccccggcccgcgaggccacctccgccgacgcccgcgtgcgcaccatcaagctgtcgcctacctatcagcacgtgccactgcttgagggtgcctcaagggcgggtgcagagcccctcgcggggcctggaatctctccaggggcccggaagcaggcctggctgccggcagaccacctgagcaaggttcccgagaagctggcggctgccccgctgtctgtggccagcaaggcactgcagaaactggcggcgcaagaggggccactctcgctgtcccgatgcagctccctttcctcgctgtcctcggccggccgcccaggccccagcgagggtggtgacctggatgacagtgactcctccctggaggggctggaggaggccggccccagcgaggctgagctggacagcacgtggcgggcgcccggggccacctcgctgcccgtagccattccggctccccggcgtaaccgaggccggggcctgggggtggaagacgccacgccgtccagctcgtcggagaactacgtgcaggagacaccgcttgtgctgagccgctgcagctctgtgagctcgctgggcagcttcgagagcccgtccatcgccagctccatccccagtgaaccttgcagcgggcagggcagcggcaccatcagccctagcgagctgcccgacagccccggacagaccatgcctcccagccggagcaagacgccaccgctggcgcccgcgccacagggtccccccgaggccacccagttcagcctgcagtgggagagctacgtgaagcgcttcctggacatcgccgactgccgggagcgctgccggctgccatctgagctggacgcaggcagcgtgcgctttaccgtggagaagccagacgagaacttctcgtgcgcctccagcctcagcgcgctggccttgcacgagcactacgtgcagcaggacgtggagctgcggctgctgccctcggcctgccccgagcgcggcgggggcgccgggggcgccggcctccactttgcagggcaccggcggcgggaggaggggccggcgcccacgggttctcgccctcgcggcgccgcggaccaggagctggaactgctgcgggagtgcctgggagccgccgtgcctgcccggctgcgcaaggtggcctccgcgctggtgccaggtcgccgcgcactccccgtgcccgtctacatgttggtgcccgccccggccccggcccaggaggacgactcctgcactgactccgcggagggcacgccggtcaacttctctagcgccgcctcgctcagcgacgagacgctgcagggaccccccagggaccagcccgggggaccagcgggcaggcaaagacccaccggccgccccacctctgccagacaggccatggggcaccggcacaaggcgggaggcgccggccgcagcgcggagcagtctcggggcgcgggcaagaaccgagcagggctggagctgcccctgggccggcccccgagcgcccccgcagacaaggacggctcaaagcccggccggacccgcggggacggggcgctccagtcgctgtgcctcacgacgcccactgaggaggccgtgtactgcttctacggcaacgactcggacgaggagcccccggcggccgcgcccacgccaacccaccggcgcacatcggccatccctcgcgcttttacgcgggagcgtccgcagggccggaaggaggcccctgccccgtccaaggctgcaccagctgccccgccgcccgcccggacccagcccagcctcattgctgacgagaccccgccctgctactccctgagctcctccgccagctccctcagcgagcccgagccctcggagccgccggccgtccatccacgaggccgggagcccgcggtcaccaaggacccgggcccaggaggcggacgcgacagctcgcccagcccgcgggccgcggaggagcttctgcagcggtgcatcagctcggccctgcccaggcgccggccccccgtgtctggcctgcggcgccgcaagccccgagccacccggctggatgagcggcccgcagaggggtcccgggaacgcggcgaggaggcagcgggctcggaccgggcctccgacctggatagcgtggagtggcgcgccatccaggagggcgccaattcaattgtcacgtggctgcaccaggcagcagctgccacgcgggaggcctcgtccgagtccgactccatcctgtccttcgtatccgggctgtcagtgggatccaccctacagccccccaagcacaggaagggacgacaggcggagggagaaatgggcagtgcccggcggccagagaaaaggggcgcagcctcagtcaagaccagcgggagcccccgttcccctgcaggccccgagaagccacgtggcacacagaagaccacgcccggggtgccagctgtgctccggggacgaacagtgatctacgtccccagcccggcaccccgtgcccagcccaaagggacccccggcccccgcgccacaccgcggaaggtggcgcccccttgcctggcacagcccgcggctccagccaaagtcccgagccccgggcagcagcggtcgcggagcctacaccggcctgccaagacctcggagctggcgacgctgagccagccccccagaagcgccacaccgcccgcccgcctcgccaagaccccctcctccagctcctcccagacctcgcccgcctcccagcccctgcccagaaagcgccccccggtcacccaggctgctggggccctgcccggccccggagcctccccggtgcccaaaacgccggcgcgcacccttctggcgaagcagcacaagacgcagagatcgcccgtgcggatcccgttcatgcagaggccggcccggcgtgggccgccaccgctggctcgggcagtcccggagccgggccccaggggccgggcggggaccgaggcgggcccgggggcgcgcgggggccgcctgggcctggtgcgtgtggcctcagccctctccagcggcagcgagtcctccgaccgctcgggcttccggcgacagctaaccttcatcaaggagtcgccgggcttgcggcgccgccgctccgagctgtcctcggccgagtccgcggcctctgccccccagggcgcctcgccccgccgcggccggcccgcgctgcccgccgtcttcctctgctcctcgcgctgcgaagagctccgagcggcaccccggcagggcccggccccggcccggcagcggccccccgcggcccgacccagccctggcgagcgccctgcccggcgcaccacctccgagagcccgtcccgcctgcctgtgcgcgcgcccgccgcccggccggagactgtcaagcgctacgcgtcgctgccgcacatcagcgtggcccgcaggcccgacggcgccgtccccgcggcccctgcctcagccgacgccgcgcgccgcagcagcgacggggagccccggccgctccccagggtggccgcgccgggcacgacctggcggcgcatccgagatgaggacgtgccccacatcctgcgcagcacgcttcccgccacggccctgccactgcggggctccacgcccgaggacgccccggccgggcccccgccgcgcaagaccagcgacgccgtggtccagaccgaggaggtcgccgcccccaagaccaactccagcacgtccccgagcctggagaccagggagccccccggggcccccgccggcggccagctctccctcctcggcagcgacgtggacggtcccagcctcgccaaggctcccatctccgcacccttcgtgcacgagggcctgggggtcgccgtggggggcttccccgccagccggcacggctcccccagccgctcggcccgagtaccccccttcaactatgtgcccagccccatggtggtcgcagccaccaccgactcggccgcggagaaagccccggccactgcctccgccaccctcctggaatagtggcctaggccggccttctggaacgttctctcccggccctgcggcgcggtctggctgccccatgggcctgcgctgtagacgtcccccataggtcgccccagggcctctgcccacccgagccccaccactctcagaacccccgcccagcgcacggcgacctcgcgcctcaccggaagaccttgcctctgtgccgcggaggtccaggaggaaacggggcggccgctaggcctcaagtcccgaccgtggagcgctggcaagggcgtcctggcccagccctgagcgcgcggcccttcccctgtcggaagccgttgcttgaccccgggcgagggaggcggtagcctccgggtccgggtctgggtctgggtccgctgcttcgcagggacagcgctggggaggtgacggcgcccgccgcaggtggggcgaggctgggggagggcggcgccgcggcgggcctgccagctgggggcctttgcggcgcgcaggggcgaagcctgtaatcactgcagccgccggtaattcgctaatgagggctttgcagggattgttttcattctcagccccagctgtgggagtgcgggtgggggtgtggccgagccccggcaggaagccccgcccagacggtgttcagggaacccggagcccaagcgctccggcggagcccaaaagggtgggggtgggaggggcagaggccaacggatccccctgcctgtcgcaccccttggcgggagacgggaaggcagcgggctgcgtacgatgggaccctggtgcagacgccgggccggctgacatttggaccccatcccagaggagatgctggctaccagctggggcgaccccaagggtcgctggagtcagtatcggcccggcgcagccgcggcgggcgaggccaatggaaaggagactgaggggagtcccggcagtgagcccgaggccctgggacctggagcccgcgctggcctctccccagcggagcctgcacgttacggagaccatcacatgtgggcgtggtcagtgcccaggaccgcaccgctgctcatcttgtcccttttcaattcccttctggttcatgatgcataaagcgctaggccctagaactccagaaacagcacagctggggcggggacccagccttgccctccacccgaggctctgggacaaggcgggaggttcgggggccttccggcaggtgaacgcagggctggagagtatttggtgccagatgaggtgaaagcttatagaagggcctgaggggctcggctgcctcatcccctggcgggggaggctgggagctgggcctcctgcgtggggtgggactcgcaggggccgggtctccgtgactggggcaacgcctcgtcctgcagagggagccgacgacctcttttctgcagaaaagctccagcaggcgctgccttcacccacggatctgcccaggctgaaggcacacgctcaatgccccacgtgccttctccaggaggaacgaagcagggtttgagggttgggtggatggagctcagaaggaaaccccagccccaccacggatgacaccatccctcccgtcccatccccagcatgggcaaggccagcctttctggcagaaggagctgtcctcaactcagggccgctgtgagcaaagctgaccccagcccccacccccagttaacactgctgcttctctgaatgcatgtcacgctgcaccccatgctccgggcccacaccctgcaggacaaggagctccagacaggacgtccataagtcaccgaggtgtgccacccagcaggtgctggaggtgcccaatgctccctcctaggacctcgcagccaggcaaggctgtcaggttgttttgggggaagagggggtcatggatggctgagcagagagcggggaaaatgcaggctgagtggggcgacctcctgcctgccaggagccccctttcaggacacagcgggggtctcacacttgctgtccccatccatggcccgagggggaacctggtggtctcttctgagcttttggacttggggatgccaaacacgtgctcaccctcacactcgccccggcccgctgcgcccctaattgccaaagggtagggaaatggcgaagccagccaccaggtcgctggtgacagggccagggttatgcaggaaggtggtgcggcattgccttccacatatgtaagtctctgggcggcgccctcccagctccctgcctctgtttccccatgtgggccgtggggaactcccagagctacctcttgggggagcgtggtggcagcgatgatggggagacgcctggaagctcacagaacttgggtctggctggctcctgcccgtgacgccttgcccagcagcaaggtgcgcaacatggctgccagccccgcctcccacccccaccccgagtcctgagctcactttcgccttctccatcccctgccgtgggggccacagccacacctcaccgcccagtccagctgtctccagaaggggacaggcagtccgcggtctctggacaatcaactcaaggtacgcccactgcaaggcctccctcccaccgcggcccctgcctggccacctggcctctctgcaccagggtgacaaggggtcctcgtctgccccccaatgctccagggccagtcctaaggagctgagggtctgaggacgcagggagggtggaggtgtcctgaggctgatggacagtgaccgccactggcccccaacatgaccacacgtgggtgctgaactcggggcgccgtgcccaccggcatggtcctcccgagctccgacagcattacctcacccggccccatctgttgccccggtccagccctgatggcgcgcgcctggtctgtctgattcccctagccgccaccccacgtttctgtaccgggtctctgcagtgttaaacggacgtgtaaatagtggtaaatagtgaaagcctgtccttccctaaatgtaaagccatctgtccggcgtaaggacgacaccgtcagctgtccgactcgcacacatttaataaactgagctcttgcattgaaaaaaaaaaaaaaaaaaacaaaaaaaacacaaaaacaaaaaaagaaaaacaaaatacacagagagacacaaacacaaacaataaaacaaacaaaaaaaaaaccaggagggagcggcaggaaagacaacaaaacacgccaggagaagagaaaaaacaaaagaaagacgaaaaagaagaaggagaacaaagacaagaaacgcaccacacaaaaaagaaagaacactaaacacaaagaaaacaagaacagacgaagaacaggagagaaaaaaaaagagcagagcagagggaaagagaaacaacaaagacactcaggaacgaacggagagaaaccacggggaggagagaagacacgaagacaaaaacaccaggagccgggggaggacagaaaacaacaaaagaagcaaacagaacatacaccagcagaagcaagaggaaacacaagcaagagcagagggaaaaagaaa

SEQ ID NO: 356072 - DNA, 2689 bp, Homo sapiens
ccgctccttcaggcctgaatgtggcggctgcctctgcgaatggacggcgtgggaagagaatggcttctgcaaggaaagccagccgtcccatgcgtgatgtttttggtgacttcagtgatgtttccttggaagattcaacaatggaagaaatcagaaacttccagatcagtagaaatcttaccaaaatagcacctggtcatagcagatttctaaaaagaaaccaaactctagatgagaaacacttactcctgaaagagaaccctgtgctcgggagtggacccaggcttgcctcatgtagaccgcccaccactgcctccaggatccgagccaatgccgcactcatgaagctggcccagctggaaacccggatcatgaatcggaagctgcagaggaatttgtctgacacggaatctgactcaatgaccgccgatgctggtcttccaaagagagctgacagaatcctctctgggggtgcactcgaactcgcgtcccagaacacagacaaaacttcccagaatcaagcccgtgaacttcctgtcaccgaaaataatgcacagaacgcgaaggtcagtaggtttctaaagaagaaacaagcacctgttgaaaacatatcccctgaagcacctgctgggaaagagaggactttgcaaacccccaaacagaaagaacctgctagaacatttgattctccagacagtgacgaagaagaaatgaaagtattgctaggaagcttgatggactcttctagagaaaaaaacacgaatcaaggcttcagcagcgctaacgtcagcgaggaagaagaaagaaaactattttcggtcccatctcaactgagagcatttactgtacccagcgtggaactctccagcgcaaagccttctcagacatcacacctgccaacctccctggcagcagacagaacccttcacagcactcgctcaagagcagactacccacagagtcacgtttccagtgacaccgcctcccacacgccgtcagtttccatcacaggcgccttttcaaactcagtgtctttaaagatggggcatgtcaagcttgtgtcctccccgggaaggagtgaggctgagactgtggacgagccagtctcagaaggtgctgatgacagcctcgacgagtttagaataaatattttatcgcttgacggtctggctccagctgtcagtgagaactccgatttggaacaggaagaggaaagtgctcagagacaaaaaacagctggcaaaatcttcagagccgaggcgtccactgggcaggatgccccgaggcaggcccaggcgaggagctgggcatcacagggaaaggccgcctctgcagagggggatgagagcgaggtctcggagcatctcagtgccagctcggcttctgccatccagcaggacagcacttccagcatgcagccaccatctgaagcccccatggtgaacacagtcagctcagcttattcggaggattttgaaaactctccaagtctgacagcatctgagccaaccgcccattccaaggagtctcttgacagaacactggacgctttgtctgaatcctcttcaagtgtgaagacagaccttccacaaacagccgagtctaggaaaaagtcgggcaggcacgtgacaagagtgcttgtgaaggacacagctgtgcagacgccagatcctgccttcacctacgagtggaccaaggtggccagcatggcagccatggggcctgccctgggaggcgcctacgtggacccgacacccatcgccaatcatgttatcagtgcagatgcaatagaagccctgaccgcttacagcccggccgtgctggcactccatgatgtgctgaagcagcagctgagcctgacgcagcagttcatccaggccagccggcacctgcacgcctccctcctgcgctccctggacgcggactccttccactaccacaccctggaggaagccaaagagtacattaggtgccacagacctgccccactgaccatggaggatgccctggaggaggtgaacaaggagctgtgagcgccagcaggtggagcttgacgtgacgtcttaacaaaagctacaggaaatctagaacaaaatcaaatattcatcacgttgggttgaaaagttggaagattttgcatcttattgaaaagaatttttcaaaaatgtttctgtacaaatgaatggaattgcaccaggctgcccatggacaccaggtgtggccgattcccaacggtcacccaccagcttctggcaggagcagctcccctcctggcctcccctcccttcgggggtgtgaaatgaaatgatggagtggaaggcgctggctggggtcgggctccatgctctggatgggactgggccgtcgcacacgccagccggtgcagggttcttccaagtgcaaaactcaagcaggggacgcgacgggcacagactccgaggcagcgctcaacctgaagtgtcttaggctggtttcctgttagaatcttgtttcccagataacagcaaatggctacattccagaaaaaaaatatcaacttatacaactaaaataactgaactaagggccagtacgccttcgaagaattaggtttcagaatctcactgggcctcctctcaggtcagtattcttctttctagacctaaaccaaggagagtaaaaatgaaaaccctgcttcacttcgcaagtc

SEQ ID NO: 356073 - DNA, 2130 bp, Homo sapiens
ccgctccttcaggcctgaatgtggcggctgcctctgcgaatggacggcgtgggaagagaatggcttctgcaaggaaagccagccgtcccatgcgtgatgtttttggtgacttcagtgatgtttccttggaagattcaacaatggaagaaatcagaaacttccagatcagtagaaatcttaccaaaatagcacctggtcatagcagatttctaaaaagaaaccaaactctagatgagaaacacttactcctgaaagagaaccctgtgctcgggagtggacccaggcttgcctcatgtagaccgcccaccactgcctccaggatccgagccaatgccgcactcatgaagctggcccagctggaaacccggatcatgaatcggaagctgcagaggaatttgtctgacacggaatctgactcaatgaccgccgatgctggtcttccaaagagagctgacagaatcctctctgggggtgcactcgaactcgcgtcccagaacacagacaaaacttcccagaatcaagcccgtgaacttcctgtcaccgaaaataatgcacagaacgcgaaggtcagtaggtttctaaagaagaaacaagcacctgttgaaaacatatcccctgaagcacctgctgggaaagagaggactttgcaaacccccaaacagaaagaacctgctagaacatttgattctccagacagtgacgaagaagaaatgaaagtattgctaggaagcttgatggactcttctagagaaaaaaacacgaatcaaggcttcagcagcgctaacgtcagcgaggaagaagaaagaaaactattttcggtcccatctcaactgagagcatttactgtacccagcgtggaactctccagcgcaaagccttctcagacatcacacctgccaacctccctggcagcagacagaacccttcacagcactcgctcaagagcagactacccacagagtcacgtttccagtgacaccgcctcccacacgccgtcagtttccatcacaggcgccttttcaaactcagtgtctttaaagatggggcatgtcaagcttgtgtcctccccgggaaggagtgaggctgagactgtggacgagccagtctcagaaggtgctgatgacagcctcgacgagtttagaataaatattttatcgcttgacggtctggctccagctgtcagtgagaactccgatttggaacaggaagaggaaagtgctcagagacaaaaaacagctggcaaaatcttcagagccgaggcgtccactgggcaggatgccccgaggcaggcccaggcgaggagctgggcatcacagggaaaggccgcctctgcagagggggatgagagcgaggtctcggagcatctcagtgccagctcggcttctgccatccagcaggacagcacttccagcatgcagccaccatctgaagcccccatggtgaacacagtcagctcagcttattcggaggattttgaaaactctccaagtctgacagcatctgagccaaccgcccattccaaggagtctcttgacagaacactggacgctttgtctgaatcctcttcaagtgtgaagacagaccttccacaaacagccgagtctaggaaaaagtcgggcaggcacgtgacaagagtgcttgtgaaggacacagctgtgcagacgccagatcctgccttcacctacgagtggaccaaggtggccagcatggcagccatggggcctgccctgggaggcgcctacgtggacccgacacccatcgccaatcatgttatcagtgcagatgcaatagaagccctgaccgcttacagcccggccgtgctggcactccatgatgtgctgaagcagcagctgagcctgacgcagcagttcatccaggccagccggcacctgcacgcctccctcctgcgctccctggacgcggactccttccactaccacaccctggaggaagccaaagagtacattaggtgccacagacctgccccactgaccatggaggatgccctggaggaggtgaacaaggagctgtgagcgccagcaggtggagcttgacgtgacgtcttaacaaaagttacaggcatatctagtattatgtgcatagaaaagtatttttcatgaggataaaaag

SEQ ID NO: 356074 - DNA, 3362 bp, Homo sapiens
ccgctccttcaggcctgaatgtggcggctgcctctgcgaatggacggcgtgggaagagaatggcttctgcaaggaaagccagccgtcccatgcgtgatgtttttggtgacttcagtgatgtttccttggaagattcaacaatggaagaaatcagaaacttccagatcagtagaaatcttaccaaaatagcacctggtcatagcagatttctaaaaagaaaccaaactctagatgagaaacacttactcctgaaagagaaccctgtgctcgggagtggacccaggcttgcctcatgtagaccgcccaccactgcctccaggatccgagccaatgccgcactcatgaagctggcccagctggaaacccggatcatgaatcggaagctgcagaggaatttgtctgacacggaatctgactcaatgaccgccgatgctggtcttccaaagagagctgacagaatcctctctgggggtgcactcgaactcgcgtcccagaacacagacaaaacttcccagaatcaagcccgtgaacttcctgtcaccgaaaataatgcacagaacgcgaaggtcagtaggtttctaaagaagaaacaagcacctgttgaaaacatatcccctgaagcacctgctgggaaagagaggactttgcaaacccccaaacagaaagaacctgctagaacatttgattctccagacagtgacgaagaagaaatgaaagtattgctaggaagcttgatggactcttctagagaaaaaaacacgaatcaaggcttcagcagcgctaacgtcagcgaggaagaagaaagaaaactattttcggtcccatctcaactgagagcatttactgtacccagcgtggaactctccagcgcaaagccttctcagacatcacacctgccaacctccctggcagcagacagaacccttcacagcactcgctcaagagcagactacccacagagtcacgtttccagtgacaccgcctcccacacgccgtcagtttccatcacaggcgccttttcaaactcagtgtctttaaagatggggcatgtcaagcttgtgtcctccccgggaaggagtgaggctgagactgtggacgagccagtctcagaaggtgctgatgacagcctcgacgagtttagaataaatattttatcgcttgacggtctggctccagctgtcagtgagaactccgatttggaacaggaagaggaaagtgctcagagacaaaaaacagctggcaaaatcttcagagccgaggcgtccactgggcaggatgccccgaggcaggcccaggcgaggagctgggcatcacagggaaaggccgcctctgcagagggggatgagagcgaggtctcggagcatctcagtgccagctcggcttctgccatccagcaggacagcacttccagcatgcagccaccatctgaagcccccatggtgaacacagtcagctcagcttattcggaggattttgaaaactctccaagtctgacagcatctgagccaaccgcccattccaaggagtctcttgacagaacactggacgctttgtctgaatcctcttcaagtgtgaagacagaccttccacaaacagccgagtctaggaaaaagtcgggcaggcacgtgacaagagtgcttgtgaaggacacagctgtgcagacgccagatcctgccttcacctacgagtggaccaaggtggccagcatggcagccatggggcctgccctgggaggcgcctacgtggacccgacacccatcgccaatcatgttatcagtgcagatgcaatagaagccctgaccgcttacagcccggccgtgctggcactccatgatgtgctgaagcagcagctgagcctgacgcagcagttcatccaggccagccggcacctgcacgcctccctcctgcgctccctggacgcggactccttccactaccacaccctggaggaagccaaagagtacattaggtgccacagacctgccccactgaccatggaggatgccctggaggaggtgaacaaggagctgtgagcgccagcaggtggagcttgacgtgacgtcttaacaaaagcaaagcaccgcagcttcccagagttaccagcgcagcacttaagacaggatcttacggcggggtggggctcctggaccgtgaccggcgtcttcttcctggggagtacgacttggaccgggaccgcgactgggaccgggagcggcttctggaggagcgcgacctgctccgacttctgcagggaagggtgcccaagggtcagcagcagccaggcgtcgtggggaggccacaggaagaggcctcaggcactgccctgaggcagcctctgcctacctagatctggagcgggagtaggaacgggagcaggagcgcgaccttgaccttgagtacgagcctgaagacttggaggatcttgagttggagcgggaggaagaacgccctcgactcttggatctgctccgagacctcgagggtccgctgtggggagaggcctgatgatcaggtgccccagtggatgggctgcaacccagcccaccctggccctcaggttcctagaccaccccagatgcaggggctctggctgtggatgtggcgccatagccacagcaacggtaccaagttcctaaatagtgtggccgagcctgctgctgtgtgaattcaggccttgtggaaaacaccgccccataggcacaggctgtgtgagggtggacgtgatgagtgtatctggggtctgctcccacccatcacaagctgtggaccctggccccccggccactgcagacatctgcgcttttacctgttcctcttctcctggcctttcctccgccgggcccgcatttttgctcggaagaactcatagaggccgttctgctcccagccttcactgtaagacacggcattccgtgtgtgaccacgtgacacccacccacaaggaagtcgtgaaaaagtcatcaggagttaatccacagaaccttggagagtacatggccctgtggctgtgggctccgagcatgggcgcagtagagcttggttcagtgttcccacagggctgtcctcctgcagcccagtggctcctctggtgcccacgcccttgccaccctgctgttccgctgaggtggtggggacccatggtctgtggaactgggaaacaggaacactgactcatgggtggacaggcctgcagcccagcacaggaaggaggggtgaccactgggaagggtgggctgagggccctgtggcagccggctgcttgagacgtgccgccgtgccacaccttccctaacttcttctgatgtgtctccattaaaacgcccttcattgagggccacgtgtgtgctgtgaaaaaacacaca

SEQ ID NO: 356075 - DNA, 2593 bp, Homo sapiens
ccgctccttcaggcctgaatgtggcggctgcctctgcgaatggacggcgtgggaagagaatggcttctgcaaggaaagccagccgtcccatgcgtgatgtttttggtgacttcagtgatgtttccttggaagattcaacaatggaagaaatcagaaacttccagatcagtagaaatcttaccaaaatagcacctggtcatagcagatttctaaaaagaaaccaaactctagatgagaaacacttactcctgaaagagaaccctgtgctcgggagtggacccaggcttgcctcatgtagaccgcccaccactgcctccaggatccgagccaatgccgcactcatgaagctggcccagctggaaacccggatcatgaatcggaagctgcagaggaatttgtctgacacggaatctgactcaatgaccgccgatgctggtcttccaaagagagctgacagaatcctctctgggggtgcactcgaactcgcgtcccagaacacagacaaaacttcccagaatcaagcccgtgaacttcctgtcaccgaaaataatgcacagaacgcgaaggtcagtaggtttctaaagaagaaacaagcacctgttgaaaacatatcccctgaagcacctgctgggaaagagaggactttgcaaacccccaaacagaaagaacctgctagaacatttgattctccagacagtgacgaagaagaaatgaaagtattgctaggaagcttgatggactcttctagagaaaaaaacacgaatcaaggcttcagcagcgctaacgtcagcgaggaagaagaaagaaaactattttcggtcccatctcaactgagagcatttactgtacccagcgtggaactctccagcgcaaagccttctcagacatcacacctgccaacctccctggcagcagacagaacccttcacagcactcgctcaagagcagactacccacagagtcacgtttccagtgacaccgcctcccacacgccgtcagtttccatcacaggcgccttttcaaactcagtgtctttaaagatggggcatgtcaagcttgtgtcctccccgggaaggagtgaggctgagactgtggacgagccagtctcagaaggtgctgatgacagcctcgacgagtttagaataaatattttatcgcttgacggtctggctccagctgtcagtgagaactccgatttggaacaggaagaggaaagtgctcagagacaaaaaacagctggcaaaatcttcagagccgaggcgtccactgggcaggatgccccgaggcaggcccaggcgaggagctgggcatcacagggaaaggccgcctctgcagagggggatgagagcgaggtctcggagcatctcagtgccagctcggcttctgccatccagcaggacagcacttccagcatgcagccaccatctgaagcccccatggtgaacacagtcagctcagcttattcggaggattttgaaaactctccaagtctgacagcatctgagccaaccgcccattccaaggagtctcttgacagaacactggacgctttgtctgaatcctcttcaagtgtgaagacagaccttccacaaacagccgagtctaggaaaaagtcgggcaggcacgtgacaagagtgcttgtgaaggacacagctgtgcagacgccagatcctgccttcacctacgagtggaccaaggccctgaccgcttacagcccggccgtgctggcactccatgatgtgctgaagcagcagctgagcctgacgcagcagttcatccaggccagccggcacctgcacgcctccctcctgcgctccctggacgcggactccttccactaccacaccctggaggaagccaaagagtacattaggtgccacagacctgccccactgaccatggaggatgccctggaggaggtgaacaaggagctgtgagcgccagcaggtggagcttgacgtgacgtcttaacaaaagctacaggaaatctagaacaaaatcaaatattcatcacgttgggttgaaaagttggaagattttgcatcttattgaaaagaatttttcaaaaatgtttctgtacaaatgaatggaattgcaccaggctgcccatggacaccaggtgtggccgattcccaacggtcacccaccagcttctggcaggagcagctcccctcctggcctcccctcccttcgggggtgtgaaatgaaatgatggagtggaaggcgctggctggggtcgggctccatgctctggatgggactgggccgtcgcacacgccagccggtgcagggttcttccaagtgcaaaactcaagcaggggacgcgacgggcacagactccgaggcagcgctcaacctgaagtgtcttaggctggtttcctgttagaatcttgtttcccagataacagcaaatggctacattccagaaaaaaaatatcaacttatacaactaaaataactgaactaagggccagtacgccttcgaagaattaggtttcagaatctcactgggcctcctctcaggtcagtattcttctttctagacctaaaccaaggagagtaaaaatgaaaaccctgcttcacttcgcaagtc

SEQ ID NO: 356076 - DNA, 414 bp, Homo sapiens
acctcaattttcccacctggaaaatggagacagcactacctgcccaaaggtactttcagatgaacggagacaatcacaaacagtatagcctgagcgctctcctaatttacacatggattgaggacactgactcctttaggattttaagaatctactgtaaattgacatctcaccaaatcatgtagatataaaactcaaattttattgtataggttaaaaagtatcccagttataggtctgggccttcagtagggtggaaaactagtttcagtcttaaaattatagagttggtcaggtgtgggcgtacgcctgtaatcccaatactttggaaggctgaggtgggcggatcacttgaggtcagtttgagaccagcctggccaacatggtgaaaccgtgtctctactaaaaatacaa

SEQ ID NO: 356077 - DNA, 410 bp, Homo sapiens
ggggattttcattatacattatgattttaccctattttaaaagcatatttatgttatcttagactgtgatcttctattagcacatttgcgtgtatttagattgattagcgattttagtcactgaattactttcagagtctgaagagaaatattacaaatgccaatgatgtcagagtcctcattgccaaccagggccattaaccaaaagatcctaaaaagccaaggcaatatgcatctctctgtctctgtttctgactgtgtggtccctcatcttatcctctttttggatgtctgtttcatcctccttttccctactgaccagctctttctcctttactctcacttaactcaaacttgggtttacatcaactacctgactttttgtcacctaccagttcaagtgcttaaaa

SEQ ID NO: 356078 - DNA, 366 bp, Homo sapiens
aagttttaaaagctgtgtaccgtttatttttatgtacctcctatttttaagttgatagaaaaaatctttgtaagtttaaatattactgaagattatgcttctgatgtattatcaatattgacattttaaaatacagcaattaaaattattacatcactcttaaatatatccagtggaatagaaagcaatattattttattttttcctctctttgaaattgtacttccattcctgcttgtttaggctaagattcactggggtaatctctttttagaattaaaagcctttaagttaatctcactgatctacacctctctcacaaaaatttctgtataacttgaaagtttaaaaagttgttttcccctg

SEQ ID NO: 356079 - DNA, 5835 bp, Homo sapiens
  misc_feature (633)..(633): n is a, c, g, or t
  misc_feature (670)..(670): n is a, c, g, or t
  misc_feature (706)..(706): n is a, c, g, or t
  misc_feature (840)..(840): n is a, c, g, or t
gagacggagtcttgctctgtcacccaggctgtagtgcaatggcgtgatctcaaccactgcttcctgggttcaagcgattctcctgcctcagcctcccgagtagctgggactataggcgtacgccaccacgcccggctaatttgtttgtatttttagtagagacggggtttcaccatattggccagactggtctccaactcctgacctcaagtgatccgcccgcctcggcctcccaaagtgctgggattataggcgtaagccaccgcgcccggcaccttgccactgattttgcatcatgaatgcaacggaaagatcagccaatttgactttaatagttttcagtctcttaaatctctaacgtatctcttaaatctctaaactatttgtctgtgacctattttactgtttgtgtttcttctgcatcaagttggaggattggtagtgacaaagaaagaagcccctaaacaattaatattagttcaagtaccaaaaaagttcagggcgcttgcattttccagttcttgccctacaggaagcagttcctccaagggaacttactctcttctgcggagcaaggaagaactttcccagaatcttgccacatggcttccaaggcaaactcaaactcaagtncagcgtcatagatcagttcatagtctgggtccgaagncacggcgatgcttcttgcgcacccccacggagcttnttattccgattccgccagccccccgcccctccccaaaaaaagcctaagatgggagtggctatgattcagaggacagagggcagaagctgtttgcgttaaggagtggggggcttgccctattaaggtaatccgcnaacaccgagtctgacccggcccatagaggtacttctaccccgcttacctccccttttctctcgaagggcacccgaagattgtcacgagtccttagactccaactactgcggcagcttccaaatttcctgaaaaccctaagctgggccagcccggcagcccacgcacttccggcctcggacccgccccaaacacccaagcgccccagcgcctcatctctaggtccggaaataaacgaacatctccgattatggttataccagggtcgagggtttccgaatatattcgattcaaagcttcggcaagacgaagaaaaccgagcctgaaagcagggcgagaaaaggggcgctgcagggcggatggaaagaattgattggtaacgatgtggagacggaaacatccgaggacatccggaggaacccggggagttctgagtggtaatcgaggggtagagtatggcagtgggcggggtcatctcggtacgttcgaagggcgttggcggaaattaccgaagatgcccgaagccgtcgggacggacccgagtacctcacgcaagatggcggagctggaggaggtgactctggacgggaagcctcttcaggcgctgcgggtgaccgacctgaaggccgcactggagcagcgaggcctagccaagagcgggcagaagagtgccctggtcaagcggctcaaaggggctctaatgctagaaaatttacagaaacactcaacaccccatgctgcattccagccaaattcccagattggtgaggaaatgagccagaacagtttcataaaacagtatctggaaaagcagcaggagctacttaggcagcgtctggaacgtgaagctcgagaagctgcagaacttgaagaagcttcagctgagtcggaggacgagatgatccatcctgagggagtggcttccctgctgcctcctgactttcagagcagcctggagagaccagagctggagctcagcagacattcgcccagaaaaagctcctcaatttctgaagagaaaggtgactctgatgatgagaaaccaaggaaaggagaaagacgatcatctagggtcagacaggcaagagcagctaaactgtctgagggcagccaacctgctgaggaggaagaggatcaagaaacaccttccagaaacctaagggtcagagcagatcgaaatttgaaaacagaggaggaagaagaggaggaggaggaggaggaagaagatgatgaagaagaggaaggtgatgatgagggacaaaaatctagggaggcaccaatcctgaaagagtttaaggaagaaggggaagagatacctagagtaaaaccagaggagatgatggatgagagacccaaaacaagatcccaggaacaggaggtgttagagagaggagggagatttacaagatcccaggaagaggctagaaaaagtcatctggccagacagcagcaggagaaggaaatgaaaacaacatctccccttgaggaggaagaaagagaaataaaatcttcacaaggcttaaaggaaaaatcgaagtctccttcccctcctcgactgactgaagatcgaaagaaggcctcacttgtagcgctgccagagcaaactgccagcgaggaggagactcctccacctttactaacaaaggaagcatcttctccaccacctcatccacagctccatagcgaagaagaaatagagcccatggaaggcccagccccccctgtcctcattcagttatctcctcctaatacagatgctgacaccagggagctattagtatctcagcatactgtccagttggtaggaggcctgtctcctttgtcaagtccttcagacaccaaagcagaatctccagcagagaaagtgccagaggagagtgtcctgcctctggttcagaaaagcacactggctgactactcagcccagaaggatcttgaacctgagtcagacagatctgctcagcccctccctctaaaaattgaggaattagcactggccaaaggaatcactgaagaatgtctgaaacagccatctttggaacagaaggaaggcagaagagcttctcatacccttctcccaagccacagattgaaacagtcagctgattcatcctctagccggtcctcctcatcttcctcctccagttctagatcaagatctcgctctcctgacagttcaggttctcggtctcattcaccgctcagatccaagcagagagatgtagcccaggcacgtactcatgccaaccctcgtggtagacccaagatgggctccagatcaacatcagagtccagatcaaggtccgttcacgttcacgttctcgttcagcatcaagcaacagcagaaaatctctgagccctggagtctccagggacagcagcaccagctatactgaaaccaaagatccctcttctggtcaggaggttgcaactccaccagtgccacaactgcaggtctgtgagccaaaggagaggacttccacctcctcatcctctgtccaagcaaggcgtctgagtcagcctgaatcagctgaaaagcatgtgacccagaggttacagcctgagcgggggagcccaaagaagtgtgaagctgaagaggcagagccaccagctgccacacagccccaaacctcagagactcagacctctcatctgccagaatcagaaagaattcatcacactgttgaggagaaggaggaagtgaccatggacacaagtgaaaacagacctgaaaatgatgttccagaacctcccatgcctattgcagaccaagtcagcaatgatgaccgcccggagggcagtgttgaagatgaggagaagaaagagagctcgctgcccaaatcattcaagaggaagatctccgttgtctcagctaccaagggggtgccagctggaaacagtgacacagaggggggccagcctggtcggaaacgacgctggggagccagcacagccaccacacagaagaaaccttccatcagtatcaccactgaatcactaaagagcctcatccccgacatcaaacccctggcggggcaggaggctgttgtggatcttcatgctgatgactctcgcatctctgaggatgagacagagcgtaatggcgatgatgggacccatgacaaggggctgaaaatatgccggacagtcactcaggtagtacctgcagagggccaggagaatgggcagagggaagaagaggaagaagagaaggaacctgaagcagaacctcctgtacctccccaggtgtcagtagaggtggccttgcccccacctgcagagcatgaagtaaagaaagtgactttaggagataccttaactcgacgttccattagccagcagaagtccggagtttccattaccattgatgacccagtccgaactgcccaggtgccctccccaccccggggcaagattagcaacattgtccatatctccaatttggtccgtcctttcactttaggccagctaaaggagttgttggggcgcacaggaaccttggtggaagaggccttctggattgacaagatcaaatctcattgctttgtaacgtactcaacagtagaggaagctgttgccacccgcacagctctgcacggggtcaaatggccccagtccaatcccaaattcctttgtgctgactatgccgagcaagatgagctggattatcaccgaggcctcttggtggaccgtccctctgaaactaagacagaggagcagggaataccacggcccctgcaccccccacccccacccccggtccagccaccacagcacccccgggcagagcagcgggagcaggaacgggcagtgcgggaacagtgggcagaacgggaacgggaaatggagcggcgggagcggactcgatcagagcgtgaatgggatcgggacaaagttcgagaagggccccgttcccgatcaaggtcccgtgaccgccgccgcaaggaacgtgcgaagtctaaagaaaagaagagtgagaagaaagagaaagcccaggaggaaccacctgccaagctgctggatgaccttttccgaaagaccaaggcagctccctgcatctattggctcccactgactgacagccagatcgttcagaaagaggcagagcgggccgaacgggccaaggagcgggagaagcggcgaaaggagcaagaagaagaagagcaaaaggagcgggagaaggaagccgagcgggaacggaaccgacagctggagcgagagaaacgtcgggagcacagtcgggagagggacagggagagagagagagaaagggagcgggacaggggggaccgagatcgggatagggaaagggaccgagaacgaggcagggaaagggatcgcagggacaccaagcgccacagcagaagccggagtcggagcacacctgtgcgggaccggggtgggcgccgctagctgggaaaacactagagctgcaggtaccagccactcggccccagggggttatggccacagagggataggcacagtctccaccaccctggagccaagggtctttcacatcacctatccctacatacataccaaatggaaaagtggccatccttttccccccaaacacacccccttaacctatctcttgggacttagcccgaccctccctctcatttcccattaagtctgagaggcaagagctaggttaggcaaggaggtggttggccagagatggggaacagccaggtgccccagtcctctgatttttcctccatcctgcttaccacctccctgggtacttacagccttctcttgggaacagccggggccaggactgggtcacctatgagctgaatcagcatctcctcctgagtcccagggcccctgcagttcccagtctcttctgtcctgcagcccttgcctctttcccacaggttccactttatatccaccttttccttttgttcaatttttatttttattttttttattattaaatgatgtggtctatggaaaaaaaaataaaaatctgacttagttttaaa

SEQ ID NO: 356080 - DNA, 1787 bp, Homo sapiens
  misc_feature (633)..(633): n is a, c, g, or t
  misc_feature (670)..(670): n is a, c, g, or t
  misc_feature (706)..(706): n is a, c, g, or t
  misc_feature (840)..(840): n is a, c, g, or t
gagacggagtcttgctctgtcacccaggctgtagtgcaatggcgtgatctcaaccactgcttcctgggttcaagcgattctcctgcctcagcctcccgagtagctgggactataggcgtacgccaccacgcccggctaatttgtttgtatttttagtagagacggggtttcaccatattggccagactggtctccaactcctgacctcaagtgatccgcccgcctcggcctcccaaagtgctgggattataggcgtaagccaccgcgcccggcaccttgccactgattttgcatcatgaatgcaacggaaagatcagccaatttgactttaatagttttcagtctcttaaatctctaacgtatctcttaaatctctaaactatttgtctgtgacctattttactgtttgtgtttcttctgcatcaagttggaggattggtagtgacaaagaaagaagcccctaaacaattaatattagttcaagtaccaaaaaagttcagggcgcttgcattttccagttcttgccctacaggaagcagttcctccaagggaacttactctcttctgcggagcaaggaagaactttcccagaatcttgccacatggcttccaaggcaaactcaaactcaagtncagcgtcatagatcagttcatagtctgggtccgaagncacggcgatgcttcttgcgcacccccacggagcttnttattccgattccgccagccccccgcccctccccaaaaaaagcctaagatgggagtggctatgattcagaggacagagggcagaagctgtttgcgttaaggagtggggggcttgccctattaaggtaatccgcnaacaccgagtctgacccggcccatagaggtacttctaccccgcttacctccccttttctctcgaagggcacccgaagattgtcacgagtccttagactccaactactgcggcagcttccaaatttcctgaaaaccctaagctgggccagcccggcagcccacgcacttccggcctcggacccgccccaaacacccaagcgccccagcgcctcatctctaggtccggaaataaacgaacatctccgattatggttataccagggtcgagggtttccgaatatattcgattcaaagcttcggcaagacgaagaaaaccgagcctgaaagcagggcgagaaaaggggcgctgcagggcggatggaaagaattgattggtaacgatgtggagacggaaacatccgaggacatccggaggaacccggggagttctgagtggtaatcgaggggtagagtatggcagtgggcggggtcatctcggtacgttcgaagggcgttggcggaaattaccgaagatgcccgaagccgtcgggacggacccgagtacctcacgcaagatggcggagctggaggaggtgactctggacgggaagcctcttcaggcgctgcgggtgaccgacctgaaggccgcactggagcagcgaggcctagccaagagcgggcagaagagtgccctggtcaagcggctcaaaggggtgaggagtcggcgttgctggggtgtcggaggagagcggacccggtagagacgagcctctgccgcggcgcaggcgcagtatccgggctcggcgcgagctcgctcaggccgccagcgcgagcctctggatccgcgcgcacggtggttgatgaggttcgcgctggaatggagatcgcgccggttcccgccttaacggcagcagcgcgagcccaaatgggagggtgtgcactactctccaggagtgtcttaagctcct

SEQ ID NO: 356081 - DNA, 598 bp, Homo sapiens
  misc_feature (344)..(344): n is a, c, g, or t
  misc_feature (347)..(347): n is a, c, g, or t
  misc_feature (350)..(350): n is a, c, g, or t
  misc_feature (354)..(354): n is a, c, g, or t
  misc_feature (357)..(357): n is a, c, g, or t
  misc_feature (360)..(360): n is a, c, g, or t
tgaggatccccgaaagaaagagaaagaaggaaggtgtggtttttttctttatttttttttaggattttttttgtttggtttttgttatttcttccattccagaaagggataaacagcacttccagggggagaaaaaaaatcatgttatcagaaagcaaagaagggtgagagcttcacatttccatgtatgccttttccccgccgccctagctcccttcgtcttccttctcttcctcatggctttcattccgtctttcgttttggtttgttttcagtcattctgccttccttctttctctttcttcgaggaggtggtgggatcttggaacaaggaaggtgtggtnttnttncttnatnttnttttaggattttttttgtttggtttctgctatttcttcccttccagaaagggataaacagcagttccagggcgagaaaaaaaatcatcagatcagataatgacgaagatacgcggtgagagcctcacacgaccatcaatgcctcgctgcccgccgccgtacctccgttcgtggtccatctccgtacgctcatggcatggtcatgtccgtctttcgttctcgggatctttcaatcatta

SEQ ID NO: 356082 - DNA, 7039 bp, Homo sapiens
  misc_feature (633)..(633): n is a, c, g, or t
  misc_feature (670)..(670): n is a, c, g, or t
  misc_feature (706)..(706): n is a, c, g, or t
  misc_feature (840)..(840): n is a, c, g, or t
gagacggagtcttgctctgtcacccaggctgtagtgcaatggcgtgatctcaaccactgcttcctgggttcaagcgattctcctgcctcagcctcccgagtagctgggactataggcgtacgccaccacgcccggctaatttgtttgtatttttagtagagacggggtttcaccatattggccagactggtctccaactcctgacctcaagtgatccgcccgcctcggcctcccaaagtgctgggattataggcgtaagccaccgcgcccggcaccttgccactgattttgcatcatgaatgcaacggaaagatcagccaatttgactttaatagttttcagtctcttaaatctctaacgtatctcttaaatctctaaactatttgtctgtgacctattttactgtttgtgtttcttctgcatcaagttggaggattggtagtgacaaagaaagaagcccctaaacaattaatattagttcaagtaccaaaaaagttcagggcgcttgcattttccagttcttgccctacaggaagcagttcctccaagggaacttactctcttctgcggagcaaggaagaactttcccagaatcttgccacatggcttccaaggcaaactcaaactcaagtncagcgtcatagatcagttcatagtctgggtccgaagncacggcgatgcttcttgcgcacccccacggagcttnttattccgattccgccagccccccgcccctccccaaaaaaagcctaagatgggagtggctatgattcagaggacagagggcagaagctgtttgcgttaaggagtggggggcttgccctattaaggtaatccgcnaacaccgagtctgacccggcccatagaggtacttctaccccgcttacctccccttttctctcgaagggcacccgaagattgtcacgagtccttagactccaactactgcggcagcttccaaatttcctgaaaaccctaagctgggccagcccggcagcccacgcacttccggcctcggacccgccccaaacacccaagcgccccagcgcctcatctctaggtccggaaataaacgaacatctccgattatggttataccagggtcgagggtttccgaatatattcgattcaaagcttcggcaagacgaagaaaaccgagcctgaaagcagggcgagaaaaggggcgctgcagggcggatggaaagaattgattggtaacgatgtggagacggaaacatccgaggacatccggaggaacccggggagttctgagtggtaatcgaggggtagagtatggcagtgggcggggtcatctcggtacgttcgaagggcgttggcggaaattaccgaagatgcccgaagccgtcgggacggacccgagtacctcacgcaagatggcggagctggaggaggtgactctggacgggaagcctcttcaggcgctgcgggtgaccgacctgaaggccgcactggagcagcgaggcctagccaagagcgggcagaagagtgccctggtcaagcggctcaaaggggctctaatgctagaaaatttacagaaacactcaacaccccatgctgcattccagccaaattcccagattggtgaggaaatgagccagaacagtttcataaaacagtatctggaaaagcagcaggagctacttaggcagcgtctggaacgtgaagctcgagaagctgcagaacttgaaggaaaaagctcctcaatttctgaagagaaaggtgactctgatgatgagaaaccaaggaaaggagaaagacgatcatctagggtcagacaggcaagagcagctaaactgtctgagggcagccaacctgctgaggaggaagaggatcaagaaacaccttccagaaacctaagggtcagagcagatcgaaatttgaaaacagaggaggaagaagaggaggaggaggaggaggaagaagatgatgaagaagaggaaggtgatgatgagggacaaaaatctagggaggcaccaatcctgaaagagtttaaggaagaaggggaagagatacctagagtaaaaccagaggagatgatggatgagagacccaaaacaagatcccaggaacaggaggtgttagagagaggagggagatttacaagatcccaggaagaggctagaaaaagtcatctggccagacagcagcaggagaaggaaatgaaaacaacatctccccttgaggaggaagaaagagaaataaaatcttcacaaggcttaaaggaaaaatcgaagtctccttcccctcctcgactgactgaagatcgaaagaaggcctcacttgtagcgctgccagagcaaactgccagcgaggaggagactcctccacctttactaacaaaggaagcatcttctccaccacctcatccacagctccatagcgaagaagaaatagagcccatggaaggcccagccccccctgtcctcattcagttatctcctcctaatacagatgctgacaccagggagctattagtatctcagcatactgtccagttggtaggaggcctgtctcctttgtcaagtccttcagacaccaaagcagaatctccagcagagaaagtgccagaggagagtgtcctgcctctggttcagaaaagcacactggctgactactcagcccagaaggatcttgaacctgagtcagacagatctgctcagcccctccctctaaaaattgaggaattagcactggccaaaggaatcactgaagaatgtctgaaacagccatctttggaacagaaggaaggcagaagagcttctcatacccttctcccaagccacagattgaaacagtcagctgattcatcctctagccggtcctcctcatcttcctcctccagttctagatcaagatctcgctctcctgacagttcaggttctcggtctcattcaccgctcagatccaagcagagagatgtagcccaggcacgtactcatgccaaccctcgtggtagacccaagatgggctccagatcaacatcagagtccagatcaaggtccgttcacgttcacgttctcgttcagcatcaagcaacagcagaaaatctctgagccctggagtctccagggacagcagcaccagctatactgaaaccaaagatccctcttctggtcaggaggttgcaactccaccagtgccacaactgcaggtctgtgagccaaaggagaggacttccacctcctcatcctctgtccaagcaaggcgtctgagtcagcctgaatcagctgaaaagcatgtgacccagaggttacagcctgagcgggggagcccaaagaagtgtgaagctgaagaggcagagccaccagctgccacacagccccaaacctcagagactcagacctctcatctgccagaatcagaaagaattcatcacactgttgaggagaaggaggaagtgaccatggacacaagtgaaaacagacctgaaaatgatgttccagaacctcccatgcctattgcagaccaagtcagcaatgatgaccgcccggagggcagtgttgaagatgaggagaagaaagagtacctcatgtacggtaatccgcccgtaaaatataaccctgcccaactggccaatcgctgatgccgcctcttcctctggacccacccgctgctactgagctgcccaatcagagccaagtctgctatccaggtgtcttggccagaggggggcatgtatatgggctcctgtgatgggcccccttttgcctccctgtcttgcttacatcagggggccaagaagaacactgttctggagagacttgtattgagcaagcaaaaaacatttggaaaggggtggacttgcatcatctccctacttgggacaccccaagaagagcttgtgccagtgctggggcgcctgcccacatgcccttgcccttttgaggactgtgggttgccttgtttgctacagactgttgggatccccatctagggcaccaagacctcctaaagtttgtgatcgcagtgccatgctgtaaaacactgagtgggaccctctacttaagctgtgacgactaggaaccgtgcagaggagtctagggtctgagcccctggggatttaatgctgatgacagcccagcccatgtgtcaccacttgctcatcagatggactttcctttggtccctgttgtccatggtgaagggcagcatgttggttgctccaacttctcctccatccctggaggcagggactcatttcatccacctgactggaaccactgtctcagctggagtccctgaggagatgccagccacaactctccgaagagaagtattctgaccttgctgctgaatgtctgccaggtcctggggtattcacctacccccaggctaccttcatcagaggctccatgatcccactcggtgagaggaccccctccccagttacaggcagaggagaaagggactctggagtcatcacctggattccaagtattgggtggtgttattgctgcagcttgccactggtggacatagggtcctgcctgcctctcacgataaaaggcaaggatcattcctgctactcacaggccatctcatcagggactgcaagatgatgtcccttcagggccaggactgatgtctctgcccctttcccccctctatccctcgctgagcctggccaccgccagtgaactgtcttgacatcatggaaactgggcagcgtccccccacacgtttccctcccgccccccctgcgcccctgggaggactctggcagtgccgtgctgactaccacgccgtgcgcccaccttttttgccaacccaaccccccaccaattgcacagcgcctagcagggagggctcattctgattggaccggcggttgactagatacagtccccacagtgaggtgcgattggctgaactgaagatcccagagctcgctgcccaaatcattcaagaggaagatctccgttgtctcagctaccaagggggtgccagctggaaacagtgacacagaggggggccagcctggtcggaaacgacgctggggagccagcacagccaccacacagaagaaaccttccatcagtatcaccactgaatcactaaaggaggctgttgtggatcttcatgctgatgactctcgcatctctgaggatgagacagagcgtaatggcgatgatgggacccatgacaaggggctgaaaatatgccggacagtcactcaggtagtacctgcagagggccaggagaatgggcagagggaagaagaggaagaagagaaggaacctgaagcagaacctcctgtacctccccaggtgtcagtagaggtggccttgcccccacctgcagagcatgaagtaaagaaagtgactttaggagataccttaactcgacgttccattagccagcagaagtccggagtttccattaccattgatgacccagtccgaactgcccaggtgccctccccaccccggggcaagattagcaacattgtccatatctccaatttggtccgtcctttcactttaggccagctaaaggagttgttggggcgcacaggaaccttggtggaagaggccttctggattgacaagatcaaatctcattgctttgtaacgtactcaacagtagaggaagctgttgccacccgcacagctctgcacggggtcaaatggccccagtccaatcccaaattcctttgtgctgactatgccgagcaagatgagctggattatcaccgaggcctcttggtggaccgtccctctgaaactaagacagaggagcagggaataccacggcccctgcaccccccacccccacccccggtccagccaccacagcacccccgggcagagcagcgggagcaggaacgggcagtgcgggaacagtgggcagaacgggaacgggaaatggagcggcgggagcggactcgatcagagcgtgaatgggatcgggacaaagttcgagaagggccccgttcccgatcaaggtcccgtgaccgccgccgcaaggaacgtgcgaagtctaaagaaaagaagagtgagaagaaagagaaagcccaggaggaaccacctgccaagctgctggatgaccttttccgaaagaccaaggcagctccctgcatctattggctcccactgactgacagccagatcgttcagaaagaggcagagcgggccgaacgggccaaggagcgggagaagcggcgaaaggagcaagaagaagaagagcaaaaggagcgggagaaggaagccgagcgggaacggaaccgacagctggagcgagagaaacgtcgggagcacagtcgggagagggacagggagagagagagagaaagggagcgggacaggggggaccgagatcgggatagggaaagggaccgagaacgaggcagggaaagggatcgcagggacaccaagcgccacagcagaagccggagtcggagcacacctgtgcgggaccggggtgggcgccgctagctgggaaaacactagagctgcaggtaccagccactcggccccagggggttatggccacagagggataggcacagtctccaccaccctggagccaagggtctttcacatcacctatccctacatacataccaaatggaaaagtggccatccttttccccccaaacacacccccttaacctatctcttgggacttagcccgaccctccctctcatttcccattaagtctgagaggcaagagctaggttaggcaaggaggtggttggccagagatggggaacagccaggtgccccagtcctctgatttttcctccatcctgcttaccacctccctgggtacttacagccttctcttgggaacagccggggccaggactgggtcacctatgagctgaatcagcatctcctcctgagtcccagggcccctgcagttcccagtctcttctgtcctgcagcccttgcctctttcccacaggttccactttatatccaccttttccttttgttcaatttttatttttattttttttattattaaatgatgtggtctatggaaaaaaaaataaaaatctgacttagttttaaa

SEQ ID NO: 356083 - DNA, 2567 bp, Homo sapiens
cctcccctgctgcagcaaggccctcccccatccgcacacacaggctgctgggtaagtggcaagatggctcccctgcatgtctccggctgatcgctgccgctccgccaatacaatagagccagccactaccagcagcctggccctcttcctccttctccagagagaccaatccagccgaactcggggtttgccaaagggataaacagcacttccagggggagaaaaaaaatcatgttatcagaaagcaaagaaggtgaggagaaggaggaagtgaccatggacacaagtgaaaacagacctgaaaatgatgttccagaacctcccatgcctattgcagaccaagtcagcaatgatgaccgcccggagggcagtgttgaagatgaggagaagaaagagagctcgctgcccaaatcattcaagaggaagatctccgttgtctcagctaccaagggggtgccagctggaaacagtgacacagaggggggccagcctggtcggaaacgacgctggggagccagcacagccaccacacagaagaaaccttccatcagtatcaccactgaatcactaaagagcctcatccccgacatcaaacccctggcggggcaggaggctgttgtggatcttcatgctgatgactctcgcatctctgaggatgagacagagcgtaatggcgatgatgggacccatgacaaggggctgaaaatatgccggacagtcactcaggtagtacctgcagagggccaggagaatgggcagagggaagaagaggaagaagagaaggaacctgaagcagaacctcctgtacctccccaggtgtcagtagaggtggccttgcccccacctgcagagcatgaagtaaagaaagtgactttaggagataccttaactcgacgttccattagccagcagaagtccggagtttccattaccattgatgacccagtccgaactgcccaggtgccctccccaccccggggcaagattagcaacattgtccatatctccaatttggtccgtcctttcactttaggccagctaaaggagttgttggggcgcacaggaaccttggtggaagaggccttctggattgacaagatcaaatctcattgctttgtaacgtactcaacagtagaggaagctgttgccacccgcacagctctgcacggggtcaaatggccccagtccaatcccaaattcctttgtgctgactatgccgagcaagatgagctggattatcaccgaggcctcttggtggaccgtccctctgaaactaagacagaggagcagggaataccacggcccctgcaccccccacccccacccccggtccagccaccacagcacccccgggcagagcagcgggagcaggaacgggcagtgcgggaacagtgggcagaacgggaacgggaaatggagcggcgggagcggactcgatcagagcgtgaatgggatcgggacaaagttcgagaagggccccgttcccgatcaaggtcccgtgaccgccgccgcaaggaacgtgcgaagtctaaagaaaagaagagtgagaagaaagagaaagcccaggaggaaccacctgccaagctgctggatgaccttttccgaaagaccaaggcagctccctgcatctattggctcccactgactgacagccagatcgttcagaaagaggcagagcgggccgaacgggccaaggagcgggagaagcggcgaaaggagcaagaagaagaagagcaaaaggagcgggagaaggaagccgagcgggaacggaaccgacagctggagcgagagaaacgtcgggagcacagtcgggagagggacagggagagagagagagaaagggagcgggacaggggggaccgagatcgggatagggaaagggaccgagaacgaggcagggaaagggatcgcagggacaccaagcgccacagcagaagccggagtcggagcacacctgtgcgggaccggggtgggcgccgctagctgggaaaacactagagctgcaggtaccagccactcggccccagggggttatggccacagagggataggcacagtctccaccaccctggagccaagggtctttcacatcacctatccctacatacataccaaatggaaaagtggccatccttttccccccaaacacacccccttaacctatctcttgggacttagcccgaccctccctctcatttcccattaagtctgagaggcaagagctaggttaggcaaggaggtggttggccagagatggggaacagccaggtgccccagtcctctgatttttcctccatcctgcttaccacctccctgggtacttacagccttctcttgggaacagccggggccaggactgggtcacctatgagctgaatcagcatctcctcctgagtcccagggcccctgcagttcccagtctcttctgtcctgcagcccttgcctctttcccacaggttccactttatatccaccttttccttttgttcaatttttatttttattttttttattattaaatgatgtggtctatggaaaaaaaaataaaaatctgacttagttttaaa

SEQ ID NO: 356084 - DNA, 2505 bp, Homo sapiens
cctcccctgctgcagcaaggccctcccccatccgcacacacaggctgctgggtaagtggcaagatggctcccctgcatgtctccggctgatcgctgccgctccgccaatacaatagagccagccactaccagcagcctggccctcttcctccttctccagagagaccaatccagccgaactcggggtttgcctgaggagaaggaggaagtgaccatggacacaagtgaaaacagacctgaaaatgatgttccagaacctcccatgcctattgcagaccaagtcagcaatgatgaccgcccggagggcagtgttgaagatgaggagaagaaagagagctcgctgcccaaatcattcaagaggaagatctccgttgtctcagctaccaagggggtgccagctggaaacagtgacacagaggggggccagcctggtcggaaacgacgctggggagccagcacagccaccacacagaagaaaccttccatcagtatcaccactgaatcactaaagagcctcatccccgacatcaaacccctggcggggcaggaggctgttgtggatcttcatgctgatgactctcgcatctctgaggatgagacagagcgtaatggcgatgatgggacccatgacaaggggctgaaaatatgccggacagtcactcaggtagtacctgcagagggccaggagaatgggcagagggaagaagaggaagaagagaaggaacctgaagcagaacctcctgtacctccccaggtgtcagtagaggtggccttgcccccacctgcagagcatgaagtaaagaaagtgactttaggagataccttaactcgacgttccattagccagcagaagtccggagtttccattaccattgatgacccagtccgaactgcccaggtgccctccccaccccggggcaagattagcaacattgtccatatctccaatttggtccgtcctttcactttaggccagctaaaggagttgttggggcgcacaggaaccttggtggaagaggccttctggattgacaagatcaaatctcattgctttgtaacgtactcaacagtagaggaagctgttgccacccgcacagctctgcacggggtcaaatggccccagtccaatcccaaattcctttgtgctgactatgccgagcaagatgagctggattatcaccgaggcctcttggtggaccgtccctctgaaactaagacagaggagcagggaataccacggcccctgcaccccccacccccacccccggtccagccaccacagcacccccgggcagagcagcgggagcaggaacgggcagtgcgggaacagtgggcagaacgggaacgggaaatggagcggcgggagcggactcgatcagagcgtgaatgggatcgggacaaagttcgagaagggccccgttcccgatcaaggtcccgtgaccgccgccgcaaggaacgtgcgaagtctaaagaaaagaagagtgagaagaaagagaaagcccaggaggaaccacctgccaagctgctggatgaccttttccgaaagaccaaggcagctccctgcatctattggctcccactgactgacagccagatcgttcagaaagaggcagagcgggccgaacgggccaaggagcgggagaagcggcgaaaggagcaagaagaagaagagcaaaaggagcgggagaaggaagccgagcgggaacggaaccgacagctggagcgagagaaacgtcgggagcacagtcgggagagggacagggagagagagagagaaagggagcgggacaggggggaccgagatcgggatagggaaagggaccgagaacgaggcagggaaagggatcgcagggacaccaagcgccacagcagaagccggagtcggagcacacctgtgcgggaccggggtgggcgccgctagctgggaaaacactagagctgcaggtaccagccactcggccccagggggttatggccacagagggataggcacagtctccaccaccctggagccaagggtctttcacatcacctatccctacatacataccaaatggaaaagtggccatccttttccccccaaacacacccccttaacctatctcttgggacttagcccgaccctccctctcatttcccattaagtctgagaggcaagagctaggttaggcaaggaggtggttggccagagatggggaacagccaggtgccccagtcctctgatttttcctccatcctgcttaccacctccctgggtacttacagccttctcttgggaacagccggggccaggactgggtcacctatgagctgaatcagcatctcctcctgagtcccagggcccctgcagttcccagtctcttctgtcctgcagcccttgcctctttcccacaggttccactttatatccaccttttccttttgttcaatttttatttttattttttttattattaaatgatgtggtctatggaaaaaaaaataaaaatctgacttagttttaaa

SEQ ID NO: 356085 - DNA, 5947 bp, Homo sapiens
tgaggatccccgaaagaaagagaaagaaggaaggtgtggtttttttctttatttttttttaggattttttttgtttggtttttgttatttcttccattccagaaagggataaacagcacttccagggggagaaaaaaaatcatgttatcagaaagcaaagaaggtgaggagaaggaggaagtgaccatggacacaagtgaaaacagacctgaaaatgatgttccagaacctcccatgcctattgcagaccaagtcagcaatgatgaccgcccggagggcagtgttgaagatgaggagaagaaagaggtaaacatccaagccacctattggggcgggtgggcaggaatggacctaggggaaagagtagagcactctagtgatccctcttacacggtgggttaacttaaaggagggatgaggcagggacttggatcagaatagggccaagggagaattcgctggtttagcaagggagaccccttgtgacggggacagggctcattcattttcctttccttgttggggaagtagtgcccagactctagacgtttgtaactaacgggaaagtctgataatggccctttatctaagatttatgttcagcttttcctgctgtcttcccaagcttctcctggtggtaactcctttagctttccctcctttttaaaagcctgatggagcccaacgccatctagtggacattggtggttctcaccagaccagccatgctgagaaatttttgttcctcctctgccctccagtggtctgactgcagagatgtagctacttagaagccagcacttgtgatccggaaggcccattctcagttacctgtgacccctctacctccttttttggcatatgttatcttgtgtcctgcacccacttcagggggcttcccccatcagagccagcgaagtcttcttggctcttaaagtaattgagaaagaatgagctgggtttaggagaggggtaacaaggtgggagggactgttgtgtgtgtagcctttttctggtgtgtgttgcgggggtgggggccggtgaaagtgatttgatgtgcagaatattatttattacaaggtccttcttccccgtaaaactttgtccaagtacctcatgtacggtaatccgcccgtaaaatataaccctgcccaactggccaatcgctgatgccgcctcttcctctggacccacccgctgctactgagctgcccaatcagagccaagtctgctatccaggtgtcttggccagaggggggcatgtatatgggctcctgtgatgggcccccttttgcctccctgtcttgcttacatcagggggccaagaagaacactgttctggagagacttgtattgagcaagcaaaaaacatttggaaaggggtggacttgcatcatctccctacttgggacaccccaagaagagcttgtgccagtgctggggcgcctgcccacatgcccttgcccttttgaggactgtgggttgccttgtttgctacagactgttgggatccccatctagggcaccaagacctcctaaagtttgtgatcgcagtgccatgctgtaaaacactgagtgggaccctctacttaagctgtgacgactaggaaccgtgcagaggagtctagggtctgagcccctggggatttaatgctgatgacagcccagcccatgtgtcaccacttgctcatcagatggactttcctttggtccctgttgtccatggtgaagggcagcatgttggttgctccaacttctcctccatccctggaggcagggactcatttcatccacctgactggaaccactgtctcagctggagtccctgaggagatgccagccacaactctccgaagagaagtattctgaccttgctgctgaatgtctgccaggtcctggggtattcacctacccccaggctaccttcatcagaggctccatgatcccactcggtgagaggaccccctccccagttacaggcagaggagaaagggactctggagtcatcacctggattccaagtattgggtggtgttattgctgcagcttgccactggtggacatagggtcctgcctgcctctcacgataaaaggcaaggatcattcctgctactcacaggccatctcatcagggactgcaagatgatgtcccttcagggccaggactgatgtctctgcccctttcccccctctatccctcgctgagcctggccaccgccagtgaactgtcttgacatcatggaaactgggcagcgtccccccacacgtttccctcccgccccccctgcgcccctgggaggactctggcagtgccgtgctgactaccacgccgtgcgcccaccttttttgccaacccaaccccccaccaattgcacagcgcctagcagggagggctcattctgattggaccggcggttgactagatacagtccccacagtgaggtgcgattggctgaactgaagatcccaggtgtgagatggtacctggaacatttgtcatattcctagtttattttcttctttattttcttcttctttttttaatattttattttattttttttctatatctttattttttctgatttcttttatttatttatttggttcatgtttttcctgttttaattaagacctttttttttgttttgtttttctcactaacttacccatcgagagcggcccagctaggggtcaggctggcccttaacagagaccaaggagacttggttagacgacacaaacggggctgcgggtgggggtggatgggaaagggatttcatcacgaggtttctgccctaccctttagaagagtggtagagtggtcttagtttttccagaaataagcacctacacttgaaaatactctattccctttttctctctcacttttctcccccgccccccatagtctttcgtcattcacccactgagtgtttggggtagagacttgtcccaaagatgtcttctggtctttggcagagcccctaaggcttgagccctggttggagaggaaacagtaagactctgctggagctccctgcggtggctggaaagtctaaggatctccttggggacaatctgcccttcataaaaaccttcctttatcaaagacacctttgagttctttttgctagcacttggctcaagagcctcatctccagtgggtctggtgctgcccttttccacagtgtggtgggggtctgggcagtcttgacatgacagtctgctgtccaagcatctcaaagccattgtcagtgggcatcagtctggccattgaagaaaggagggttaccttgttgaagttgccatccaaagttggttttccttgtttcctcgagttagcaaggaaggacctgggaggactagatgacccagtttggggcacagtttgtttggcttggtgtcctctcgactcagacggtgaaagagggggtatgaccaacatctttagggggctgagaggctactgaactcctcttccagcttatttctggttaagctaatacacaggtgtgatacggagtagatgacttttccctgctctgatgtttagttttatttttttctctaacttgcattgattctgcttcgtttttgccgtttgccgcttctgttttggtctctgtctgtctctgtgtctctctctgtctctctctctcactctatctgtgtctttggaggctaagctaagactgccccatctaacctccttcccccctctctgtggggtgtctctctttctcttttttttcccctttttcttcttcatacagagctcgctgcccaaatcattcaagaggaagatctccgttgtctcagctaccaagggggtgccagctggaaacagtgacacagaggggggccagcctggtcggaaacgacgctggggagccagcacagccaccacacagaagaaaccttccatcagtatcaccactgaatcactaaagagcctcatccccgacatcaaacccctggcggggcaggaggctgttgtggatcttcatgctgatgactctcgcatctctgaggatgagacagagcgtaatggcgatgatgggacccatgacaaggggctgaaaatatgccggacagtcactcaggtagtacctgcagagggccaggagaatgggcagagggaagaagaggaagaagagaaggaacctgaagcagaacctcctgtacctccccaggtgtcagtagaggtggccttgcccccacctgcagagcatgaagtaaagaaagtgactttaggagataccttaactcgacgttccattagccagcagaagtccggagtttccattaccattgatgacccagtccgaactgcccaggtgccctccccaccccggggcaagattagcaacattgtccatatctccaatttggtccgtcctttcactttaggccagctaaaggagttgttggggcgcacaggaaccttggtggaagaggccttctggattgacaagatcaaatctcattgctttgtaacgtactcaacagtagaggaagctgttgccacccgcacagctctgcacggggtcaaatggccccagtccaatcccaaattcctttgtgctgactatgccgagcaagatgagctggattatcaccgaggcctcttggtggaccgtccctctgaaactaagacagaggagcagggaataccacggcccctgcaccccccacccccacccccggtccagccaccacagcacccccgggcagagcagcgggagcaggaacgggcagtgcgggaacagtgggcagaacgggaacgggaaatggagcggcgggagcggactcgatcagagcgtgaatgggatcgggacaaagttcgagaagggccccgttcccgatcaaggtcccgtgaccgccgccgcaaggaacgtgcgaagtctaaagaaaagaagagtgagaagaaagagaaagcccaggaggaaccacctgccaagctgctggatgaccttttccgaaagaccaaggcagctccctgcatctattggctcccactgactgacagccagatcgttcagaaagaggcagagcgggccgaacgggccaaggagcgggagaagcggcgaaaggagcaagaagaagaagagcaaaaggagcgggagaaggaagccgagcgggaacggaaccgacagctggagcgagagaaacgtcgggagcacagtcgggagagggacagggagagagagagagaaagggagcgggacaggggggaccgagatcgggatagggaaagggaccgagaacgaggcagggaaagggatcgcagggacaccaagcgccacagcagaagccggagtcggagcacacctgtgcgggaccggggtgggcgccgctagctgggaaaacactagagctgcaggtaccagccactcggccccagggggttatggccacagagggataggcacagtctccaccaccctggagccaagggtctttcacatcacctatccctacatacataccaaatggaaaagtggccatccttttccccccaaacacacccccttaacctatctcttgggacttagcccgaccctccctctcatttcccattaagtctgagaggcaagagctaggttaggcaaggaggtggttggccagagatggggaacagccaggtgccccagtcctctgatttttcctccatcctgcttaccacctccctgggtacttacagccttctcttgggaacagccggggccaggactgggtcacctatgagctgaatcagcatctcctcctgagtcccagggcccctgcagttcccagtctcttctgtcctgcagcccttgcctctttcccacaggttccactttatatccaccttttccttttgttcaatttttatttttattttttttattattaaatgatgtggtctatggaaaaaaaaataaaaatctgacttagttttaaa

SEQ ID NO: 356086 - DNA, 8001 bp, Homo sapiens
  misc_feature (633)..(633): n is a, c, g, or t
  misc_feature (670)..(670): n is a, c, g, or t
  misc_feature (706)..(706): n is a, c, g, or t
  misc_feature (840)..(840): n is a, c, g, or t
gagacggagtcttgctctgtcacccaggctgtagtgcaatggcgtgatctcaaccactgcttcctgggttcaagcgattctcctgcctcagcctcccgagtagctgggactataggcgtacgccaccacgcccggctaatttgtttgtatttttagtagagacggggtttcaccatattggccagactggtctccaactcctgacctcaagtgatccgcccgcctcggcctcccaaagtgctgggattataggcgtaagccaccgcgcccggcaccttgccactgattttgcatcatgaatgcaacggaaagatcagccaatttgactttaatagttttcagtctcttaaatctctaacgtatctcttaaatctctaaactatttgtctgtgacctattttactgtttgtgtttcttctgcatcaagttggaggattggtagtgacaaagaaagaagcccctaaacaattaatattagttcaagtaccaaaaaagttcagggcgcttgcattttccagttcttgccctacaggaagcagttcctccaagggaacttactctcttctgcggagcaaggaagaactttcccagaatcttgccacatggcttccaaggcaaactcaaactcaagtncagcgtcatagatcagttcatagtctgggtccgaagncacggcgatgcttcttgcgcacccccacggagcttnttattccgattccgccagccccccgcccctccccaaaaaaagcctaagatgggagtggctatgattcagaggacagagggcagaagctgtttgcgttaaggagtggggggcttgccctattaaggtaatccgcnaacaccgagtctgacccggcccatagaggtacttctaccccgcttacctccccttttctctcgaagggcacccgaagattgtcacgagtccttagactccaactactgcggcagcttccaaatttcctgaaaaccctaagctgggccagcccggcagcccacgcacttccggcctcggacccgccccaaacacccaagcgccccagcgcctcatctctaggtccggaaataaacgaacatctccgattatggttataccagggtcgagggtttccgaatatattcgattcaaagcttcggcaagacgaagaaaaccgagcctgaaagcagggcgagaaaaggggcgctgcagggcggatggaaagaattgattggtaacgatgtggagacggaaacatccgaggacatccggaggaacccggggagttctgagtggtaatcgaggggtagagtatggcagtgggcggggtcatctcggtacgttcgaagggcgttggcggaaattaccgaagatgcccgaagccgtcgggacggacccgagtacctcacgcaagatggcggagctggaggaggtgactctggacgggaagcctcttcaggcgctgcgggtgaccgacctgaaggccgcactggagcagcgaggcctagccaagagcgggcagaagagtgccctggtcaagcggctcaaaggggctctaatgctagaaaatttacagaaacactcaacaccccatgctgcattccagccaaattcccagattggtgaggaaatgagccagaacagtttcataaaacagtatctggaaaagcagcaggagctacttaggcagcgtctggaacgtgaagctcgagaagctgcagaacttgaagaagcttcagctgagtcggaggacgagatgatccatcctgagggagtggcttccctgctgcctcctgactttcagagcagcctggagagaccagagctggagctcagcagacattcgcccagaaaaagctcctcaatttctgaagagaaaggtgactctgatgatgagaaaccaaggaaaggagaaagacgatcatctagggtcagacaggcaagagcagctaaactgtctgagggcagccaacctgctgaggaggaagaggatcaagaaacaccttccagaaacctaagggtcagagcagatcgaaatttgaaaacagaggaggaagaagaggaggaggaggaggaggaagaagatgatgaagaagaggaaggtgatgatgagggacaaaaatctagggaggcaccaatcctgaaagagtttaaggaagaaggggaagagatacctagagtaaaaccagaggagatgatggatgagagacccaaaacaagatcccaggaacaggaggtgttagagagaggagggagatttacaagatcccaggaagaggctagaaaaagtcatctggccagacagcagcaggagaaggaaatgaaaacaacatctccccttgaggaggaagaaagagaaataaaatcttcacaaggcttaaaggaaaaatcgaagtctccttcccctcctcgactgactgaagatcgaaagaaggcctcacttgtagcgctgccagagcaaactgccagcgaggaggagactcctccacctttactaacaaaggaagcatcttctccaccacctcatccacagctccatagcgaagaagaaatagagcccatggaaggcccagccccccctgtcctcattcagttatctcctcctaatacagatgctgacaccagggagctattagtatctcagcatactgtccagttggtaggaggcctgtctcctttgtcaagtccttcagacaccaaagcagaatctccagcagagaaagtgccagaggagagtgtcctgcctctggttcagaaaagcacactggctgactactcagcccagaaggatcttgaacctgagtcagacagatctgctcagcccctccctctaaaaattgaggaattagcactggccaaaggaatcactgaagaatgtctgaaacagccatctttggaacagaaggaaggcagaagagcttctcatacccttctcccaagccacagattgaaacagtcagctgattcatcctctagccggtcctcctcatcttcctcctccagttctagatcaagatctcgctctcctgacagttcaggttctcggtctcattcaccgctcagatccaagcagagagatgtagcccaggcacgtactcatgccaaccctcgtggtagacccaagatgggctccagatcaacatcagagtccagatcaaggtccgttcacgttcacgttctcgttcagcatcaagcaacagcagaaaatctctgagccctggagtctccagggacagcagcaccagctatactgaaaccaaagatccctcttctggtcaggaggttgcaactccaccagtgccacaactgcaggtctgtgagccaaaggagaggacttccacctcctcatcctctgtccaagcaaggcgtctgagtcagcctgaatcagctgaaaagcatgtgacccagaggttacagcctgagcgggggagcccaaagaagtgtgaagctgaagaggcagagccaccagctgccacacagccccaaacctcagagactcagacctctcatctgccagaatcagaaagaattcatcacactgttgaggagaaggaggaagtgaccatggacacaagtgaaaacagacctgaaaatgatgttccagaacctcccatgcctattgcagaccaagtcagcaatgatgaccgcccggagggcagtgttgaagatgaggagaagaaagaggtaaacatccaagccacctattggggcgggtgggcaggaatggacctaggggaaagagtagagcactctagtgatccctcttacacggtgggttaacttaaaggagggatgaggcagggacttggatcagaatagggccaagggagaattcgctggtttagcaagggagaccccttgtgacggggacagggctcattcattttcctttccttgttggggaagtagtgcccagactctagacgtttgtaactaacgggaaagtctgataatggccctttatctaagatttatgttcagcttttcctgctgtcttcccaagcttctcctggtggtaactcctttagctttccctcctttttaaaagcctgatggagcccaacgccatctagtggacattggtggttctcaccagaccagccatgctgagaaatttttgttcctcctctgccctccagtggtctgactgcagagatgtagctacttagaagccagcacttgtgatccggaaggcccattctcagttacctgtgacccctctacctccttttttggcatatgttatcttgtgtcctgcacccacttcagggggcttcccccatcagagccagcgaagtcttcttggctcttaaagtaattgagaaagaatgagctgggtttaggagaggggtaacaaggtgggagggactgttgtgtgtgtagcctttttctggtgtgtgttgcgggggtgggggccggtgaaagtgatttgatgtgcagaatattatttattacaaggtccttcttccccgtaaaactttgtccaagtacctcatgtacggtaatccgcccgtaaaatataaccctgcccaactggccaatcgctgatgccgcctcttcctctggacccacccgctgctactgagctgcccaatcagagccaagtctgctatccaggtgtcttggccagaggggggcatgtatatgggctcctgtgatgggcccccttttgcctccctgtcttgcttacatcagggggccaagaagaacactgttctggagagacttgtattgagcaagcaaaaaacatttggaaaggggtggacttgcatcatctccctacttgggacaccccaagaagagcttgtgccagtgctggggcgcctgcccacatgcccttgcccttttgaggactgtgggttgccttgtttgctacagactgttgggatccccatctagggcaccaagacctcctaaagtttgtgatcgcagtgccatgctgtaaaacactgagtgggaccctctacttaagctgtgacgactaggaaccgtgcagaggagtctagggtctgagcccctggggatttaatgctgatgacagcccagcccatgtgtcaccacttgctcatcagatggactttcctttggtccctgttgtccatggtgaagggcagcatgttggttgctccaacttctcctccatccctggaggcagggactcatttcatccacctgactggaaccactgtctcagctggagtccctgaggagatgccagccacaactctccgaagagaagtattctgaccttgctgctgaatgtctgccaggtcctggggtattcacctacccccaggctaccttcatcagaggctccatgatcccactcggtgagaggaccccctccccagttacaggcagaggagaaagggactctggagtcatcacctggattccaagtattgggtggtgttattgctgcagcttgccactggtggacatagggtcctgcctgcctctcacgataaaaggcaaggatcattcctgctactcacaggccatctcatcagggactgcaagatgatgtcccttcagggccaggactgatgtctctgcccctttcccccctctatccctcgctgagcctggccaccgccagtgaactgtcttgacatcatggaaactgggcagcgtccccccacacgtttccctcccgccccccctgcgcccctgggaggactctggcagtgccgtgctgactaccacgccgtgcgcccaccttttttgccaacccaaccccccaccaattgcacagcgcctagcagggagggctcattctgattggaccggcggttgactagatacagtccccacagtgaggtgcgattggctgaactgaagatcccagagctcgctgcccaaatcattcaagaggaagatctccgttgtctcagctaccaagggggtgccagctggaaacagtgacacagaggggggccagcctttcctaatttcatcctcccgatccagcgcaggctccacacacaatggcctttcaatcagtatcatctttgaatcaatacagacagcctcatccccgacatcaaacccctggcggggcaggaggctgttgtggatcttcatgctgatgactctcgcatctctgaggatgagacagagcgtaatggcgatgatgggacccatgacaaggggctgaaaatatgccggacagtcactcaggtagtacctgcagagggccaggagaatgggcagagggaagaagaggaagaagagaaggaacctgaagcagaacctcctgtacctccccaggtgtcagtagaggtggccttgcccccacctgcagagcatgaagtaaagaaagtgactttaggagataccttaactcgacgttccattagccagcagaagtccggagtttccattaccattgatgacccagtccgaactgcccaggtgccctccccaccccggggcaagattagcaacattgtccatatctccaatttggtccgtcctttcactttaggccagctaaaggagttgttggggcgcacaggaaccttggtggaagaggccttctggattgacaagatcaaatctcattgctttgtaacgtactcaacagtagaggaagctgttgccacccgcacagctctgcacggggtcaaatggccccagtccaatcccaaattcctttgtgctgactatgccgagcaagatgagctggattatcaccgaggcctcttggtggaccgtccctctgaaactaagacagaggagcagggaataccacggcccctgcaccccccacccccacccccggtccagccaccacagcacccccgggcagagcagcgggagcaggaacgggcagtgcgggaacagtgggcagaacgggaacgggaaatggagcggcgggagcggactcgatcagagcgtgaatgggatcgggacaaagttcgagaagggccccgttcccgatcaaggtcccgtgaccgccgccgcaaggaacgtgcgaagtctaaagaaaagaagagtgagaagaaagagaaagcccaggaggaaccacctgccaagctgctggatgaccttttccgaaagaccaaggcagctccctgcatctattggctcccactgactgacagccagatcgttcagaaagaggcagagcgggccgaacgggccaaggagcgggagaagcggcgaaaggagcaagaagaagaagagcaaaaggagcgggagaaggaagccgagcgggaacggaaccgacagctggagcgagagaaacgtcgggagcacagtcgggagagggacagggagagagagagagaaagggagcgggacaggggggaccgagatcgggatagggaaagggaccgagaacgaggcagggaaagggatcgcagggacaccaagcgccacagcagaagccggagtcggagcacacctgtgcgggaccggggtgggcgccgctagctgggaaaacactagagctgcaggtaccagccactcggccccagggggttatggccacagagggataggcacagtctccaccaccctggagccaagggtctttcacatcacctatccctacatacataccaaatggaaaagtggccatccttttccccccaaacacacccccttaacctatctcttgggacttagcccgaccctccctctcatttcccattaagtctgagaggcaagagctaggttaggcaaggaggtggttggccagagatggggaacagccaggtgccccagtcctctgatttttcctccatcctgcttaccacctccctgggtacttacagccttctcttgggaacagccggggccaggactgggtcacctatgagctgaatcagcatctcctcctgagtcccagggcccctgcagttcccagtctcttctgtcctgcagcccttgcctctttcccacaggttccactttatatccaccttttccttttgttcaatttttatttttattttttttattattaaatgatgtggtctatggaaaaaaaaataaaaatctgacttagttttaaa

SEQ ID NO: 356087 - DNA, 2647 bp, Homo sapiens
gccgaatggctcggacctgcagctctagtgttctcccagctagcggcgcccaccccggtcccgcacaggtgtgctccgactccggcttctgctgtggcgcttggtgtcctctcgactcagacggtgaaagagggggtatgaccaacatctttagggggctgagaggctactgaactcctcttccagcttatttctggttaagctaatacacaggtgtgatacggagtagatgacttttccctgctctgatgtttagttttatttttttctctaacttgcattgattctgcttcgtttttgccgtttgccgcttctgttttggtctctgtctgtctctgtgtctctctctgtctctctctctcactctatctgtgtctttggaggctaagctaagactgccccatctaacctccttcccccctctctgtggggtgtctctctttctcttttttttcccctttttcttcttcatacagagctcgctgcccaaatcattcaagaggaagatctccgttgtctcagctaccaagggggtgccagctggaaacagtgacacagaggggggccagcctggtcggaaacgacgctggggagccagcacagccaccacacagaagaaaccttccatcagtatcaccactgaatcactaaagagcctcatccccgacatcaaacccctggcggggcaggaggctgttgtggatcttcatgctgatgactctcgcatctctgaggatgagacagagcgtaatggcgatgatgggacccatgacaaggggctgaaaatatgccggacagtcactcaggtagtacctgcagagggccaggagaatgggcagagggaagaagaggaagaagagaaggaacctgaagcagaacctcctgtacctccccaggtgtcagtagaggtggccttgcccccacctgcagagcatgaagtaaagaaagtgactttaggagataccttaactcgacgttccattagccagcagaagtccggagtttccattaccattgatgacccagtccgaactgcccaggtgccctccccaccccggggcaagattagcaacattgtccatatctccaatttggtccgtcctttcactttaggccagctaaaggagttgttggggcgcacaggaaccttggtggaagaggccttctggattgacaagatcaaatctcattgctttgtaacgtactcaacagtagaggaagctgttgccacccgcacagctctgcacggggtcaaatggccccagtccaatcccaaattcctttgtgctgactatgccgagcaagatgagctggattatcaccgaggcctcttggtggaccgtccctctgaaactaagacagaggagcagggaataccacggcccctgcaccccccacccccacccccggtccagccaccacagcacccccgggcagagcagcgggagcaggaacgggcagtgcgggaacagtgggcagaacgggaacgggaaatggagcggcgggagcggactcgatcagagcgtgaatgggatcgggacaaagttcgagaagggccccgttcccgatcaaggtcccgtgaccgccgccgcaaggaacgtgcgaagtctaaagaaaagaagagtgagaagaaagagaaagcccaggaggaaccacctgccaagctgctggatgaccttttccgaaagaccaaggcagctccctgcatctattggctcccactgactgacagccagatcgttcagaaagaggcagagcgggccgaacgggccaaggagcgggagaagcggcgaaaggagcaagaagaagaagagcaaaaggagcgggagaaggaagccgagcgggaacggaaccgacagctggagcgagagaaacgtcgggagcacagtcgggagagggacagggagagagagagagaaagggagcgggacaggggggaccgagatcgggatagggaaagggaccgagaacgaggcagggaaagggatcgcagggacaccaagcgccacagcagaagccggagtcggagcacacctgtgcgggaccggggtgggcgccgctagctgggaaaacactagagctgcaggtaccagccactcggccccagggggttatggccacagagggataggcacagtctccaccaccctggagccaagggtctttcacatcacctatccctacatacataccaaatggaaaagtggccatccttttccccccaaacacacccccttaacctatctcttgggacttagcccgaccctccctctcatttcccattaagtctgagaggcaagagctaggttaggcaaggaggtggttggccagagatggggaacagccaggtgccccagtcctctgatttttcctccatcctgcttaccacctccctgggtacttacagccttctcttgggaacagccggggccaggactgggtcacctatgagctgaatcagcatctcctcctgagtcccagggcccctgcagttcccagtctcttctgtcctgcagcccttgcctctttcccacaggttccactttatatccaccttttccttttgttcaatttttatttttattttttttattattaaatgatgtggtctatggaaaaaaaaataaaaatctgacttagttttaaa

SEQ ID NO: 356088 - DNA, 2506 bp, Homo sapiens
gagtgcagtcagtggcaccatcttggctcactgcagcctccgcctcccgggttcaagcaattctgcttcagcaccctgagtagctgggattacaggcatgcaccacaacgcctggctaatttttgtatttttagtagagatggggtttcaccatgttggtcaggctagtctcaaactcctgacctcgtgatccacccgccttggcctcccaaagtgctgggattacaggtgtgagccaccacactcagcctccaaatatgatttctttaagttaaccttttaccaaaactccagccagaggtaacctgtaggtattacggtttgaactagcagaggtcctgagaccatctaactgttgggtctatttcttggggacagcagctaccaagggggtgccagctggaaacagtgacacagaggggggccagcctggtcggaaacgacgctggggagccagcacagccaccacacagaagaaaccttccatcagtatcaccactgaatcactaaagagcctcatccccgacatcaaacccctggcggggcaggaggctgttgtggatcttcatgctgatgactctcgcatctctgaggatgagacagagcgtaatggcgatgatgggacccatgacaaggggctgaaaatatgccggacagtcactcaggtagtacctgcagagggccaggagaatgggcagagggaagaagaggaagaagagaaggaacctgaagcagaacctcctgtacctccccaggtgtcagtagaggtggccttgcccccacctgcagagcatgaagtaaagaaagtgactttaggagataccttaactcgacgttccattagccagcagaagtccggagtttccattaccattgatgacccagtccgaactgcccaggtgccctccccaccccggggcaagattagcaacattgtccatatctccaatttggtccgtcctttcactttaggccagctaaaggagttgttggggcgcacaggaaccttggtggaagaggccttctggattgacaagatcaaatctcattgctttgtaacgtactcaacagtagaggaagctgttgccacccgcacagctctgcacggggtcaaatggccccagtccaatcccaaattcctttgtgctgactatgccgagcaagatgagctggattatcaccgaggcctcttggtggaccgtccctctgaaactaagacagaggagcagggaataccacggcccctgcaccccccacccccacccccggtccagccaccacagcacccccgggcagagcagcgggagcaggaacgggcagtgcgggaacagtgggcagaacgggaacgggaaatggagcggcgggagcggactcgatcagagcgtgaatgggatcgggacaaagttcgagaagggccccgttcccgatcaaggtcccgtgaccgccgccgcaaggaacgtgcgaagtctaaagaaaagaagagtgagaagaaagagaaagcccaggaggaaccacctgccaagctgctggatgaccttttccgaaagaccaaggcagctccctgcatctattggctcccactgactgacagccagatcgttcagaaagaggcagagcgggccgaacgggccaaggagcgggagaagcggcgaaaggagcaagaagaagaagagcaaaaggagcgggagaaggaagccgagcgggaacggaaccgacagctggagcgagagaaacgtcgggagcacagtcgggagagggacagggagagagagagagaaagggagcgggacaggggggaccgagatcgggatagggaaagggaccgagaacgaggcagggaaagggatcgcagggacaccaagcgccacagcagaagccggagtcggagcacacctgtgcgggaccggggtgggcgccgctagctgggaaaacactagagctgcaggtaccagccactcggccccagggggttatggccacagagggataggcacagtctccaccaccctggagccaagggtctttcacatcacctatccctacatacataccaaatggaaaagtggccatccttttccccccaaacacacccccttaacctatctcttgggacttagcccgaccctccctctcatttcccattaagtctgagaggcaagagctaggttaggcaaggaggtggttggccagagatggggaacagccaggtgccccagtcctctgatttttcctccatcctgcttaccacctccctgggtacttacagccttctcttgggaacagccggggccaggactgggtcacctatgagctgaatcagcatctcctcctgagtcccagggcccctgcagttcccagtctcttctgtcctgcagcccttgcctctttcccacaggttccactttatatccaccttttccttttgttcaatttttatttttattttttttattattaaatgatgtggtctatggaaaaaaaaataaaaatctgacttagttttaaa

SEQ ID NO: 356089 - DNA, 2470 bp, Homo sapiens
gagtgcagtcagtggcaccatcttggctcactgcagcctccgcctcccgggttcaagcaattctgcttcagcaccctgagtagctgggattacaggcatgcaccacaacgcctggctaatttttgtatttttagtagagatggggtttcaccatgttggtcaggctagtctcaaactcctgacctcgtgatccacccgccttggcctcccaaagtgctgggattacaggtgtgagccaccacactcagcctccaaatatgatttctttaagttaaccttttaccaaaactccagccagaggtaacctgtaggtattacggtttgaactagcagaggtcctgagaccatctaactgttgggtctatttcttggggacagcagctaccaagggggtgccagctggaaacagtgacacagaggggggccagcctggtcggaaacgacgctggggagccagcacagccaccacacagaagaaaccttccatcagtatcaccactgaatcactaaaggaggctgttgtggatcttcatgctgatgactctcgcatctctgaggatgagacagagcgtaatggcgatgatgggacccatgacaaggggctgaaaatatgccggacagtcactcaggtagtacctgcagagggccaggagaatgggcagagggaagaagaggaagaagagaaggaacctgaagcagaacctcctgtacctccccaggtgtcagtagaggtggccttgcccccacctgcagagcatgaagtaaagaaagtgactttaggagataccttaactcgacgttccattagccagcagaagtccggagtttccattaccattgatgacccagtccgaactgcccaggtgccctccccaccccggggcaagattagcaacattgtccatatctccaatttggtccgtcctttcactttaggccagctaaaggagttgttggggcgcacaggaaccttggtggaagaggccttctggattgacaagatcaaatctcattgctttgtaacgtactcaacagtagaggaagctgttgccacccgcacagctctgcacggggtcaaatggccccagtccaatcccaaattcctttgtgctgactatgccgagcaagatgagctggattatcaccgaggcctcttggtggaccgtccctctgaaactaagacagaggagcagggaataccacggcccctgcaccccccacccccacccccggtccagccaccacagcacccccgggcagagcagcgggagcaggaacgggcagtgcgggaacagtgggcagaacgggaacgggaaatggagcggcgggagcggactcgatcagagcgtgaatgggatcgggacaaagttcgagaagggccccgttcccgatcaaggtcccgtgaccgccgccgcaaggaacgtgcgaagtctaaagaaaagaagagtgagaagaaagagaaagcccaggaggaaccacctgccaagctgctggatgaccttttccgaaagaccaaggcagctccctgcatctattggctcccactgactgacagccagatcgttcagaaagaggcagagcgggccgaacgggccaaggagcgggagaagcggcgaaaggagcaagaagaagaagagcaaaaggagcgggagaaggaagccgagcgggaacggaaccgacagctggagcgagagaaacgtcgggagcacagtcgggagagggacagggagagagagagagaaagggagcgggacaggggggaccgagatcgggatagggaaagggaccgagaacgaggcagggaaagggatcgcagggacaccaagcgccacagcagaagccggagtcggagcacacctgtgcgggaccggggtgggcgccgctagctgggaaaacactagagctgcaggtaccagccactcggccccagggggttatggccacagagggataggcacagtctccaccaccctggagccaagggtctttcacatcacctatccctacatacataccaaatggaaaagtggccatccttttccccccaaacacacccccttaacctatctcttgggacttagcccgaccctccctctcatttcccattaagtctgagaggcaagagctaggttaggcaaggaggtggttggccagagatggggaacagccaggtgccccagtcctctgatttttcctccatcctgcttaccacctccctgggtacttacagccttctcttgggaacagccggggccaggactgggtcacctatgagctgaatcagcatctcctcctgagtcccagggcccctgcagttcccagtctcttctgtcctgcagcccttgcctctttcccacaggttccactttatatccaccttttccttttgttcaatttttatttttattttttttattattaaatgatgtggtctatggaaaaaaaaataaaaatctgacttagttttaaa

SEQ ID NO: 356090 - DNA, 2603 bp, Homo sapiens
gagtgcagtcagtggcaccatcttggctcactgcagcctccgcctcccgggttcaagcaattctgcttcagcaccctgagtagctgggattacaggcatgcaccacaacgcctggctaatttttgtatttttagtagagatggggtttcaccatgttggtcaggctagtctcaaactcctgacctcgtgatccacccgccttggcctcccaaagtgctgggattacaggtgtgagccaccacactcagcctccaaatatgatttctttaagttaaccttttaccaaaactccagccagaggtaacctgtaggtattacggtttgaactagcagaggtcctgagaccatctaactgttgggtctatttcttggggacagcagctaccaagggggtgccagctggaaacagtgacacagaggggggccagcctggtcggaaacgacgctggggagccagcacagccaccacacagaagaaaccttccatcagtatcaccactgaatcactaaaggtgaggtgggaggagccagggaagggaggatgagacctgttaaggtgggagtagacatgggcccagtgtaacggggtggggggtatctgtgtcccagagcctcatccccgacatcaaacccctggcggggcaggaggctgttgtggatcttcatgctgatgactctcgcatctctgaggatgagacagagcgtaatggcgatgatgggacccatgacaaggggctgaaaatatgccggacagtcactcaggtagtacctgcagagggccaggagaatgggcagagggaagaagaggaagaagagaaggaacctgaagcagaacctcctgtacctccccaggtgtcagtagaggtggccttgcccccacctgcagagcatgaagtaaagaaagtgactttaggagataccttaactcgacgttccattagccagcagaagtccggagtttccattaccattgatgacccagtccgaactgcccaggtgccctccccaccccggggcaagattagcaacattgtccatatctccaatttggtccgtcctttcactttaggccagctaaaggagttgttggggcgcacaggaaccttggtggaagaggccttctggattgacaagatcaaatctcattgctttgtaacgtactcaacagtagaggaagctgttgccacccgcacagctctgcacggggtcaaatggccccagtccaatcccaaattcctttgtgctgactatgccgagcaagatgagctggattatcaccgaggcctcttggtggaccgtccctctgaaactaagacagaggagcagggaataccacggcccctgcaccccccacccccacccccggtccagccaccacagcacccccgggcagagcagcgggagcaggaacgggcagtgcgggaacagtgggcagaacgggaacgggaaatggagcggcgggagcggactcgatcagagcgtgaatgggatcgggacaaagttcgagaagggccccgttcccgatcaaggtcccgtgaccgccgccgcaaggaacgtgcgaagtctaaagaaaagaagagtgagaagaaagagaaagcccaggaggaaccacctgccaagctgctggatgaccttttccgaaagaccaaggcagctccctgcatctattggctcccactgactgacagccagatcgttcagaaagaggcagagcgggccgaacgggccaaggagcgggagaagcggcgaaaggagcaagaagaagaagagcaaaaggagcgggagaaggaagccgagcgggaacggaaccgacagctggagcgagagaaacgtcgggagcacagtcgggagagggacagggagagagagagagaaagggagcgggacaggggggaccgagatcgggatagggaaagggaccgagaacgaggcagggaaagggatcgcagggacaccaagcgccacagcagaagccggagtcggagcacacctgtgcgggaccggggtgggcgccgctagctgggaaaacactagagctgcaggtaccagccactcggccccagggggttatggccacagagggataggcacagtctccaccaccctggagccaagggtctttcacatcacctatccctacatacataccaaatggaaaagtggccatccttttccccccaaacacacccccttaacctatctcttgggacttagcccgaccctccctctcatttcccattaagtctgagaggcaagagctaggttaggcaaggaggtggttggccagagatggggaacagccaggtgccccagtcctctgatttttcctccatcctgcttaccacctccctgggtacttacagccttctcttgggaacagccggggccaggactgggtcacctatgagctgaatcagcatctcctcctgagtcccagggcccctgcagttcccagtctcttctgtcctgcagcccttgcctctttcccacaggttccactttatatccaccttttccttttgttcaatttttatttttattttttttattattaaatgatgtggtctatggaaaaaaaaataaaaatctgacttagttttaaa

SEQ ID NO: 356091 - DNA, 9251 bp, Homo sapiens
  misc_feature (633)..(633): n is a, c, g, or t
  misc_feature (670)..(670): n is a, c, g, or t
  misc_feature (706)..(706): n is a, c, g, or t
  misc_feature (840)..(840): n is a, c, g, or t
gagacggagtcttgctctgtcacccaggctgtagtgcaatggcgtgatctcaaccactgcttcctgggttcaagcgattctcctgcctcagcctcccgagtagctgggactataggcgtacgccaccacgcccggctaatttgtttgtatttttagtagagacggggtttcaccatattggccagactggtctccaactcctgacctcaagtgatccgcccgcctcggcctcccaaagtgctgggattataggcgtaagccaccgcgcccggcaccttgccactgattttgcatcatgaatgcaacggaaagatcagccaatttgactttaatagttttcagtctcttaaatctctaacgtatctcttaaatctctaaactatttgtctgtgacctattttactgtttgtgtttcttctgcatcaagttggaggattggtagtgacaaagaaagaagcccctaaacaattaatattagttcaagtaccaaaaaagttcagggcgcttgcattttccagttcttgccctacaggaagcagttcctccaagggaacttactctcttctgcggagcaaggaagaactttcccagaatcttgccacatggcttccaaggcaaactcaaactcaagtncagcgtcatagatcagttcatagtctgggtccgaagncacggcgatgcttcttgcgcacccccacggagcttnttattccgattccgccagccccccgcccctccccaaaaaaagcctaagatgggagtggctatgattcagaggacagagggcagaagctgtttgcgttaaggagtggggggcttgccctattaaggtaatccgcnaacaccgagtctgacccggcccatagaggtacttctaccccgcttacctccccttttctctcgaagggcacccgaagattgtcacgagtccttagactccaactactgcggcagcttccaaatttcctgaaaaccctaagctgggccagcccggcagcccacgcacttccggcctcggacccgccccaaacacccaagcgccccagcgcctcatctctaggtccggaaataaacgaacatctccgattatggttataccagggtcgagggtttccgaatatattcgattcaaagcttcggcaagacgaagaaaaccgagcctgaaagcagggcgagaaaaggggcgctgcagggcggatggaaagaattgattggtaacgatgtggagacggaaacatccgaggacatccggaggaacccggggagttctgagtggtaatcgaggggtagagtatggcagtgggcggggtcatctcggtacgttcgaagggcgttggcggaaattaccgaagatgcccgaagccgtcgggacggacccgagtacctcacgcaagatggcggagctggaggaggtgactctggacgggaagcctcttcaggcgctgcgggtgaccgacctgaaggccgcactggagcagcgaggcctagccaagagcgggcagaagagtgccctggtcaagcggctcaaaggggctctaatgctagaaaatttacagaaacactcaacaccccatgctgcattccagccaaattcccagattggtgaggaaatgagccagaacagtttcataaaacagtatctggaaaagcagcaggagctacttaggcagcgtctggaacgtgaagctcgagaagctgcagaacttgaagaagcttcagctgagtcggaggacgagatgatccatcctgagggagtggcttccctgctgcctcctgactttcagagcagcctggagagaccagagctggagctcagcagacattcgcccagaaaaagctcctcaatttctgaagagaaaggtgactctgatgatgagaaaccaaggaaaggagaaagacgatcatctagggtcagacaggcaagagcagctaaactgtctgagggcagccaacctgctgaggaggaagaggatcaagaaacaccttccagaaacctaagggtcagagcagatcgaaatttgaaaacagaggaggaagaagaggaggaggaggaggaggaagaagatgatgaagaagaggaaggtgatgatgagggacaaaaatctagggaggcaccaatcctgaaagagtttaaggaagaaggggaagagatacctagagtaaaaccagaggagatgatggatgagagacccaaaacaagatcccaggaacaggaggtgttagagagaggagggagatttacaagatcccaggaagaggctagaaaaagtcatctggccagacagcagcaggagaaggaaatgaaaacaacatctccccttgaggaggaagaaagagaaataaaatcttcacaaggcttaaaggaaaaatcgaagtctccttcccctcctcgactgactgaagatcgaaagaaggcctcacttgtagcgctgccagagcaaactgccagcgaggaggagactcctccacctttactaacaaaggaagcatcttctccaccacctcatccacagctccatagcgaagaagaaatagagcccatggaaggcccagccccccctgtcctcattcagttatctcctcctaatacagatgctgacaccagggagctattagtatctcagcatactgtccagttggtaggaggcctgtctcctttgtcaagtccttcagacaccaaagcagaatctccagcagagaaagtgccagaggagagtgtcctgcctctggttcagaaaagcacactggctgactactcagcccagaaggatcttgaacctgagtcagacagatctgctcagcccctccctctaaaaattgaggaattagcactggccaaaggaatcactgaagaatgtctgaaacagccatctttggaacagaaggaaggcagaagagcttctcatacccttctcccaagccacagattgaaacagtcagctgattcatcctctagccggtcctcctcatcttcctcctccagttctagatcaagatctcgctctcctgacagttcaggttctcggtctcattcaccgctcagatccaagcagagagatgtagcccaggcacgtactcatgccaaccctcgtggtagacccaagatgggctccagatcaacatcagagtccagatcaaggtccgttcacgttcacgttctcgttcagcatcaagcaacagcagaaaatctctgagccctggagtctccagggacagcagcaccagctatactgaaaccaaagatccctcttctggtcaggaggttgcaactccaccagtgccacaactgcaggtctgtgagccaaaggagaggacttccacctcctcatcctctgtccaagcaaggcgtctgagtcagcctgaatcagctgaaaagcatgtgacccagaggttacagcctgagcgggggagcccaaagaagtgtgaagctgaagaggcagagccaccagctgccacacagccccaaacctcagagactcagacctctcatctgccagaatcagaaagaattcatcacactgttgaggagaaggaggaagtgaccatggacacaagtgaaaacagacctgaaaatgatgttccagaacctcccatgcctattgcagaccaagtcagcaatgatgaccgcccggagggcagtgttgaagatgaggagaagaaagaggtaaacatccaagccacctattggggcgggtgggcaggaatggacctaggggaaagagtagagcactctagtgatccctcttacacggtgggttaacttaaaggagggatgaggcagggacttggatcagaatagggccaagggagaattcgctggtttagcaagggagaccccttgtgacggggacagggctcattcattttcctttccttgttggggaagtagtgcccagactctagacgtttgtaactaacgggaaagtctgataatggccctttatctaagatttatgttcagcttttcctgctgtcttcccaagcttctcctggtggtaactcctttagctttccctcctttttaaaagcctgatggagcccaacgccatctagtggacattggtggttctcaccagaccagccatgctgagaaatttttgttcctcctctgccctccagtggtctgactgcagagatgtagctacttagaagccagcacttgtgatccggaaggcccattctcagttacctgtgacccctctacctccttttttggcatatgttatcttgtgtcctgcacccacttcagggggcttcccccatcagagccagcgaagtcttcttggctcttaaagtaattgagaaagaatgagctgggtttaggagaggggtaacaaggtgggagggactgttgtgtgtgtagcctttttctggtgtgtgttgcgggggtgggggccggtgaaagtgatttgatgtgcagaatattatttattacaaggtccttcttccccgtaaaactttgtccaagtacctcatgtacggtaatccgcccgtaaaatataaccctgcccaactggccaatcgctgatgccgcctcttcctctggacccacccgctgctactgagctgcccaatcagagccaagtctgctatccaggtgtcttggccagaggggggcatgtatatgggctcctgtgatgggcccccttttgcctccctgtcttgcttacatcagggggccaagaagaacactgttctggagagacttgtattgagcaagcaaaaaacatttggaaaggggtggacttgcatcatctccctacttgggacaccccaagaagagcttgtgccagtgctggggcgcctgcccacatgcccttgcccttttgaggactgtgggttgccttgtttgctacagactgttgggatccccatctagggcaccaagacctcctaaagtttgtgatcgcagtgccatgctgtaaaacactgagtgggaccctctacttaagctgtgacgactaggaaccgtgcagaggagtctagggtctgagcccctggggatttaatgctgatgacagcccagcccatgtgtcaccacttgctcatcagatggactttcctttggtccctgttgtccatggtgaagggcagcatgttggttgctccaacttctcctccatccctggaggcagggactcatttcatccacctgactggaaccactgtctcagctggagtccctgaggagatgccagccacaactctccgaagagaagtattctgaccttgctgctgaatgtctgccaggtcctggggtattcacctacccccaggctaccttcatcagaggctccatgatcccactcggtgagaggaccccctccccagttacaggcagaggagaaagggactctggagtcatcacctggattccaagtattgggtggtgttattgctgcagcttgccactggtggacatagggtcctgcctgcctctcacgataaaaggcaaggatcattcctgctactcacaggccatctcatcagggactgcaagatgatgtcccttcagggccaggactgatgtctctgcccctttcccccctctatccctcgctgagcctggccaccgccagtgaactgtcttgacatcatggaaactgggcagcgtccccccacacgtttccctcccgccccccctgcgcccctgggaggactctggcagtgccgtgctgactaccacgccgtgcgcccaccttttttgccaacccaaccccccaccaattgcacagcgcctagcagggagggctcattctgattggaccggcggttgactagatacagtccccacagtgaggtgcgattggctgaactgaagatcccaggtgtgagatggtacctggaacatttgtcatattcctagtttattttcttctttattttcttcttctttttttaatattttattttattttttttctatatctttattttttctgatttcttttatttatttatttggttcatgtttttcctgttttaattaagacctttttttttgttttgtttttctcactaacttacccatcgagagcggcccagctaggggtcaggctggcccttaacagagaccaaggagacttggttagacgacacaaacggggctgcgggtgggggtggatgggaaagggatttcatcacgaggtttctgccctaccctttagaagagtggtagagtggtcttagtttttccagaaataagcacctacacttgaaaatactctattccctttttctctctcacttttctcccccgccccccatagtctttcgtcattcacccactgagtgtttggggtagagacttgtcccaaagatgtcttctggtctttggcagagcccctaaggcttgagccctggttggagaggaaacagtaagactctgctggagctccctgcggtggctggaaagtctaaggatctccttggggacaatctgcccttcataaaaaccttcctttatcaaagacacctttgagttctttttgctagcacttggctcaagagcctcatctccagtgggtctggtgctgcccttttccacagtgtggtgggggtctgggcagtcttgacatgacagtctgctgtccaagcatctcaaagccattgtcagtgggcatcagtctggccattgaagaaaggagggttaccttgttgaagttgccatccaaagttggttttccttgtttcctcgagttagcaaggaaggacctgggaggactagatgacccagtttggggcacagtttgtttggcttggtgtcctctcgactcagacggtgaaagagggggtatgaccaacatctttagggggctgagaggctactgaactcctcttccagcttatttctggttaagctaatacacaggtgtgatacggagtagatgacttttccctgctctgatgtttagttttatttttttctctaacttgcattgattctgcttcgtttttgccgtttgccgcttctgttttggtctctgtctgtctctgtgtctctctctgtctctctctctcactctatctgtgtctttggaggctaagctaagactgccccatctaacctccttcccccctctctgtggggtgtctctctttctcttttttttcccctttttcttcttcatacagagctcgctgcccaaatcattcaagaggaagatctccgttgtctcagctaccaagggggtgccagctggaaacagtgacacagaggggggccagcctggtcggaaacgacgctggggagccagcacagccaccacacagaagaaaccttccatcagtatcaccactgaatcactaaagagcctcatccccgacatcaaacccctggcggggcaggaggctgttgtggatcttcatgctgatgactctcgcatctctgaggatgagacagagcgtaatggcgatgatgggacccatgacaaggggctgaaaatatgccggacagtcactcaggtagtacctgcagagggccaggagaatgggcagagggaagaagaggaagaagagaaggaacctgaagcagaacctcctgtacctccccaggtgtcagtagaggtggccttgcccccacctgcagagcatgaagtaaagaaagtgactttaggagataccttaactcgacgttccattagccagcagaagtccggagtttccattaccattgatgacccagtccgaactgcccaggtgccctccccaccccggggcaagattagcaacattgtccatatctccaatttggtccgtcctttcactttaggccagctaaaggagttgttggggcgcacaggaaccttggtggaagaggccttctggattgacaagatcaaatctcattgctttgtaacgtactcaacagtagaggaagctgttgccacccgcacagctctgcacggggtcaaatggccccagtccaatcccaaattcctttgtgctgactatgccgagcaagatgagctggattatcaccgaggcctcttggtggaccgtccctctgaaactaagacagaggagcagggaataccacggcccctgcaccccccacccccacccccggtccagccaccacagcacccccgggcagagcagcgggagcaggaacgggcagtgcgggaacagtgggcagaacgggaacgggaaatggagcggcgggagcggactcgatcagagcgtgaatgggatcgggacaaagttcgagaagggccccgttcccgatcaaggtcccgtgaccgccgccgcaaggaacgtgcgaagtctaaagaaaagaagagtgagaagaaagagaaagcccaggaggaaccacctgccaagctgctggatgaccttttccgaaagaccaaggcagctccctgcatctattggctcccactgactgacagccagatcgttcagaaagaggcagagcgggccgaacgggccaaggagcgggagaagcggcgaaaggagcaagaagaagaagagcaaaaggagcgggagaaggaagccgagcgggaacggaaccgacagctggagcgagagaaacgtcgggagcacagtcgggagagggacagggagagagagagagaaagggagcgggacaggggggaccgagatcgggatagggaaagggaccgagaacgaggcagggaaagggatcgcagggacaccaagcgccacagcagaagccggagtcggagcacacctgtgcgggaccggggtgggcgccgctagctgggaaaacactagagctgcaggtaccagccactcggccccagggggttatggccacagagggataggcacagtctccaccaccctggagccaagggtctttcacatcacctatccctacatacataccaaatggattagcccgaccctccctctcatttcccattaagtctgagaggcaagagctaggttaggcaaggaggtggttggccagagatggggaacagccaggtgccccagtcctctgatttttcctccatcctgcttaccacctccctgggtacttacagccttctcttgggaacagccggggccaggactgggtcacctatgagctgaatcagcatctcctcctgagtcccagggcccctgcagttcccagtctcttctgtcctgcagcccttgcctctttcccacaggttccactttatatccaccttttccttttgttcaatttttatttttattttttttattattaaatgatgtggtctatggaaaaaaaaataaaaatctgacttagttttaaa

SEQ ID NO: 356092 - DNA, 1991 bp, Homo sapiens
tgtctcagtttcgggacgcatatctccaatttggtaagtcattgtttctcaccatcccagcttgcttagtggttaagtttgagctttaggcttatgcctcctaggttccactcatagttgaactggtctaccaatagattaagttactcactgatcttgagtgagttacttaacatatttacccatctaaaaatgagggggaaaagctgttgccctgcagggttgttttgaggacttgcagaaggcctcacatacaacgtctcaattagtgctgggaagcaccaccactcttctcacattcttactgcaaggttcctaaactctctgccctcccccaaaccttgaaactatactcctgtgacagcagctcgggaaatctaaagattgggtggtggtcttgccttctgctagaccctgaaagtctattttcattggcaggtccgtcctttcactttaggccagctaaaggagttgttggggcgcacaggaaccttggtggaagaggccttctggattgacaagatcaaatctcattgctttgtaacgtactcaacagtagaggaagctgttgccacccgcacagctctgcacggggtcaaatggccccagtccaatcccaaattcctttgtgctgactatgccgagcaagatgagctggattatcaccgaggcctcttggtggaccgtccctctgaaactaagacagaggagcagggaataccacggcccctgcaccccccacccccacccccggtccagccaccacagcacccccgggcagagcagcgggagcaggaacgggcagtgcgggaacagtgggcagaacgggaacgggaaatggagcggcgggagcggactcgatcagagcgtgaatgggatcgggacaaagttcgagaagggccccgttcccgatcaaggtcccgtgaccgccgccgcaaggaacgtgcgaagtctaaagaaaagaagagtgagaagaaagagaaagcccaggaggaaccacctgccaagctgctggatgaccttttccgaaagaccaaggcagctccctgcatctattggctcccactgactgacagccagatcgttcagaaagaggcagagcgggccgaacgggccaaggagcgggagaagcggcgaaaggagcaagaagaagaagagcaaaaggagcgggagaaggaagccgagcgggaacggaaccgacagctggagcgagagaaacgtcgggagcacagtcgggagagggacagggagagagagagagaaagggagcgggacaggggggaccgagatcgggatagggaaagggaccgagaacgaggcagggaaagggatcgcagggacaccaagcgccacagcagaagccggagtcggagcacacctgtgcgggaccggggtgggcgccgctagctgggaaaacactagagctgcaggtaccagccactcggccccagggggttatggccacagagggataggcacagtctccaccaccctggagccaagggtctttcacatcacctatccctacatacataccaaatggaaaagtggccatccttttccccccaaacacacccccttaacctatctcttgggacttagcccgaccctccctctcatttcccattaagtctgagaggcaagagctaggttaggcaaggaggtggttggccagagatggggaacagccaggtgccccagtcctctgatttttcctccatcctgcttaccacctccctgggtacttacagccttctcttgggaacagccggggccaggactgggtcacctatgagctgaatcagcatctcctcctgagtcccagggcccctgcagttcccagtctcttctgtcctgcagcccttgcctctttcccacaggttccactttatatccaccttttccttttgttcaatttttatttttattttttttattattaaatgatgtggtctatggaaaaaaaaataaaaatctgacttagttttaaa

SEQ ID NO: 356093 - DNA, 1392 bp, Homo sapiens
  misc_feature (101)..(101): n is a, c, g, or t
  misc_feature (124)..(125): n is a, c, g, or t
  misc_feature (128)..(128): n is a, c, g, or t
  misc_feature (130)..(130): n is a, c, g, or t
tccattaaccccaacccatttattaatttaactccctcattatccccccaactttacattttaaactcccattcctaccttactcaaaatttaacaaatancaatttccacaatattcacttanncantnacgcaccccccacccccacccccggtccagccaccacagcacccccgggcagagcagcgggagcaggaacgggcagtgcgggaacagtgggcagaacgggaacgggaaatggagcggcgggagcggactcgatcagagcgtgaatgggatcgggacaaagttcgagaagggccccgttcccgatcaaggtcccgtgaccgccgccgcaaggaacgtgcgaagtctaaagaaaagaagagtgagaagaaagagaaagcccaggaggaaccacctgccaagctgctggatgaccttttccgaaagaccaaggcagctccctgcatctattggctcccactgactgacagccagatcgttcagaaagaggcagagcgggccgaacgggccaaggagcgggagaagcggcgaaaggagcaagaagaagaagagcaaaaggagcgggagaaggaagccgagcgggaacggaaccgacagctggagcgagagaaacgtcgggagcacagtcgggagagggacagggagagagagagagaaagggagcgggacaggggggaccgagatcgggatagggaaagggaccgagaacgaggcagggaaagggatcgcagggacaccaagcgccacagcagaagccggagtcggagcacacctgtgcgggaccggggtgggcgccgctagctgggaaaacactagagctgcaggtaccagccactcggccccagggggttatggccacagagggataggcacagtctccaccaccctggagccaagggtctttcacatcacctatccctacatacataccaaatggaaaagtggccatccttttccccccaaacacacccccttaacctatctcttgggacttagcccgaccctccctctcatttcccattaagtctgagaggcaagagctaggttaggcaaggaggtggttggccagagatggggaacagccaggtgccccagtcctctgatttttcctccatcctgcttaccacctccctgggtacttacagccttctcttgggaacagccggggccaggactgggtcacctatgagctgaatcagcatctcctcctgagtcccagggcccctgcagttcccagtctcttctgtcctgcagcccttgcctctttcccacaggttccactttatatccaccttttccttttgttcaatttttatttttattttttttattattaaatgatgtggtctatggaaaaaaaaataaaaatctgacttagttttaaa

SEQ ID NO: 356094 - DNA, 1334 bp, Homo sapiens
gagtgcagtcagtggcaccatcttggctcactgcagcctccgcctcccgggttcaagcaattctgcttcagcaccctgagtagctgggattacaggcatgcaccacaacgcctggctaatttttgtatttttagtagagatggggtttcaccatgttggtcaggctagtctcaaactcctgacctcgtgatccacccgccttggcctcccaaagtgctgggattacaggtgtgagccaccacactcagcctccaaatatgatttctttaagttaaccttttaccaaaactccagccagaggtaacctgtaggtattacggtttgaactagcagaggtcctgagaccatctaatgctggatgaccttttccgaaagaccaaggcagctccctgcatctattggctcccactgactgacagccagatcgttcagaaagaggcagagcgggccgaacgggccaaggagcgggagaagcggcgaaaggagcaagaagaagaagagcaaaaggagcgggagaaggaagccgagcgggaacggaaccgacagctggagcgagagaaacgtcgggagcacagtcgggagagggacagggagagagagagagaaagggagcgggacaggggggaccgagatcgggatagggaaagggaccgagaacgaggcagggaaagggatcgcagggacaccaagcgccacagcagaagccggagtcggagcacacctgtgcgggaccggggtgggcgccgctagctgggaaaacactagagctgcaggtaccagccactcggccccagggggttatggccacagagggataggcacagtctccaccaccctggagccaagggtctttcacatcacctatccctacatacataccaaatggaaaagtggccatccttttccccccaaacacacccccttaacctatctcttgggacttagcccgaccctccctctcatttcccattaagtctgagaggcaagagctaggttaggcaaggaggtggttggccagagatggggaacagccaggtgccccagtcctctgatttttcctccatcctgcttaccacctccctgggtacttacagccttctcttgggaacagccggggccaggactgggtcacctatgagctgaatcagcatctcctcctgagtcccagggcccctgcagttcccagtctcttctgtcctgcagcccttgcctctttcccacaggttccactttatatccaccttttccttttgttcaatttttatttttattttttttattattaaatgatgtggtctatggaaaaaaaaataaaaatctgacttagttttaaa

SEQ ID NO: 356095 - DNA, 7575 bp, Homo sapiens
  misc_feature (633)..(633): n is a, c, g, or t
  misc_feature (670)..(670): n is a, c, g, or t
  misc_feature (706)..(706): n is a, c, g, or t
  misc_feature (840)..(840): n is a, c, g, or t
  misc_feature (7543)..(7544): n is a, c, g, or t
  misc_feature (7562)..(7562): n is a, c, g, or t
gagacggagtcttgctctgtcacccaggctgtagtgcaatggcgtgatctcaaccactgcttcctgggttcaagcgattctcctgcctcagcctcccgagtagctgggactataggcgtacgccaccacgcccggctaatttgtttgtatttttagtagagacggggtttcaccatattggccagactggtctccaactcctgacctcaagtgatccgcccgcctcggcctcccaaagtgctgggattataggcgtaagccaccgcgcccggcaccttgccactgattttgcatcatgaatgcaacggaaagatcagccaatttgactttaatagttttcagtctcttaaatctctaacgtatctcttaaatctctaaactatttgtctgtgacctattttactgtttgtgtttcttctgcatcaagttggaggattggtagtgacaaagaaagaagcccctaaacaattaatattagttcaagtaccaaaaaagttcagggcgcttgcattttccagttcttgccctacaggaagcagttcctccaagggaacttactctcttctgcggagcaaggaagaactttcccagaatcttgccacatggcttccaaggcaaactcaaactcaagtncagcgtcatagatcagttcatagtctgggtccgaagncacggcgatgcttcttgcgcacccccacggagcttnttattccgattccgccagccccccgcccctccccaaaaaaagcctaagatgggagtggctatgattcagaggacagagggcagaagctgtttgcgttaaggagtggggggcttgccctattaaggtaatccgcnaacaccgagtctgacccggcccatagaggtacttctaccccgcttacctccccttttctctcgaagggcacccgaagattgtcacgagtccttagactccaactactgcggcagcttccaaatttcctgaaaaccctaagctgggccagcccggcagcccacgcacttccggcctcggacccgccccaaacacccaagcgccccagcgcctcatctctaggtccggaaataaacgaacatctccgattatggttataccagggtcgagggtttccgaatatattcgattcaaagcttcggcaagacgaagaaaaccgagcctgaaagcagggcgagaaaaggggcgctgcagggcggatggaaagaattgattggtaacgatgtggagacggaaacatccgaggacatccggaggaacccggggagttctgagtggtaatcgaggggtagagtatggcagtgggcggggtcatctcggtacgttcgaagggcgttggcggaaattaccgaagatgcccgaagccgtcgggacggacccgagtacctcacgcaagatggcggagctggaggaggtgactctggacgggaagcctcttcaggcgctgcgggtgaccgacctgaaggccgcactggagcagcgaggcctagccaagagcgggcagaagagtgccctggtcaagcggctcaaaggggctctaatgctagaaaatttacagaaacactcaacaccccatgctgcattccagccaaattcccagattggtgaggaaatgagccagaacagtttcataaaacagtatctggaaaagcagcaggagctacttaggcagcgtctggaacgtgaagctcgagaagctgcagaacttgaagaagcttcagctgagtcggaggacgagatgatccatcctgagggagtggcttccctgctgcctcctgactttcagagcagcctggagagaccagagctggagctcagcagacattcgcccagaaaaagctcctcaatttctgaagagaaaggtgactctgatgatgagaaaccaaggaaaggagaaagacgatcatctagggtcagacaggcaagagcagctaaactgtctgagggcagccaacctgctgaggaggaagaggatcaagaaacaccttccagaaacctaagggtcagagcagatcgaaatttgaaaacagaggaggaagaagaggaggaggaggaggaggaagaagatgatgaagaagaggaaggtgatgatgagggacaaaaatctagggaggcaccaatcctgaaagagtttaaggaagaaggggaagagatacctagagtaaaaccagaggagatgatggatgagagacccaaaacaagatcccaggaacaggaggtgttagagagaggagggagatttacaagatcccaggaagaggctagaaaaagtcatctggccagacagcagcaggagaaggaaatgaaaacaacatctccccttgaggaggaagaaagagaaataaaatcttcacaaggcttaaaggaaaaatcgaagtctccttcccctcctcgactgactgaagatcgaaagaaggcctcacttgtagcgctgccagagcaaactgccagcgaggaggagactcctccacctttactaacaaaggaagcatcttctccaccacctcatccacagctccatagcgaagaagaaatagagcccatggaaggcccagccccccctgtcctcattcagttatctcctcctaatacagatgctgacaccagggagctattagtatctcagcatactgtccagttggtaggaggcctgtctcctttgtcaagtccttcagacaccaaagcagaatctccagcagagaaagtgccagaggagagtgtcctgcctctggttcagaaaagcacactggctgactactcagcccagaaggatcttgaacctgagtcagacagatctgctcagcccctccctctaaaaattgaggaattagcactggccaaaggaatcactgaagaatgtctgaaacagccatctttggaacagaaggaaggcagaagagcttctcatacccttctcccaagccacagattgaaacagtcagctgattcatcctctagccggtcctcctcatcttcctcctccagttctagatcaagatctcgctctcctgacagttcaggttctcggtctcattcaccgctcagatccaagcagagagatgtagcccaggcacgtactcatgccaaccctcgtggtagacccaagatgggctccagatcaacatcagagtccagatcaaggtccgttcacgttcacgttctcgttcagcatcaagcaacagcagaaaatctctgagccctggagtctccagggacagcagcaccagctatactgaaaccaaagatccctcttctggtcaggaggttgcaactccaccagtgccacaactgcaggtctgtgagccaaaggagaggacttccacctcctcatcctctgtccaagcaaggcgtctgagtcagcctgaatcagctgaaaagcatgtgacccagaggttacagcctgagcgggggagcccaaagaagtgtgaagctgaagaggcagagccaccagctgccacacagccccaaacctcagagactcagacctctcatctgccagaatcagaaagaattcatcacactgttgaggagaaggaggaagtgaccatggacacaagtgaaaacagacctgaaaatgatgttccagaacctcccatgcctattgcagaccaagtcagcaatgatgaccgcccggagggcagtgttgaagatgaggagaagaaagaggtaaacatccaagccacctattggggcgggtgggcaggaatggacctaggggaaagagtagagcactctagtgatccctcttacacggtgggttaacttaaaggagggatgaggcagggacttggatcagaatagggccaagggagaattcgctggtttagcaagggagaccccttgtgacggggacagggctcattcattttcctttccttgttggggaagtagtgcccagactctagacgtttgtaactaacgggaaagtctgataatggccctttatctaagatttatgttcagcttttcctgctgtcttcccaagcttctcctggtggtaactcctttagctttccctcctttttaaaagcctgatggagcccaacgccatctagtggacattggtggttctcaccagaccagccatgctgagaaatttttgttcctcctctgccctccagtggtctgactgcagagatgtagctacttagaagccagcacttgtgatccggaaggcccattctcagttacctgtgacccctctacctccttttttggcatatgttatcttgtgtcctgcacccacttcagggggcttcccccatcagagccagcgaagtcttcttggctcttaaagtaattgagaaagaatgagctgggtttaggagaggggtaacaaggtgggagggactgttgtgtgtgtagcctttttctggtgtgtgttgcgggggtgggggccggtgaaagtgatttgatgtgcagaatattatttattacaaggtccttcttccccgtaaaactttgtccaagtacctcatgtacggtaatccgcccgtaaaatataaccctgcccaactggccaatcgctgatgccgcctcttcctctggacccacccgctgctactgagctgcccaatcagagccaagtctgctatccaggtgtcttggccagaggggggcatgtatatgggctcctgtgatgggcccccttttgcctccctgtcttgcttacatcagggggccaagaagaacactgttctggagagacttgtattgagcaagcaaaaaacatttggaaaggggtggacttgcatcatctccctacttgggacaccccaagaagagcttgtgccagtgctggggcgcctgcccacatgcccttgcccttttgaggactgtgggttgccttgtttgctacagactgttgggatccccatctagggcaccaagacctcctaaagtttgtgatcgcagtgccatgctgtaaaacactgagtgggaccctctacttaagctgtgacgactaggaaccgtgcagaggagtctagggtctgagcccctggggatttaatgctgatgacagcccagcccatgtgtcaccacttgctcatcagatggactttcctttggtccctgttgtccatggtgaagggcagcatgttggttgctccaacttctcctccatccctggaggcagggactcatttcatccacctgactggaaccactgtctcagctggagtccctgaggagatgccagccacaactctccgaagagaagtattctgaccttgctgctgaatgtctgccaggtcctggggtattcacctacccccaggctaccttcatcagaggctccatgatcccactcggtgagaggaccccctccccagttacaggcagaggagaaagggactctggagtcatcacctggattccaagtattgggtggtgttattgctgcagcttgccactggtggacatagggtcctgcctgcctctcacgataaaaggcaaggatcattcctgctactcacaggccatctcatcagggactgcaagatgatgtcccttcagggccaggactgatgtctctgcccctttcccccctctatccctcgctgagcctggccaccgccagtgaactgtcttgacatcatggaaactgggcagcgtccccccacacgtttccctcccgccccccctgcgcccctgggaggactctggcagtgccgtgctgactaccacgccgtgcgcccaccttttttgccaacccaaccccccaccaattgcacagcgcctagcagggagggctcattctgattggaccggcggttgactagatacagtccccacagtgaggtgcgattggctgaactgaagatcccaggtgtgagatggtacctggaacatttgtcatattcctagtttattttcttctttattttcttcttctttttttaatattttattttattttttttctatatctttattttttctgatttcttttatttatttatttggttcatgtttttcctgttttaattaagacctttttttttgttttgtttttctcactaacttacccatcgagagcggcccagctaggggtcaggctggcccttaacagagaccaaggagacttggttagacgacacaaacggggctgcgggtgggggtggatgggaaagggatttcatcacgaggtttctgccctaccctttagaagagtggtagagtggtcttagtttttccagaaataagcacctacacttgaaaatactctattccctttttctctctcacttttctcccccgccccccatagtctttcgtcattcacccactgagtgtttggggtagagacttgtcccaaagatgtcttctggtctttggcagagcccctaaggcttgagccctggttggagaggaaacagtaagactctgctggagctccctgcggtggctggaaagtctaaggatctccttggggacaatctgcccttcataaaaaccttcctttatcaaagacacctttgagttctttttgctagcacttggctcaagagcctcatctccagtgggtctggtgctgcccttttccacagtgtggtgggggtctgggcagtcttgacatgacagtctgctgtccaagcatctcaaagccattgtcagtgggcatcagtctggccattgaagaaaggagggttaccttgttgaagttgccatccaaagttggttttccttgtttcctcgagttagcaaggaaggacctgggaggactagatgacccagtttggggcacagtttgtttggcttggtgtcctctcgactcagacggtgaaagagggggtatgaccaacatctttagggggctgagaggctactgaactcctcttccagcttatttctggttaagctaatacacaggtgtgatacggagtagatgacttttccctgctctgatgtttagttttatttttttctctaacttgcattgattctgcttcgtttttgccgtttgccgcttctgttttggtctctgtctgtctctgtgtctctctctgtctctctctctcactctatctgtgtctttggaggctaagctaagactgccccatctaacctccttcccccctctctgtggggtgtctctctttctcttttttttcccctttttcttcttcatacagagctcgctgcccaaatcattcaagaggaagatctccgttgtctcagctaccaagggggtgccagctggaaacagtgacacagaggggggccagcctggtcggaaacgacgctggggagccagcacagccaccacacagaagaaaccttccatcagtatcaccactgaatcactaaagagcctcatccccgacatcaaacccctggcggggcaggaggctgttgtggatcttcatgctgatgactctcgcatctctgaggatgagacagagcgtaatggcgatgatgggacccatgacaaggggctgaaaatatgccggacagtcactcaggtagtacctgcagagggccaggagaatgggcagagggaagaagaggaagaagagaaggaaggaaggagggaaggcccgnnaaggaggggaggaagganggaaggaaggagg

SEQ ID NO: 356096 - DNA, 4364 bp, Homo sapiens
  misc_feature (633)..(633): n is a, c, g, or t
  misc_feature (670)..(670): n is a, c, g, or t
  misc_feature (706)..(706): n is a, c, g, or t
  misc_feature (840)..(840): n is a, c, g, or t
gagacggagtcttgctctgtcacccaggctgtagtgcaatggcgtgatctcaaccactgcttcctgggttcaagcgattctcctgcctcagcctcccgagtagctgggactataggcgtacgccaccacgcccggctaatttgtttgtatttttagtagagacggggtttcaccatattggccagactggtctccaactcctgacctcaagtgatccgcccgcctcggcctcccaaagtgctgggattataggcgtaagccaccgcgcccggcaccttgccactgattttgcatcatgaatgcaacggaaagatcagccaatttgactttaatagttttcagtctcttaaatctctaacgtatctcttaaatctctaaactatttgtctgtgacctattttactgtttgtgtttcttctgcatcaagttggaggattggtagtgacaaagaaagaagcccctaaacaattaatattagttcaagtaccaaaaaagttcagggcgcttgcattttccagttcttgccctacaggaagcagttcctccaagggaacttactctcttctgcggagcaaggaagaactttcccagaatcttgccacatggcttccaaggcaaactcaaactcaagtncagcgtcatagatcagttcatagtctgggtccgaagncacggcgatgcttcttgcgcacccccacggagcttnttattccgattccgccagccccccgcccctccccaaaaaaagcctaagatgggagtggctatgattcagaggacagagggcagaagctgtttgcgttaaggagtggggggcttgccctattaaggtaatccgcnaacaccgagtctgacccggcccatagaggtacttctaccccgcttacctccccttttctctcgaagggcacccgaagattgtcacgagtccttagactccaactactgcggcagcttccaaatttcctgaaaaccctaagctgggccagcccggcagcccacgcacttccggcctcggacccgccccaaacacccaagcgccccagcgcctcatctctaggtccggaaataaacgaacatctccgattatggttataccagggtcgagggtttccgaatatattcgattcaaagcttcggcaagacgaagaaaaccgagcctgaaagcagggcgagaaaaggggcgctgcagggcggatggaaagaattgattggtaacgatgtggagacggaaacatccgaggacatccggaggaacccggggagttctgagtggtaatcgaggggtagagtatggcagtgggcggggtcatctcggtacgttcgaagggcgttggcggaaattaccgaagatgcccgaagccgtcgggacggacccgagtacctcacgcaagatggcggagctggaggaggtgactctggacgggaagcctcttcaggcgctgcgggtgaccgacctgaaggccgcactggagcagcgaggcctagccaagagcgggcagaagagtgccctggtcaagcggctcaaaggggctctaatgctagaaaatttacagaaacactcaacaccccatgctgcattccagccaaattcccagattggtgaggaaatgagccagaacagtttcataaaacagtatctggaaaagcagcaggagctacttaggcagcgtctggaacgtgaagctcgagaagctgcagaacttgaagaagcttcagctgagtcggaggacgagatgatccatcctgagggagtggcttccctgctgcctcctgactttcagagcagcctggagagaccagagctggagctcagcagacattcgcccagaaaaagctcctcaatttctgaagagaaaggtgactctgatgatgagaaaccaaggaaaggagaaagacgatcatctagggtcagacaggcaagagcagctaaactgtctgagggcagccaacctgctgaggaggaagaggatcaagaaacaccttccagaaacctaagggtcagagcagatcgaaatttgaaaacagaggaggaagaagaggaggaggaggaggaggaagaagatgatgaagaagaggaaggtgatgatgagggacaaaaatctagggaggcaccaatcctgaaagagtttaaggaagaaggggaagagatacctagagtaaaaccagaggagatgatggatgagagacccaaaacaagatcccaggaacaggaggtgttagagagaggagggagatttacaagatcccaggaagaggctagaaaaagtcatctggccagacagcagcaggagaaggaaatgaaaacaacatctccccttgaggaggaagaaagagaaataaaatcttcacaaggcttaaaggaaaaatcgaagtctccttcccctcctcgactgactgaagatcgaaagaaggcctcacttgtagcgctgccagagcaaactgccagcgaggaggagactcctccacctttactaacaaaggaagcatcttctccaccacctcatccacagctccatagcgaagaagaaatagagcccatggaaggcccagccccccctgtcctcattcagttatctcctcctaatacagatgctgacaccagggagctattagtatctcagcatactgtccagttggtaggaggcctgtctcctttgtcaagtccttcagacaccaaagcagaatctccagcagagaaagtgccagaggagagtgtcctgcctctggttcagaaaagcacactggctgactactcagcccagaaggatcttgaacctgagtcagacagatctgctcagcccctccctctaaaaattgaggaattagcactggccaaaggaatcactgaagaatgtctgaaacagccatctttggaacagaaggaaggcagaagagcttctcatacccttctcccaagccacagattgaaacagtcagctgattcatcctctagccggtcctcctcatcttcctcctccagttctagatcaagatctcgctctcctgacagttcaggttctcggtctcattcaccgctcagatccaagcagagagatgtagcccaggcacgtactcatgccaaccctcgtggtagacccaagatgggctccagatcaacatcagagtccagatcaaggtccgttcacgttcacgttctcgttcagcatcaagcaacagcagaaaatctctgagccctggagtctccagggacagcagcaccagctatactgaaaccaaagatccctcttctggtcaggaggttgcaactccaccagtgccacaactgcaggtctgtgagccaaaggagaggacttccacctcctcatcctctgtccaagcaaggcgtctgagtcagcctgaatcagctgaaaagcatgtgacccagaggttacagcctgagcgggggagcccaaagaagtgtgaagctgaagaggcagagccaccagctgccacacagccccaaacctcagagactcagacctctcatctgccagaatcagaaagaattcatcacactgtgtaagtgatatatctcgaccggggtataacagggaactatgagtgtgcgatagttcttcgctccctagggttctttgactaagcagtcctagtttccttttaaaacataaaggcagagctttatctggacaaaggctagacttcagttactatgttgggagctgccacctttaaggtaacctgaaaagtggtcgtcagggcacaaggaaaactcacctgggatcatccagccaaaatagtcaactcctttaagatttaggcaatagaagcttctgcttccacactcaaaaccatgtaagggaattgactccgggcatcttaatctttaactcatgtttacctaggaacccagtttaataaaggatattgagggtcttaataaaggcacagctgggtgctattttttagtttgtgcattttccctagttccctagttactacctgtcattaagctatcctagttctgctaggatatcctagttcttacagcatacagtacagcaaattatgaagttcctttcaagtcagaagtttgttcctgggcccttaagaccatttgattgaacttaaaatttatacaattaatgtgagtttttaaaatctttatattaagtcctagagaaatactcatatcaggttaaattagaattaaataggtatgtcattcattcttctgagataggtattataaattaagaagccaatgagccagaattcctggcttcaaagtctcctgggaaatgaaaaaatgaagccttatgggaataagattgcgtagcttttagacatcaggaaccctgaactgctttgtagaatgtcctgtgtagactgttagcctaaag

SEQ ID NO: 356097 - DNA, 3420 bp, Homo sapiens
  misc_feature (633)..(633): n is a, c, g, or t
  misc_feature (670)..(670): n is a, c, g, or t
  misc_feature (706)..(706): n is a, c, g, or t
  misc_feature (840)..(840): n is a, c, g, or t
gagacggagtcttgctctgtcacccaggctgtagtgcaatggcgtgatctcaaccactgcttcctgggttcaagcgattctcctgcctcagcctcccgagtagctgggactataggcgtacgccaccacgcccggctaatttgtttgtatttttagtagagacggggtttcaccatattggccagactggtctccaactcctgacctcaagtgatccgcccgcctcggcctcccaaagtgctgggattataggcgtaagccaccgcgcccggcaccttgccactgattttgcatcatgaatgcaacggaaagatcagccaatttgactttaatagttttcagtctcttaaatctctaacgtatctcttaaatctctaaactatttgtctgtgacctattttactgtttgtgtttcttctgcatcaagttggaggattggtagtgacaaagaaagaagcccctaaacaattaatattagttcaagtaccaaaaaagttcagggcgcttgcattttccagttcttgccctacaggaagcagttcctccaagggaacttactctcttctgcggagcaaggaagaactttcccagaatcttgccacatggcttccaaggcaaactcaaactcaagtncagcgtcatagatcagttcatagtctgggtccgaagncacggcgatgcttcttgcgcacccccacggagcttnttattccgattccgccagccccccgcccctccccaaaaaaagcctaagatgggagtggctatgattcagaggacagagggcagaagctgtttgcgttaaggagtggggggcttgccctattaaggtaatccgcnaacaccgagtctgacccggcccatagaggtacttctaccccgcttacctccccttttctctcgaagggcacccgaagattgtcacgagtccttagactccaactactgcggcagcttccaaatttcctgaaaaccctaagctgggccagcccggcagcccacgcacttccggcctcggacccgccccaaacacccaagcgccccagcgcctcatctctaggtccggaaataaacgaacatctccgattatggttataccagggtcgagggtttccgaatatattcgattcaaagcttcggcaagacgaagaaaaccgagcctgaaagcagggcgagaaaaggggcgctgcagggcggatggaaagaattgattggtaacgatgtggagacggaaacatccgaggacatccggaggaacccggggagttctgagtggtaatcgaggggtagagtatggcagtgggcggggtcatctcggtacgttcgaagggcgttggcggaaattaccgaagatgcccgaagccgtcgggacggacccgagtacctcacgcaagatggcggagctggaggaggtgactctggacgggaagcctcttcaggcgctgcgggtgaccgacctgaaggccgcactggagcagcgaggcctagccaagagcgggcagaagagtgccctggtcaagcggctcaaaggggctctaatgctagaaaatttacagaaacactcaacaccccatgctgcattccagccaaattcccagattggtgaggaaatgagccagaacagtttcataaaacagtatctggaaaagcagcaggagctacttaggcagcgtctggaacgtgaagctcgagaagctgcagaacttgaagaagcttcagctgagtcggaggacgagatgatccatcctgagggagtggcttccctgctgcctcctgactttcagagcagcctggagagaccagagctggagctcagcagacattcgcccagaaaaagctcctcaatttctgaagagaaaggtgactctgatgatgagaaaccaaggaaaggagaaagacgatcatctagggtcagacaggcaagagcagctaaactgtctgagggcagccaacctgctgaggaggaagaggatcaagaaacaccttccagaaacctaagggtcagagcagatcgaaatttgaaaacagaggaggaagaagaggaggaggaggaggaggaagaagatgatgaagaagaggaaggtgatgatgagggacaaaaatctagggaggcaccaatcctgaaagagtttaaggaagaaggggaagagatacctagagtaaaaccagaggagatgatggatgagagacccaaaacaagatcccaggaacaggaggtgttagagagaggagggagatttacaagatcccaggaagaggctagaaaaagtcatctggccagacagcagcaggagaaggaaatgaaaacaacatctccccttgaggaggaagaaagagaaataaaatcttcacaaggcttaaaggaaaaatcgaagtctccttcccctcctcgactgactgaagatcgaaagaaggcctcacttgtagcgctgccagagcaaactgccagcgaggaggagactcctccacctttactaacaaaggaagcatcttctccaccacctcatccacagctccatagcgaagaagaaatagagcccatggaaggcccagccccccctgtcctcattcagttatctcctcctaatacagatgctgacaccagggagctattagtatctcagcatactgtccagttggtaggaggcctgtctcctttgtcaagtccttcagacaccaaagcagaatctccagcagagaaagtgccagaggagagtgtcctgcctctggttcagaaaagcacactggctgactactcagcccagaaggatcttgaacctgagtcagacagatctgctcagcccctccctctaaaaattgaggaattagcactggccaaaggaatcactgaagaatgtctgaaacagccatctttggaacagaaggaaggcagaagagcttctcatacccttctcccaagccacagattgaaacagtcagctgattcatcctctagccggtcctcctcatcttcctcctccagttctagatcaagatctcgctctcctgacagttcaggttctcggtctcattcaccgctcagatccaagcagagagatgtagcccaggcacgtactcatgccaaccctcgtggtagacccaagatgggctccagatcaacatcagagtccagatcaaggtccgttcacgttcacgttctcgttcagcatcaagcaacagcagaaaatctctgagccctggagtctccagggacagcagcaccagctatactgaaaccaaagagaaggcaggcaggaggcccaaatcttccagtgtatacattcttgtgttttctttttcttgtcccagaggctatacagagggaactctgtctcctcctaagcatattggggctgggctgctctggccaggtgcttggcattcctgcagttaacagggagacatctgcgcacttggctt

SEQ ID NO: 356098 - DNA, 903 bp, Homo sapiens
  misc_feature (649)..(649): n is a, c, g, or t
  misc_feature (652)..(652): n is a, c, g, or t
  misc_feature (655)..(655): n is a, c, g, or t
  misc_feature (659)..(659): n is a, c, g, or t
  misc_feature (662)..(662): n is a, c, g, or t
  misc_feature (665)..(665): n is a, c, g, or t
tagagtatcctcgtaagaaagagaaagaaggaaggtgtgttttttttctctatttttttttaggattttttttgtttggtttttgttatttcttccattccagaaagggataaacagcacttccagggggagaaaaaaaatcatgttatcagaaagcaaagaagggtgagagcttcacatttccatgtatgccttttccccgccgccctagctcccttcgtcttccttctctctcctcatggctctcactccgtctttcgttttggcttgctttcactcattctgccttccgtcagtctcattcttcgaggaggtggtgggatcttggaacaaggaaggtgtggtttttttctttatttttttttaggattttttttgtttggtttttgttatttcttccattccagaaagggataaacagcacttccagggggagaaaaaaaatcatgttatcagaaagcaaagaagggtgagagcttcacatttccatgtatgccttttccccgccgccctagctcccttcgtcttccttctcttcctcatggctttcattccgtctttcgttttggtttgttttcagtcattctgccttccttctttctctttcttcgaggaggtggtgggatcttggaacaaggaaggtgtggtnttnttncttnatnttnttttaggattttttttgtttggtttctgctatttcttcccttccagaaagggataaacagcagttccagggcgagaaaaaaaatcatcagatcagataatgacgaagatacgcggtgagagcctcacacgaccatcaatgcctcgctgcccgccgccgtacctccgttcgtggtccatctccgtacgctcatggcatggtcatgtccgtctttcgttctcgggatctttcaatcatta

SEQ ID NO: 356099 - DNA, 7159 bp, Homo sapiens
  misc_feature (633)..(633): n is a, c, g, or t
  misc_feature (670)..(670): n is a, c, g, or t
  misc_feature (706)..(706): n is a, c, g, or t
  misc_feature (840)..(840): n is a, c, g, or t
gagacggagtcttgctctgtcacccaggctgtagtgcaatggcgtgatctcaaccactgcttcctgggttcaagcgattctcctgcctcagcctcccgagtagctgggactataggcgtacgccaccacgcccggctaatttgtttgtatttttagtagagacggggtttcaccatattggccagactggtctccaactcctgacctcaagtgatccgcccgcctcggcctcccaaagtgctgggattataggcgtaagccaccgcgcccggcaccttgccactgattttgcatcatgaatgcaacggaaagatcagccaatttgactttaatagttttcagtctcttaaatctctaacgtatctcttaaatctctaaactatttgtctgtgacctattttactgtttgtgtttcttctgcatcaagttggaggattggtagtgacaaagaaagaagcccctaaacaattaatattagttcaagtaccaaaaaagttcagggcgcttgcattttccagttcttgccctacaggaagcagttcctccaagggaacttactctcttctgcggagcaaggaagaactttcccagaatcttgccacatggcttccaaggcaaactcaaactcaagtncagcgtcatagatcagttcatagtctgggtccgaagncacggcgatgcttcttgcgcacccccacggagcttnttattccgattccgccagccccccgcccctccccaaaaaaagcctaagatgggagtggctatgattcagaggacagagggcagaagctgtttgcgttaaggagtggggggcttgccctattaaggtaatccgcnaacaccgagtctgacccggcccatagaggtacttctaccccgcttacctccccttttctctcgaagggcacccgaagattgtcacgagtccttagactccaactactgcggcagcttccaaatttcctgaaaaccctaagctgggccagcccggcagcccacgcacttccggcctcggacccgccccaaacacccaagcgccccagcgcctcatctctaggtccggaaataaacgaacatctccgattatggttataccagggtcgagggtttccgaatatattcgattcaaagcttcggcaagacgaagaaaaccgagcctgaaagcagggcgagaaaaggggcgctgcagggcggatggaaagaattgattggtaacgatgtggagacggaaacatccgaggacatccggaggaacccggggagttctgagtggtaatcgaggggtagagtatggcagtgggcggggtcatctcggtacgttcgaagggcgttggcggaaattaccgaagatgcccgaagccgtcgggacggacccgagtacctcacgcaagatggcggagctggaggaggtgactctggacgggaagcctcttcaggcgctgcgggtgaccgacctgaaggccgcactggagcagcgaggcctagccaagagcgggcagaagagtgccctggtcaagcggctcaaaggggctctaatgctagaaaatttacagaaacactcaacaccccatgctgcattccagccaaattcccagattggtgaggaaatgagccagaacagtttcataaaacagtatctggaaaagcagcaggagctacttaggcagcgtctggaacgtgaagctcgagaagctgcagaacttgaagaagcttcagctgagtcggaggacgagatgatccatcctgagggagtggcttccctgctgcctcctgactttcagagcagcctggagagaccagagctggagctcagcagacattcgcccagaaaaagctcctcaatttctgaagagaaaggtgactctgatgatgagaaaccaaggaaaggagaaagacgatcatctagggtcagacaggcaagagcagctaaactgtctgagggcagccaacctgctgaggaggaagaggatcaagaaacaccttccagaaacctaagggtcagagcagatcgaaatttgaaaacagaggaggaagaagaggaggaggaggaggaggaagaagatgatgaagaagaggaaggtgatgatgagggacaaaaatctagggaggcaccaatcctgaaagagtttaaggaagaaggggaagagatacctagagtaaaaccagaggagatgatggatgagagacccaaaacaagatcccaggaacaggaggtgttagagagaggagggagatttacaagatcccaggaagaggctagaaaaagtcatctggccagacagcagcaggagaaggaaatgaaaacaacatctccccttgaggaggaagaaagagaaataaaatcttcacaaggcttaaaggaaaaatcgaagtctccttcccctcctcgactgactgaagatcgaaagaaggcctcacttgtagcgctgccagagcaaactgccagcgaggaggagactcctccacctttactaacaaaggaagcatcttctccaccacctcatccacagctccatagcgaagaagaaatagagcccatggaaggcccagccccccctgtcctcattcagttatctcctcctaatacagatgctgacaccagggagctattagtatctcagcatactgtccagttggtaggaggcctgtctcctttgtcaagtccttcagacaccaaagcagaatctccagcagagaaagtgccagaggagagtgtcctgcctctggttcagaaaagcacactggctgactactcagcccagaaggatcttgaacctgagtcagacagatctgctcagcccctccctctaaaaattgaggaattagcactggccaaaggaatcactgaagaatgtctgaaacagccatctttggaacagaaggaaggcagaagagcttctcatacccttctcccaagccacagattgaaacagtcagctgattcatcctctagccggtcctcctcatcttcctcctccagttctagatcaagatctcgctctcctgacagttcaggttctcggtctcattcaccgctcagatccaagcagagagatgtagcccaggcacgtactcatgccaaccctcgtggtagacccaagatgggctccagatcaacatcagagtccagatcaaggtccgttcacgttcacgttctcgttcagcatcaagcaacagcagaaaatctctgagccctggagtctccagggacagcagcaccagctatactgaaaccaaagatccctcttctggtcaggaggttgcaactccaccagtgccacaactgcaggtctgtgagccaaaggagaggacttccacctcctcatcctctgtccaagcaaggcgtctgagtcagcctgaatcagctgaaaagcatgtgacccagaggttacagcctgagcgggggagcccaaagaagtgtgaagctgaagaggcagagccaccagctgccacacagccccaaacctcagagactcagacctctcatctgccagaatcagaaagaattcatcacactgttgaggagaaggaggaagtgaccatggacacaagtgaaaacagacctgaaaatgatgttccagaacctcccatgcctattgcagaccaagtcagcaatgatgaccgcccggagggcagtgttgaagatgaggagaagaaagagtacctcatgtacggtaatccgcccgtaaaatataaccctgcccaactggccaatcgctgatgccgcctcttcctctggacccacccgctgctactgagctgcccaatcagagccaagtctgctatccaggtgtcttggccagaggggggcatgtatatgggctcctgtgatgggcccccttttgcctccctgtcttgcttacatcagggggccaagaagaacactgttctggagagacttgtattgagcaagcaaaaaacatttggaaaggggtggacttgcatcatctccctacttgggacaccccaagaagagcttgtgccagtgctggggcgcctgcccacatgcccttgcccttttgaggactgtgggttgccttgtttgctacagactgttgggatccccatctagggcaccaagacctcctaaagtttgtgatcgcagtgccatgctgtaaaacactgagtgggaccctctacttaagctgtgacgactaggaaccgtgcagaggagtctagggtctgagcccctggggatttaatgctgatgacagcccagcccatgtgtcaccacttgctcatcagatggactttcctttggtccctgttgtccatggtgaagggcagcatgttggttgctccaacttctcctccatccctggaggcagggactcatttcatccacctgactggaaccactgtctcagctggagtccctgaggagatgccagccacaactctccgaagagaagtattctgaccttgctgctgaatgtctgccaggtcctggggtattcacctacccccaggctaccttcatcagaggctccatgatcccactcggtgagaggaccccctccccagttacaggcagaggagaaagggactctggagtcatcacctggattccaagtattgggtggtgttattgctgcagcttgccactggtggacatagggtcctgcctgcctctcacgataaaaggcaaggatcattcctgctactcacaggccatctcatcagggactgcaagatgatgtcccttcagggccaggactgatgtctctgcccctttcccccctctatccctcgctgagcctggccaccgccagtgaactgtcttgacatcatggaaactgggcagcgtccccccacacgtttccctcccgccccccctgcgcccctgggaggactctggcagtgccgtgctgactaccacgccgtgcgcccaccttttttgccaacccaaccccccaccaattgcacagcgcctagcagggagggctcattctgattggaccggcggttgactagatacagtccccacagtgaggtgcgattggctgaactgaagatcccagagctcgctgcccaaatcattcaagaggaagatctccgttgtctcagctaccaagggggtgccagctggaaacagtgacacagaggggggccagcctggtcggaaacgacgctggggagccagcacagccaccacacagaagaaaccttccatcagtatcaccactgaatcactaaaggaggctgttgtggatcttcatgctgatgactctcgcatctctgaggatgagacagagcgtaatggcgatgatgggacccatgacaaggggctgaaaatatgccggacagtcactcaggtagtacctgcagagggccaggagaatgggcagagggaagaagaggaagaagagaaggaacctgaagcagaacctcctgtacctccccaggtgtcagtagaggtggccttgcccccacctgcagagcatgaagtaaagaaagtgactttaggagataccttaactcgacgttccattagccagcagaagtccggagtttccattaccattgatgacccagtccgaactgcccaggtgccctccccaccccggggcaagattagcaacattgtccatatctccaatttggtccgtcctttcactttaggccagctaaaggagttgttggggcgcacaggaaccttggtggaagaggccttctggattgacaagatcaaatctcattgctttgtaacgtactcaacagtagaggaagctgttgccacccgcacagctctgcacggggtcaaatggccccagtccaatcccaaattcctttgtgctgactatgccgagcaagatgagctggattatcaccgaggcctcttggtggaccgtccctctgaaactaagacagaggagcagggaataccacggcccctgcaccccccacccccacccccggtccagccaccacagcacccccgggcagagcagcgggagcaggaacgggcagtgcgggaacagtgggcagaacgggaacgggaaatggagcggcgggagcggactcgatcagagcgtgaatgggatcgggacaaagttcgagaagggccccgttcccgatcaaggtcccgtgaccgccgccgcaaggaacgtgcgaagtctaaagaaaagaagagtgagaagaaagagaaagcccaggaggaaccacctgccaagctgctggatgaccttttccgaaagaccaaggcagctccctgcatctattggctcccactgactgacagccagatcgttcagaaagaggcagagcgggccgaacgggccaaggagcgggagaagcggcgaaaggagcaagaagaagaagagcaaaaggagcgggagaaggaagccgagcgggaacggaaccgacagctggagcgagagaaacgtcgggagcacagtcgggagagggacagggagagagagagagaaagggagcgggacaggggggaccgagatcgggatagggaaagggaccgagaacgaggcagggaaagggatcgcagggacaccaagcgccacagcagaagccggagtcggagcacacctgtgcgggaccggggtgggcgccgctagctgggaaaacactagagctgcaggtaccagccactcggccccagggggttatggccacagagggataggcacagtctccaccaccctggagccaagggtctttcacatcacctatccctacatacataccaaatggaaaagtggccatccttttccccccaaacacacccccttaacctatctcttgggacttagcccgaccctccctctcatttcccattaagtctgagaggcaagagctaggttaggcaaggaggtggttggccagagatggggaacagccaggtgccccagtcctctgatttttcctccatcctgcttaccacctccctgggtacttacagccttctcttgggaacagccggggccaggactgggtcacctatgagctgaatcagcatctcctcctgagtcccagggcccctgcagttcccagtctcttctgtcctgcagcccttgcctctttcccacaggttccactttatatccaccttttccttttgttcaatttttatttttattttttttattattaaatgatgtggtctatggaaaaaaaaataaaaatctgacttagttttaaa

SEQ ID NO: 356100 - DNA, 9305 bp, Homo sapiens
  misc_feature (633)..(633): n is a, c, g, or t
  misc_feature (670)..(670): n is a, c, g, or t
  misc_feature (706)..(706): n is a, c, g, or t
  misc_feature (840)..(840): n is a, c, g, or t
gagacggagtcttgctctgtcacccaggctgtagtgcaatggcgtgatctcaaccactgcttcctgggttcaagcgattctcctgcctcagcctcccgagtagctgggactataggcgtacgccaccacgcccggctaatttgtttgtatttttagtagagacggggtttcaccatattggccagactggtctccaactcctgacctcaagtgatccgcccgcctcggcctcccaaagtgctgggattataggcgtaagccaccgcgcccggcaccttgccactgattttgcatcatgaatgcaacggaaagatcagccaatttgactttaatagttttcagtctcttaaatctctaacgtatctcttaaatctctaaactatttgtctgtgacctattttactgtttgtgtttcttctgcatcaagttggaggattggtagtgacaaagaaagaagcccctaaacaattaatattagttcaagtaccaaaaaagttcagggcgcttgcattttccagttcttgccctacaggaagcagttcctccaagggaacttactctcttctgcggagcaaggaagaactttcccagaatcttgccacatggcttccaaggcaaactcaaactcaagtncagcgtcatagatcagttcatagtctgggtccgaagncacggcgatgcttcttgcgcacccccacggagcttnttattccgattccgccagccccccgcccctccccaaaaaaagcctaagatgggagtggctatgattcagaggacagagggcagaagctgtttgcgttaaggagtggggggcttgccctattaaggtaatccgcnaacaccgagtctgacccggcccatagaggtacttctaccccgcttacctccccttttctctcgaagggcacccgaagattgtcacgagtccttagactccaactactgcggcagcttccaaatttcctgaaaaccctaagctgggccagcccggcagcccacgcacttccggcctcggacccgccccaaacacccaagcgccccagcgcctcatctctaggtccggaaataaacgaacatctccgattatggttataccagggtcgagggtttccgaatatattcgattcaaagcttcggcaagacgaagaaaaccgagcctgaaagcagggcgagaaaaggggcgctgcagggcggatggaaagaattgattggtaacgatgtggagacggaaacatccgaggacatccggaggaacccggggagttctgagtggtaatcgaggggtagagtatggcagtgggcggggtcatctcggtacgttcgaagggcgttggcggaaattaccgaagatgcccgaagccgtcgggacggacccgagtacctcacgcaagatggcggagctggaggaggtgactctggacgggaagcctcttcaggcgctgcgggtgaccgacctgaaggccgcactggagcagcgaggcctagccaagagcgggcagaagagtgccctggtcaagcggctcaaaggggctctaatgctagaaaatttacagaaacactcaacaccccatgctgcattccagccaaattcccagattggtgaggaaatgagccagaacagtttcataaaacagtatctggaaaagcagcaggagctacttaggcagcgtctggaacgtgaagctcgagaagctgcagaacttgaagaagcttcagctgagtcggaggacgagatgatccatcctgagggagtggcttccctgctgcctcctgactttcagagcagcctggagagaccagagctggagctcagcagacattcgcccagaaaaagctcctcaatttctgaagagaaaggtgactctgatgatgagaaaccaaggaaaggagaaagacgatcatctagggtcagacaggcaagagcagctaaactgtctgagggcagccaacctgctgaggaggaagaggatcaagaaacaccttccagaaacctaagggtcagagcagatcgaaatttgaaaacagaggaggaagaagaggaggaggaggaggaggaagaagatgatgaagaagaggaaggtgatgatgagggacaaaaatctagggaggcaccaatcctgaaagagtttaaggaagaaggggaagagatacctagagtaaaaccagaggagatgatggatgagagacccaaaacaagatcccaggaacaggaggtgttagagagaggagggagatttacaagatcccaggaagaggctagaaaaagtcatctggccagacagcagcaggagaaggaaatgaaaacaacatctccccttgaggaggaagaaagagaaataaaatcttcacaaggcttaaaggaaaaatcgaagtctccttcccctcctcgactgactgaagatcgaaagaaggcctcacttgtagcgctgccagagcaaactgccagcgaggaggagactcctccacctttactaacaaaggaagcatcttctccaccacctcatccacagctccatagcgaagaagaaatagagcccatggaaggcccagccccccctgtcctcattcagttatctcctcctaatacagatgctgacaccagggagctattagtatctcagcatactgtccagttggtaggaggcctgtctcctttgtcaagtccttcagacaccaaagcagaatctccagcagagaaagtgccagaggagagtgtcctgcctctggttcagaaaagcacactggctgactactcagcccagaaggatcttgaacctgagtcagacagatctgctcagcccctccctctaaaaattgaggaattagcactggccaaaggaatcactgaagaatgtctgaaacagccatctttggaacagaaggaaggcagaagagcttctcatacccttctcccaagccacagattgaaacagtcagctgattcatcctctagccggtcctcctcatcttcctcctccagttctagatcaagatctcgctctcctgacagttcaggttctcggtctcattcaccgctcagatccaagcagagagatgtagcccaggcacgtactcatgccaaccctcgtggtagacccaagatgggctccagatcaacatcagagtccagatcaaggtccgttcacgttcacgttctcgttcagcatcaagcaacagcagaaaatctctgagccctggagtctccagggacagcagcaccagctatactgaaaccaaagatccctcttctggtcaggaggttgcaactccaccagtgccacaactgcaggtctgtgagccaaaggagaggacttccacctcctcatcctctgtccaagcaaggcgtctgagtcagcctgaatcagctgaaaagcatgtgacccagaggttacagcctgagcgggggagcccaaagaagtgtgaagctgaagaggcagagccaccagctgccacacagccccaaacctcagagactcagacctctcatctgccagaatcagaaagaattcatcacactgttgaggagaaggaggaagtgaccatggacacaagtgaaaacagacctgaaaatgatgttccagaacctcccatgcctattgcagaccaagtcagcaatgatgaccgcccggagggcagtgttgaagatgaggagaagaaagaggtaaacatccaagccacctattggggcgggtgggcaggaatggacctaggggaaagagtagagcactctagtgatccctcttacacggtgggttaacttaaaggagggatgaggcagggacttggatcagaatagggccaagggagaattcgctggtttagcaagggagaccccttgtgacggggacagggctcattcattttcctttccttgttggggaagtagtgcccagactctagacgtttgtaactaacgggaaagtctgataatggccctttatctaagatttatgttcagcttttcctgctgtcttcccaagcttctcctggtggtaactcctttagctttccctcctttttaaaagcctgatggagcccaacgccatctagtggacattggtggttctcaccagaccagccatgctgagaaatttttgttcctcctctgccctccagtggtctgactgcagagatgtagctacttagaagccagcacttgtgatccggaaggcccattctcagttacctgtgacccctctacctccttttttggcatatgttatcttgtgtcctgcacccacttcagggggcttcccccatcagagccagcgaagtcttcttggctcttaaagtaattgagaaagaatgagctgggtttaggagaggggtaacaaggtgggagggactgttgtgtgtgtagcctttttctggtgtgtgttgcgggggtgggggccggtgaaagtgatttgatgtgcagaatattatttattacaaggtccttcttccccgtaaaactttgtccaagtacctcatgtacggtaatccgcccgtaaaatataaccctgcccaactggccaatcgctgatgccgcctcttcctctggacccacccgctgctactgagctgcccaatcagagccaagtctgctatccaggtgtcttggccagaggggggcatgtatatgggctcctgtgatgggcccccttttgcctccctgtcttgcttacatcagggggccaagaagaacactgttctggagagacttgtattgagcaagcaaaaaacatttggaaaggggtggacttgcatcatctccctacttgggacaccccaagaagagcttgtgccagtgctggggcgcctgcccacatgcccttgcccttttgaggactgtgggttgccttgtttgctacagactgttgggatccccatctagggcaccaagacctcctaaagtttgtgatcgcagtgccatgctgtaaaacactgagtgggaccctctacttaagctgtgacgactaggaaccgtgcagaggagtctagggtctgagcccctggggatttaatgctgatgacagcccagcccatgtgtcaccacttgctcatcagatggactttcctttggtccctgttgtccatggtgaagggcagcatgttggttgctccaacttctcctccatccctggaggcagggactcatttcatccacctgactggaaccactgtctcagctggagtccctgaggagatgccagccacaactctccgaagagaagtattctgaccttgctgctgaatgtctgccaggtcctggggtattcacctacccccaggctaccttcatcagaggctccatgatcccactcggtgagaggaccccctccccagttacaggcagaggagaaagggactctggagtcatcacctggattccaagtattgggtggtgttattgctgcagcttgccactggtggacatagggtcctgcctgcctctcacgataaaaggcaaggatcattcctgctactcacaggccatctcatcagggactgcaagatgatgtcccttcagggccaggactgatgtctctgcccctttcccccctctatccctcgctgagcctggccaccgccagtgaactgtcttgacatcatggaaactgggcagcgtccccccacacgtttccctcccgccccccctgcgcccctgggaggactctggcagtgccgtgctgactaccacgccgtgcgcccaccttttttgccaacccaaccccccaccaattgcacagcgcctagcagggagggctcattctgattggaccggcggttgactagatacagtccccacagtgaggtgcgattggctgaactgaagatcccaggtgtgagatggtacctggaacatttgtcatattcctagtttattttcttctttattttcttcttctttttttaatattttattttattttttttctatatctttattttttctgatttcttttatttatttatttggttcatgtttttcctgttttaattaagacctttttttttgttttgtttttctcactaacttacccatcgagagcggcccagctaggggtcaggctggcccttaacagagaccaaggagacttggttagacgacacaaacggggctgcgggtgggggtggatgggaaagggatttcatcacgaggtttctgccctaccctttagaagagtggtagagtggtcttagtttttccagaaataagcacctacacttgaaaatactctattccctttttctctctcacttttctcccccgccccccatagtctttcgtcattcacccactgagtgtttggggtagagacttgtcccaaagatgtcttctggtctttggcagagcccctaaggcttgagccctggttggagaggaaacagtaagactctgctggagctccctgcggtggctggaaagtctaaggatctccttggggacaatctgcccttcataaaaaccttcctttatcaaagacacctttgagttctttttgctagcacttggctcaagagcctcatctccagtgggtctggtgctgcccttttccacagtgtggtgggggtctgggcagtcttgacatgacagtctgctgtccaagcatctcaaagccattgtcagtgggcatcagtctggccattgaagaaaggagggttaccttgttgaagttgccatccaaagttggttttccttgtttcctcgagttagcaaggaaggacctgggaggactagatgacccagtttggggcacagtttgtttggcttggtgtcctctcgactcagacggtgaaagagggggtatgaccaacatctttagggggctgagaggctactgaactcctcttccagcttatttctggttaagctaatacacaggtgtgatacggagtagatgacttttccctgctctgatgtttagttttatttttttctctaacttgcattgattctgcttcgtttttgccgtttgccgcttctgttttggtctctgtctgtctctgtgtctctctctgtctctctctctcactctatctgtgtctttggaggctaagctaagactgccccatctaacctccttcccccctctctgtggggtgtctctctttctcttttttttcccctttttcttcttcatacagagctcgctgcccaaatcattcaagaggaagatctccgttgtctcagctaccaagggggtgccagctggaaacagtgacacagaggggggccagcctggtcggaaacgacgctggggagccagcacagccaccacacagaagaaaccttccatcagtatcaccactgaatcactaaagagcctcatccccgacatcaaacccctggcggggcaggaggctgttgtggatcttcatgctgatgactctcgcatctctgaggatgagacagagcgtaatggcgatgatgggacccatgacaaggggctgaaaatatgccggacagtcactcaggtagtacctgcagagggccaggagaatgggcagagggaagaagaggaagaagagaaggaacctgaagcagaacctcctgtacctccccaggtgtcagtagaggtggccttgcccccacctgcagagcatgaagtaaagaaagtgactttaggagataccttaactcgacgttccattagccagcagaagtccggagtttccattaccattgatgacccagtccgaactgcccaggtgccctccccaccccggggcaagattagcaacattgtccatatctccaatttggtccgtcctttcactttaggccagctaaaggagttgttggggcgcacaggaaccttggtggaagaggccttctggattgacaagatcaaatctcattgctttgtaacgtactcaacagtagaggaagctgttgccacccgcacagctctgcacggggtcaaatggccccagtccaatcccaaattcctttgtgctgactatgccgagcaagatgagctggattatcaccgaggcctcttggtggaccgtccctctgaaactaagacagaggagcagggaataccacggcccctgcaccccccacccccacccccggtccagccaccacagcacccccgggcagagcagcgggagcaggaacgggcagtgcgggaacagtgggcagaacgggaacgggaaatggagcggcgggagcggactcgatcagagcgtgaatgggatcgggacaaagttcgagaagggccccgttcccgatcaaggtcccgtgaccgccgccgcaaggaacgtgcgaagtctaaagaaaagaagagtgagaagaaagagaaagcccaggaggaaccacctgccaagctgctggatgaccttttccgaaagaccaaggcagctccctgcatctattggctcccactgactgacagccagatcgttcagaaagaggcagagcgggccgaacgggccaaggagcgggagaagcggcgaaaggagcaagaagaagaagagcaaaaggagcgggagaaggaagccgagcgggaacggaaccgacagctggagcgagagaaacgtcgggagcacagtcgggagagggacagggagagagagagagaaagggagcgggacaggggggaccgagatcgggatagggaaagggaccgagaacgaggcagggaaagggatcgcagggacaccaagcgccacagcagaagccggagtcggagcacacctgtgcgggaccggggtgggcgccgctagctgggaaaacactagagctgcaggtaccagccactcggccccagggggttatggccacagagggataggcacagtctccaccaccctggagccaagggtctttcacatcacctatccctacatacataccaaatggaaaagtggccatccttttccccccaaacacacccccttaacctatctcttgggacttagcccgaccctccctctcatttcccattaagtctgagaggcaagagctaggttaggcaaggaggtggttggccagagatggggaacagccaggtgccccagtcctctgatttttcctccatcctgcttaccacctccctgggtacttacagccttctcttgggaacagccggggccaggactgggtcacctatgagctgaatcagcatctcctcctgagtcccagggcccctgcagttcccagtctcttctgtcctgcagcccttgcctctttcccacaggttccactttatatccaccttttccttttgttcaatttttatttttattttttttattattaaatgatgtggtctatggaaaaaaaaataaaaatctgacttagttttaaa

SEQ ID NO: 356101 - DNA, 9402 bp, Homo sapiens
  misc_feature (633)..(633): n is a, c, g, or t
  misc_feature (670)..(670): n is a, c, g, or t
  misc_feature (706)..(706): n is a, c, g, or t
  misc_feature (840)..(840): n is a, c, g, or t
gagacggagtcttgctctgtcacccaggctgtagtgcaatggcgtgatctcaaccactgcttcctgggttcaagcgattctcctgcctcagcctcccgagtagctgggactataggcgtacgccaccacgcccggctaatttgtttgtatttttagtagagacggggtttcaccatattggccagactggtctccaactcctgacctcaagtgatccgcccgcctcggcctcccaaagtgctgggattataggcgtaagccaccgcgcccggcaccttgccactgattttgcatcatgaatgcaacggaaagatcagccaatttgactttaatagttttcagtctcttaaatctctaacgtatctcttaaatctctaaactatttgtctgtgacctattttactgtttgtgtttcttctgcatcaagttggaggattggtagtgacaaagaaagaagcccctaaacaattaatattagttcaagtaccaaaaaagttcagggcgcttgcattttccagttcttgccctacaggaagcagttcctccaagggaacttactctcttctgcggagcaaggaagaactttcccagaatcttgccacatggcttccaaggcaaactcaaactcaagtncagcgtcatagatcagttcatagtctgggtccgaagncacggcgatgcttcttgcgcacccccacggagcttnttattccgattccgccagccccccgcccctccccaaaaaaagcctaagatgggagtggctatgattcagaggacagagggcagaagctgtttgcgttaaggagtggggggcttgccctattaaggtaatccgcnaacaccgagtctgacccggcccatagaggtacttctaccccgcttacctccccttttctctcgaagggcacccgaagattgtcacgagtccttagactccaactactgcggcagcttccaaatttcctgaaaaccctaagctgggccagcccggcagcccacgcacttccggcctcggacccgccccaaacacccaagcgccccagcgcctcatctctaggtccggaaataaacgaacatctccgattatggttataccagggtcgagggtttccgaatatattcgattcaaagcttcggcaagacgaagaaaaccgagcctgaaagcagggcgagaaaaggggcgctgcagggcggatggaaagaattgattggtaacgatgtggagacggaaacatccgaggacatccggaggaacccggggagttctgagtggtaatcgaggggtagagtatggcagtgggcggggtcatctcggtacgttcgaagggcgttggcggaaattaccgaagatgcccgaagccgtcgggacggacccgagtacctcacgcaagatggcggagctggaggaggtgactctggacgggaagcctcttcaggcgctgcgggtgaccgacctgaaggccgcactggagcagcgaggcctagccaagagcgggcagaagagtgccctggtcaagcggctcaaaggggctctaatgctagaaaatttacagaaacactcaacaccccatgctgcattccagccaaattcccagattggtgaggaaatgagccagaacagtttcataaaacagtatctggaaaagcagcaggagctacttaggcagcgtctggaacgtgaagctcgagaagctgcagaacttgaagaagcttcagctgagtcggaggacgagatgatccatcctgagggagtggcttccctgctgcctcctgactttcagagcagcctggagagaccagagctggagctcagcagacattcgcccagaaaaagctcctcaatttctgaagagaaaggtgactctgatgatgagaaaccaaggaaaggagaaagacgatcatctagggtcagacaggcaagagcagctaaactgtctgagggcagccaacctgctgaggaggaagaggatcaagaaacaccttccagaaacctaagggtcagagcagatcgaaatttgaaaacagaggaggaagaagaggaggaggaggaggaggaagaagatgatgaagaagaggaaggtgatgatgagggacaaaaatctagggaggcaccaatcctgaaagagtttaaggaagaaggggaagagatacctagagtaaaaccagaggagatgatggatgagagacccaaaacaagatcccaggaacaggaggtgttagagagaggagggagatttacaagatcccaggaagaggctagaaaaagtcatctggccagacagcagcaggagaaggaaatgaaaacaacatctccccttgaggaggaagaaagagaaataaaatcttcacaaggcttaaaggaaaaatcgaagtctccttcccctcctcgactgactgaagatcgaaagaaggcctcacttgtagcgctgccagagcaaactgccagcgaggaggagactcctccacctttactaacaaaggaagcatcttctccaccacctcatccacagctccatagcgaagaagaaatagagcccatggaaggcccagccccccctgtcctcattcagttatctcctcctaatacagatgctgacaccagggagctattagtatctcagcatactgtccagttggtaggaggcctgtctcctttgtcaagtccttcagacaccaaagcagaatctccagcagagaaagtgccagaggagagtgtcctgcctctggttcagaaaagcacactggctgactactcagcccagaaggatcttgaacctgagtcagacagatctgctcagcccctccctctaaaaattgaggaattagcactggccaaaggaatcactgaagaatgtctgaaacagccatctttggaacagaaggaaggcagaagagcttctcatacccttctcccaagccacagattgaaacagtcagctgattcatcctctagccggtcctcctcatcttcctcctccagttctagatcaagatctcgctctcctgacagttcaggttctcggtctcattcaccgctcagatccaagcagagagatgtagcccaggcacgtactcatgccaaccctcgtggtagacccaagatgggctccagatcaacatcagagtccagatcaaggtccgttcacgttcacgttctcgttcagcatcaagcaacagcagaaaatctctgagccctggagtctccagggacagcagcaccagctatactgaaaccaaagatccctcttctggtcaggaggttgcaactccaccagtgccacaactgcaggtctgtgagccaaaggagaggacttccacctcctcatcctctgtccaagcaaggcgtctgagtcagcctgaatcagctgaaaagcatgtgacccagaggttacagcctgagcgggggagcccaaagaagtgtgaagctgaagaggcagagccaccagctgccacacagccccaaacctcagagactcagacctctcatctgccagaatcagaaagaattcatcacactgttgaggagaaggaggaagtgaccatggacacaagtgaaaacagacctgaaaatgatgttccagaacctcccatgcctattgcagaccaagtcagcaatgatgaccgcccggagggcagtgttgaagatgaggagaagaaagaggtaaacatccaagccacctattggggcgggtgggcaggaatggacctaggggaaagagtagagcactctagtgatccctcttacacggtgggttaacttaaaggagggatgaggcagggacttggatcagaatagggccaagggagaattcgctggtttagcaagggagaccccttgtgacggggacagggctcattcattttcctttccttgttggggaagtagtgcccagactctagacgtttgtaactaacgggaaagtctgataatggccctttatctaagatttatgttcagcttttcctgctgtcttcccaagcttctcctggtggtaactcctttagctttccctcctttttaaaagcctgatggagcccaacgccatctagtggacattggtggttctcaccagaccagccatgctgagaaatttttgttcctcctctgccctccagtggtctgactgcagagatgtagctacttagaagccagcacttgtgatccggaaggcccattctcagttacctgtgacccctctacctccttttttggcatatgttatcttgtgtcctgcacccacttcagggggcttcccccatcagagccagcgaagtcttcttggctcttaaagtaattgagaaagaatgagctgggtttaggagaggggtaacaaggtgggagggactgttgtgtgtgtagcctttttctggtgtgtgttgcgggggtgggggccggtgaaagtgatttgatgtgcagaatattatttattacaaggtccttcttccccgtaaaactttgtccaagtacctcatgtacggtaatccgcccgtaaaatataaccctgcccaactggccaatcgctgatgccgcctcttcctctggacccacccgctgctactgagctgcccaatcagagccaagtctgctatccaggtgtcttggccagaggggggcatgtatatgggctcctgtgatgggcccccttttgcctccctgtcttgcttacatcagggggccaagaagaacactgttctggagagacttgtattgagcaagcaaaaaacatttggaaaggggtggacttgcatcatctccctacttgggacaccccaagaagagcttgtgccagtgctggggcgcctgcccacatgcccttgcccttttgaggactgtgggttgccttgtttgctacagactgttgggatccccatctagggcaccaagacctcctaaagtttgtgatcgcagtgccatgctgtaaaacactgagtgggaccctctacttaagctgtgacgactaggaaccgtgcagaggagtctagggtctgagcccctggggatttaatgctgatgacagcccagcccatgtgtcaccacttgctcatcagatggactttcctttggtccctgttgtccatggtgaagggcagcatgttggttgctccaacttctcctccatccctggaggcagggactcatttcatccacctgactggaaccactgtctcagctggagtccctgaggagatgccagccacaactctccgaagagaagtattctgaccttgctgctgaatgtctgccaggtcctggggtattcacctacccccaggctaccttcatcagaggctccatgatcccactcggtgagaggaccccctccccagttacaggcagaggagaaagggactctggagtcatcacctggattccaagtattgggtggtgttattgctgcagcttgccactggtggacatagggtcctgcctgcctctcacgataaaaggcaaggatcattcctgctactcacaggccatctcatcagggactgcaagatgatgtcccttcagggccaggactgatgtctctgcccctttcccccctctatccctcgctgagcctggccaccgccagtgaactgtcttgacatcatggaaactgggcagcgtccccccacacgtttccctcccgccccccctgcgcccctgggaggactctggcagtgccgtgctgactaccacgccgtgcgcccaccttttttgccaacccaaccccccaccaattgcacagcgcctagcagggagggctcattctgattggaccggcggttgactagatacagtccccacagtgaggtgcgattggctgaactgaagatcccaggtgtgagatggtacctggaacatttgtcatattcctagtttattttcttctttattttcttcttctttttttaatattttattttattttttttctatatctttattttttctgatttcttttatttatttatttggttcatgtttttcctgttttaattaagacctttttttttgttttgtttttctcactaacttacccatcgagagcggcccagctaggggtcaggctggcccttaacagagaccaaggagacttggttagacgacacaaacggggctgcgggtgggggtggatgggaaagggatttcatcacgaggtttctgccctaccctttagaagagtggtagagtggtcttagtttttccagaaataagcacctacacttgaaaatactctattccctttttctctctcacttttctcccccgccccccatagtctttcgtcattcacccactgagtgtttggggtagagacttgtcccaaagatgtcttctggtctttggcagagcccctaaggcttgagccctggttggagaggaaacagtaagactctgctggagctccctgcggtggctggaaagtctaaggatctccttggggacaatctgcccttcataaaaaccttcctttatcaaagacacctttgagttctttttgctagcacttggctcaagagcctcatctccagtgggtctggtgctgcccttttccacagtgtggtgggggtctgggcagtcttgacatgacagtctgctgtccaagcatctcaaagccattgtcagtgggcatcagtctggccattgaagaaaggagggttaccttgttgaagttgccatccaaagttggttttccttgtttcctcgagttagcaaggaaggacctgggaggactagatgacccagtttggggcacagtttgtttggcttggtgtcctctcgactcagacggtgaaagagggggtatgaccaacatctttagggggctgagaggctactgaactcctcttccagcttatttctggttaagctaatacacaggtgtgatacggagtagatgacttttccctgctctgatgtttagttttatttttttctctaacttgcattgattctgcttcgtttttgccgtttgccgcttctgttttggtctctgtctgtctctgtgtctctctctgtctctctctctcactctatctgtgtctttggaggctaagctaagactgccccatctaacctccttcccccctctctgtggggtgtctctctttctcttttttttcccctttttcttcttcatacagagctcgctgcccaaatcattcaagaggaagatctccgttgtctcagctaccaagggggtgccagctggaaacagtgacacagaggggggccagcctggtcggaaacgacgctggggagccagcacagccaccacacagaagaaaccttccatcagtatcaccactgaatcactaaaggtgaggtgggaggagccagggaagggaggatgagacctgttaaggtgggagtagacatgggcccagtgtaacggggtggggggtatctgtgtcccagagcctcatccccgacatcaaacccctggcggggcaggaggctgttgtggatcttcatgctgatgactctcgcatctctgaggatgagacagagcgtaatggcgatgatgggacccatgacaaggggctgaaaatatgccggacagtcactcaggtagtacctgcagagggccaggagaatgggcagagggaagaagaggaagaagagaaggaacctgaagcagaacctcctgtacctccccaggtgtcagtagaggtggccttgcccccacctgcagagcatgaagtaaagaaagtgactttaggagataccttaactcgacgttccattagccagcagaagtccggagtttccattaccattgatgacccagtccgaactgcccaggtgccctccccaccccggggcaagattagcaacattgtccatatctccaatttggtccgtcctttcactttaggccagctaaaggagttgttggggcgcacaggaaccttggtggaagaggccttctggattgacaagatcaaatctcattgctttgtaacgtactcaacagtagaggaagctgttgccacccgcacagctctgcacggggtcaaatggccccagtccaatcccaaattcctttgtgctgactatgccgagcaagatgagctggattatcaccgaggcctcttggtggaccgtccctctgaaactaagacagaggagcagggaataccacggcccctgcaccccccacccccacccccggtccagccaccacagcacccccgggcagagcagcgggagcaggaacgggcagtgcgggaacagtgggcagaacgggaacgggaaatggagcggcgggagcggactcgatcagagcgtgaatgggatcgggacaaagttcgagaagggccccgttcccgatcaaggtcccgtgaccgccgccgcaaggaacgtgcgaagtctaaagaaaagaagagtgagaagaaagagaaagcccaggaggaaccacctgccaagctgctggatgaccttttccgaaagaccaaggcagctccctgcatctattggctcccactgactgacagccagatcgttcagaaagaggcagagcgggccgaacgggccaaggagcgggagaagcggcgaaaggagcaagaagaagaagagcaaaaggagcgggagaaggaagccgagcgggaacggaaccgacagctggagcgagagaaacgtcgggagcacagtcgggagagggacagggagagagagagagaaagggagcgggacaggggggaccgagatcgggatagggaaagggaccgagaacgaggcagggaaagggatcgcagggacaccaagcgccacagcagaagccggagtcggagcacacctgtgcgggaccggggtgggcgccgctagctgggaaaacactagagctgcaggtaccagccactcggccccagggggttatggccacagagggataggcacagtctccaccaccctggagccaagggtctttcacatcacctatccctacatacataccaaatggaaaagtggccatccttttccccccaaacacacccccttaacctatctcttgggacttagcccgaccctccctctcatttcccattaagtctgagaggcaagagctaggttaggcaaggaggtggttggccagagatggggaacagccaggtgccccagtcctctgatttttcctccatcctgcttaccacctccctgggtacttacagccttctcttgggaacagccggggccaggactgggtcacctatgagctgaatcagcatctcctcctgagtcccagggcccctgcagttcccagtctcttctgtcctgcagcccttgcctctttcccacaggttccactttatatccaccttttccttttgttcaatttttatttttattttttttattattaaatgatgtggtctatggaaaaaaaaataaaaatctgacttagttttaaa

SEQ ID NO: 356102 - DNA, 9710 bp, Homo sapiens
  misc_feature (633)..(633): n is a, c, g, or t
  misc_feature (670)..(670): n is a, c, g, or t
  misc_feature (706)..(706): n is a, c, g, or t
  misc_feature (840)..(840): n is a, c, g, or t
gagacggagtcttgctctgtcacccaggctgtagtgcaatggcgtgatctcaaccactgcttcctgggttcaagcgattctcctgcctcagcctcccgagtagctgggactataggcgtacgccaccacgcccggctaatttgtttgtatttttagtagagacggggtttcaccatattggccagactggtctccaactcctgacctcaagtgatccgcccgcctcggcctcccaaagtgctgggattataggcgtaagccaccgcgcccggcaccttgccactgattttgcatcatgaatgcaacggaaagatcagccaatttgactttaatagttttcagtctcttaaatctctaacgtatctcttaaatctctaaactatttgtctgtgacctattttactgtttgtgtttcttctgcatcaagttggaggattggtagtgacaaagaaagaagcccctaaacaattaatattagttcaagtaccaaaaaagttcagggcgcttgcattttccagttcttgccctacaggaagcagttcctccaagggaacttactctcttctgcggagcaaggaagaactttcccagaatcttgccacatggcttccaaggcaaactcaaactcaagtncagcgtcatagatcagttcatagtctgggtccgaagncacggcgatgcttcttgcgcacccccacggagcttnttattccgattccgccagccccccgcccctccccaaaaaaagcctaagatgggagtggctatgattcagaggacagagggcagaagctgtttgcgttaaggagtggggggcttgccctattaaggtaatccgcnaacaccgagtctgacccggcccatagaggtacttctaccccgcttacctccccttttctctcgaagggcacccgaagattgtcacgagtccttagactccaactactgcggcagcttccaaatttcctgaaaaccctaagctgggccagcccggcagcccacgcacttccggcctcggacccgccccaaacacccaagcgccccagcgcctcatctctaggtccggaaataaacgaacatctccgattatggttataccagggtcgagggtttccgaatatattcgattcaaagcttcggcaagacgaagaaaaccgagcctgaaagcagggcgagaaaaggggcgctgcagggcggatggaaagaattgattggtaacgatgtggagacggaaacatccgaggacatccggaggaacccggggagttctgagtggtaatcgaggggtagagtatggcagtgggcggggtcatctcggtacgttcgaagggcgttggcggaaattaccgaagatgcccgaagccgtcgggacggacccgagtacctcacgcaagatggcggagctggaggaggtgactctggacgggaagcctcttcaggcgctgcgggtgaccgacctgaaggccgcactggagcagcgaggcctagccaagagcgggcagaagagtgccctggtcaagcggctcaaaggggctctaatgctagaaaatttacagaaacactcaacaccccatgctgcattccagccaaattcccagattggtgaggaaatgagccagaacagtttcataaaacagtatctggaaaagcagcaggagctacttaggcagcgtctggaacgtgaagctcgagaagctgcagaacttgaagaagcttcagctgagtcggaggacgagatgatccatcctgagggagtggcttccctgctgcctcctgactttcagagcagcctggagagaccagagctggagctcagcagacattcgcccagaaaaagctcctcaatttctgaagagaaaggtgactctgatgatgagaaaccaaggaaaggagaaagacgatcatctagggtcagacaggcaagagcagctaaactgtctgagggcagccaacctgctgaggaggaagaggatcaagaaacaccttccagaaacctaagggtcagagcagatcgaaatttgaaaacagaggaggaagaagaggaggaggaggaggaggaagaagatgatgaagaagaggaaggtgatgatgagggacaaaaatctagggaggcaccaatcctgaaagagtttaaggaagaaggggaagagatacctagagtaaaaccagaggagatgatggatgagagacccaaaacaagatcccaggaacaggaggtgttagagagaggagggagatttacaagatcccaggaagaggctagaaaaagtcatctggccagacagcagcaggagaaggaaatgaaaacaacatctccccttgaggaggaagaaagagaaataaaatcttcacaaggcttaaaggaaaaatcgaagtctccttcccctcctcgactgactgaagatcgaaagaaggcctcacttgtagcgctgccagagcaaactgccagcgaggaggagactcctccacctttactaacaaaggaagcatcttctccaccacctcatccacagctccatagcgaagaagaaatagagcccatggaaggcccagccccccctgtcctcattcagttatctcctcctaatacagatgctgacaccagggagctattagtatctcagcatactgtccagttggtaggaggcctgtctcctttgtcaagtccttcagacaccaaagcagaatctccagcagagaaagtgccagaggagagtgtcctgcctctggttcagaaaagcacactggctgactactcagcccagaaggatcttgaacctgagtcagacagatctgctcagcccctccctctaaaaattgaggaattagcactggccaaaggaatcactgaagaatgtctgaaacagccatctttggaacagaaggaaggcagaagagcttctcatacccttctcccaagccacagattgaaacagtcagctgattcatcctctagccggtcctcctcatcttcctcctccagttctagatcaagatctcgctctcctgacagttcaggttctcggtctcattcaccgctcagatccaagcagagagatgtagcccaggcacgtactcatgccaaccctcgtggtagacccaagatgggctccagatcaacatcagagtccagatcaaggtccgttcacgttcacgttctcgttcagcatcaagcaacagcagaaaatctctgagccctggagtctccagggacagcagcaccagctatactgaaaccaaagatccctcttctggtcaggaggttgcaactccaccagtgccacaactgcaggtctgtgagccaaaggagaggacttccacctcctcatcctctgtccaagcaaggcgtctgagtcagcctgaatcagctgaaaagcatgtgacccagaggttacagcctgagcgggggagcccaaagaagtgtgaagctgaagaggcagagccaccagctgccacacagccccaaacctcagagactcagacctctcatctgccagaatcagaaagaattcatcacactgttgaggagaaggaggaagtgaccatggacacaagtgaaaacagacctgaaaatgatgttccagaacctcccatgcctattgcagaccaagtcagcaatgatgaccgcccggagggcagtgttgaagatgaggagaagaaagaggtaaacatccaagccacctattggggcgggtgggcaggaatggacctaggggaaagagtagagcactctagtgatccctcttacacggtgggttaacttaaaggagggatgaggcagggacttggatcagaatagggccaagggagaattcgctggtttagcaagggagaccccttgtgacggggacagggctcattcattttcctttccttgttggggaagtagtgcccagactctagacgtttgtaactaacgggaaagtctgataatggccctttatctaagatttatgttcagcttttcctgctgtcttcccaagcttctcctggtggtaactcctttagctttccctcctttttaaaagcctgatggagcccaacgccatctagtggacattggtggttctcaccagaccagccatgctgagaaatttttgttcctcctctgccctccagtggtctgactgcagagatgtagctacttagaagccagcacttgtgatccggaaggcccattctcagttacctgtgacccctctacctccttttttggcatatgttatcttgtgtcctgcacccacttcagggggcttcccccatcagagccagcgaagtcttcttggctcttaaagtaattgagaaagaatgagctgggtttaggagaggggtaacaaggtgggagggactgttgtgtgtgtagcctttttctggtgtgtgttgcgggggtgggggccggtgaaagtgatttgatgtgcagaatattatttattacaaggtccttcttccccgtaaaactttgtccaagtacctcatgtacggtaatccgcccgtaaaatataaccctgcccaactggccaatcgctgatgccgcctcttcctctggacccacccgctgctactgagctgcccaatcagagccaagtctgctatccaggtgtcttggccagaggggggcatgtatatgggctcctgtgatgggcccccttttgcctccctgtcttgcttacatcagggggccaagaagaacactgttctggagagacttgtattgagcaagcaaaaaacatttggaaaggggtggacttgcatcatctccctacttgggacaccccaagaagagcttgtgccagtgctggggcgcctgcccacatgcccttgcccttttgaggactgtgggttgccttgtttgctacagactgttgggatccccatctagggcaccaagacctcctaaagtttgtgatcgcagtgccatgctgtaaaacactgagtgggaccctctacttaagctgtgacgactaggaaccgtgcagaggagtctagggtctgagcccctggggatttaatgctgatgacagcccagcccatgtgtcaccacttgctcatcagatggactttcctttggtccctgttgtccatggtgaagggcagcatgttggttgctccaacttctcctccatccctggaggcagggactcatttcatccacctgactggaaccactgtctcagctggagtccctgaggagatgccagccacaactctccgaagagaagtattctgaccttgctgctgaatgtctgccaggtcctggggtattcacctacccccaggctaccttcatcagaggctccatgatcccactcggtgagaggaccccctccccagttacaggcagaggagaaagggactctggagtcatcacctggattccaagtattgggtggtgttattgctgcagcttgccactggtggacatagggtcctgcctgcctctcacgataaaaggcaaggatcattcctgctactcacaggccatctcatcagggactgcaagatgatgtcccttcagggccaggactgatgtctctgcccctttcccccctctatccctcgctgagcctggccaccgccagtgaactgtcttgacatcatggaaactgggcagcgtccccccacacgtttccctcccgccccccctgcgcccctgggaggactctggcagtgccgtgctgactaccacgccgtgcgcccaccttttttgccaacccaaccccccaccaattgcacagcgcctagcagggagggctcattctgattggaccggcggttgactagatacagtccccacagtgaggtgcgattggctgaactgaagatcccaggtgtgagatggtacctggaacatttgtcatattcctagtttattttcttctttattttcttcttctttttttaatattttattttattttttttctatatctttattttttctgatttcttttatttatttatttggttcatgtttttcctgttttaattaagacctttttttttgttttgtttttctcactaacttacccatcgagagcggcccagctaggggtcaggctggcccttaacagagaccaaggagacttggttagacgacacaaacggggctgcgggtgggggtggatgggaaagggatttcatcacgaggtttctgccctaccctttagaagagtggtagagtggtcttagtttttccagaaataagcacctacacttgaaaatactctattccctttttctctctcacttttctcccccgccccccatagtctttcgtcattcacccactgagtgtttggggtagagacttgtcccaaagatgtcttctggtctttggcagagcccctaaggcttgagccctggttggagaggaaacagtaagactctgctggagctccctgcggtggctggaaagtctaaggatctccttggggacaatctgcccttcataaaaaccttcctttatcaaagacacctttgagttctttttgctagcacttggctcaagagcctcatctccagtgggtctggtgctgcccttttccacagtgtggtgggggtctgggcagtcttgacatgacagtctgctgtccaagcatctcaaagccattgtcagtgggcatcagtctggccattgaagaaaggagggttaccttgttgaagttgccatccaaagttggttttccttgtttcctcgagttagcaaggaaggacctgggaggactagatgacccagtttggggcacagtttgtttggcttggtgtcctctcgactcagacggtgaaagagggggtatgaccaacatctttagggggctgagaggctactgaactcctcttccagcttatttctggttaagctaatacacaggtgtgatacggagtagatgacttttccctgctctgatgtttagttttatttttttctctaacttgcattgattctgcttcgtttttgccgtttgccgcttctgttttggtctctgtctgtctctgtgtctctctctgtctctctctctcactctatctgtgtctttggaggctaagctaagactgccccatctaacctccttcccccctctctgtggggtgtctctctttctcttttttttcccctttttcttcttcatacagagctcgctgcccaaatcattcaagaggaagatctccgttgtctcagctaccaagggggtgccagctggaaacagtgacacagaggggggccagcctggtcggaaacgacgctggggagccagcacagccaccacacagaagaaaccttccatcagtatcaccactgaatcactaaagagcctcatccccgacatcaaacccctggcggggcaggaggctgttgtggatcttcatgctgatgactctcgcatctctgaggatgagacagagcgtaatggcgatgatgggacccatgacaaggggctgaaaatatgccggacagtcactcaggtagtacctgcagagggccaggagaatgggcagagggaagaagaggaagaagagaaggaacctgaagcagaacctcctgtacctccccaggtgtcagtagaggtggccttgcccccacctgcagagcatgaagtaaagaaagtgactttaggagataccttaactcgacgttccattagccagcagaagtccggagtttccattaccattgatgacccagtccgaactgcccaggtgccctccccaccccggggcaagattagcaacattgtccatatctccaatttggtaagtcattgtttctcaccatcccagcttgcttagtggttaagtttgagctttaggcttatgcctcctaggttccactcatagttgaactggtctaccaatagattaagttactcactgatcttgagtgagttacttaacatatttacccatctaaaaatgagggggaaaagctgttgccctgcagggttgttttgaggacttgcagaaggcctcacatacaacgtctcaattagtgctgggaagcaccaccactcttctcacattcttactgcaaggttcctaaactctctgccctcccccaaaccttgaaactatactcctgtgacagcagctcgggaaatctaaagattgggtggtggtcttgccttctgctagaccctgaaagtctattttcattggcaggtccgtcctttcactttaggccagctaaaggagttgttggggcgcacaggaaccttggtggaagaggccttctggattgacaagatcaaatctcattgctttgtaacgtactcaacagtagaggaagctgttgccacccgcacagctctgcacggggtcaaatggccccagtccaatcccaaattcctttgtgctgactatgccgagcaagatgagctggattatcaccgaggcctcttggtggaccgtccctctgaaactaagacagaggagcagggaataccacggcccctgcaccccccacccccacccccggtccagccaccacagcacccccgggcagagcagcgggagcaggaacgggcagtgcgggaacagtgggcagaacgggaacgggaaatggagcggcgggagcggactcgatcagagcgtgaatgggatcgggacaaagttcgagaagggccccgttcccgatcaaggtcccgtgaccgccgccgcaaggaacgtgcgaagtctaaagaaaagaagagtgagaagaaagagaaagcccaggaggaaccacctgccaagctgctggatgaccttttccgaaagaccaaggcagctccctgcatctattggctcccactgactgacagccagatcgttcagaaagaggcagagcgggccgaacgggccaaggagcgggagaagcggcgaaaggagcaagaagaagaagagcaaaaggagcgggagaaggaagccgagcgggaacggaaccgacagctggagcgagagaaacgtcgggagcacagtcgggagagggacagggagagagagagagaaagggagcgggacaggggggaccgagatcgggatagggaaagggaccgagaacgaggcagggaaagggatcgcagggacaccaagcgccacagcagaagccggagtcggagcacacctgtgcgggaccggggtgggcgccgctagctgggaaaacactagagctgcaggtaccagccactcggccccagggggttatggccacagagggataggcacagtctccaccaccctggagccaagggtctttcacatcacctatccctacatacataccaaatggaaaagtggccatccttttccccccaaacacacccccttaacctatctcttgggacttagcccgaccctccctctcatttcccattaagtctgagaggcaagagctaggttaggcaaggaggtggttggccagagatggggaacagccaggtgccccagtcctctgatttttcctccatcctgcttaccacctccctgggtacttacagccttctcttgggaacagccggggccaggactgggtcacctatgagctgaatcagcatctcctcctgagtcccagggcccctgcagttcccagtctcttctgtcctgcagcccttgcctctttcccacaggttccactttatatccaccttttccttttgttcaatttttatttttattttttttattattaaatgatgtggtctatggaaaaaaaaataaaaatctgacttagttttaaa

SEQ ID NO: 356103 - DNA, 9666 bp, Homo sapiens
  misc_feature (633)..(633): n is a, c, g, or t
  misc_feature (670)..(670): n is a, c, g, or t
  misc_feature (706)..(706): n is a, c, g, or t
  misc_feature (840)..(840): n is a, c, g, or t
gagacggagtcttgctctgtcacccaggctgtagtgcaatggcgtgatctcaaccactgcttcctgggttcaagcgattctcctgcctcagcctcccgagtagctgggactataggcgtacgccaccacgcccggctaatttgtttgtatttttagtagagacggggtttcaccatattggccagactggtctccaactcctgacctcaagtgatccgcccgcctcggcctcccaaagtgctgggattataggcgtaagccaccgcgcccggcaccttgccactgattttgcatcatgaatgcaacggaaagatcagccaatttgactttaatagttttcagtctcttaaatctctaacgtatctcttaaatctctaaactatttgtctgtgacctattttactgtttgtgtttcttctgcatcaagttggaggattggtagtgacaaagaaagaagcccctaaacaattaatattagttcaagtaccaaaaaagttcagggcgcttgcattttccagttcttgccctacaggaagcagttcctccaagggaacttactctcttctgcggagcaaggaagaactttcccagaatcttgccacatggcttccaaggcaaactcaaactcaagtncagcgtcatagatcagttcatagtctgggtccgaagncacggcgatgcttcttgcgcacccccacggagcttnttattccgattccgccagccccccgcccctccccaaaaaaagcctaagatgggagtggctatgattcagaggacagagggcagaagctgtttgcgttaaggagtggggggcttgccctattaaggtaatccgcnaacaccgagtctgacccggcccatagaggtacttctaccccgcttacctccccttttctctcgaagggcacccgaagattgtcacgagtccttagactccaactactgcggcagcttccaaatttcctgaaaaccctaagctgggccagcccggcagcccacgcacttccggcctcggacccgccccaaacacccaagcgccccagcgcctcatctctaggtccggaaataaacgaacatctccgattatggttataccagggtcgagggtttccgaatatattcgattcaaagcttcggcaagacgaagaaaaccgagcctgaaagcagggcgagaaaaggggcgctgcagggcggatggaaagaattgattggtaacgatgtggagacggaaacatccgaggacatccggaggaacccggggagttctgagtggtaatcgaggggtagagtatggcagtgggcggggtcatctcggtacgttcgaagggcgttggcggaaattaccgaagatgcccgaagccgtcgggacggacccgagtacctcacgcaagatggcggagctggaggaggtgactctggacgggaagcctcttcaggcgctgcgggtgaccgacctgaaggccgcactggagcagcgaggcctagccaagagcgggcagaagagtgccctggtcaagcggctcaaaggggctctaatgctagaaaatttacagaaacactcaacaccccatgctgcattccagccaaattcccagattggtgaggaaatgagccagaacagtttcataaaacagtatctggaaaagcagcaggagctacttaggcagcgtctggaacgtgaagctcgagaagctgcagaacttgaagaagcttcagctgagtcggaggacgagatgatccatcctgagggagtggcttccctgctgcctcctgactttcagagcagcctggagagaccagagctggagctcagcagacattcgcccagaaaaagctcctcaatttctgaagagaaaggtgactctgatgatgagaaaccaaggaaaggagaaagacgatcatctagggtcagacaggcaagagcagctaaactgtctgagggcagccaacctgctgaggaggaagaggatcaagaaacaccttccagaaacctaagggtcagagcagatcgaaatttgaaaacagaggaggaagaagaggaggaggaggaggaggaagaagatgatgaagaagaggaaggtgatgatgagggacaaaaatctagggaggcaccaatcctgaaagagtttaaggaagaaggggaagagatacctagagtaaaaccagaggagatgatggatgagagacccaaaacaagatcccaggaacaggaggtgttagagagaggagggagatttacaagatcccaggaagaggctagaaaaagtcatctggccagacagcagcaggagaaggaaatgaaaacaacatctccccttgaggaggaagaaagagaaataaaatcttcacaaggcttaaaggaaaaatcgaagtctccttcccctcctcgactgactgaagatcgaaagaaggcctcacttgtagcgctgccagagcaaactgccagcgaggaggagactcctccacctttactaacaaaggaagcatcttctccaccacctcatccacagctccatagcgaagaagaaatagagcccatggaaggcccagccccccctgtcctcattcagttatctcctcctaatacagatgctgacaccagggagctattagtatctcagcatactgtccagttggtaggaggcctgtctcctttgtcaagtccttcagacaccaaagcagaatctccagcagagaaagtgccagaggagagtgtcctgcctctggttcagaaaagcacactggctgactactcagcccagaaggatcttgaacctgagtcagacagatctgctcagcccctccctctaaaaattgaggaattagcactggccaaaggaatcactgaagaatgtctgaaacagccatctttggaacagaaggaaggcagaagagcttctcatacccttctcccaagccacagattgaaacagtcagctgattcatcctctagccggtcctcctcatcttcctcctccagttctagatcaagatctcgctctcctgacagttcaggttctcggtctcattcaccgctcagatccaagcagagagatgtagcccaggcacgtactcatgccaaccctcgtggtagacccaagatgggctccagatcaacatcagagtccagatcaaggtccgttcacgttcacgttctcgttcagcatcaagcaacagcagaaaatctctgagccctggagtctccagggacagcagcaccagctatactgaaaccaaagatccctcttctggtcaggaggttgcaactccaccagtgccacaactgcaggtctgtgagccaaaggagaggacttccacctcctcatcctctgtccaagcaaggcgtctgagtcagcctgaatcagctgaaaagcatgtgacccagaggttacagcctgagcgggggagcccaaagaagtgtgaagctgaagaggcagagccaccagctgccacacagccccaaacctcagagactcagacctctcatctgccagaatcagaaagaattcatcacactgttgaggagaaggaggaagtgaccatggacacaagtgaaaacagacctgaaaatgatgttccagaacctcccatgcctattgcagaccaagtcagcaatgatgaccgcccggagggcagtgttgaagatgaggagaagaaagaggtaaacatccaagccacctattggggcgggtgggcaggaatggacctaggggaaagagtagagcactctagtgatccctcttacacggtgggttaacttaaaggagggatgaggcagggacttggatcagaatagggccaagggagaattcgctggtttagcaagggagaccccttgtgacggggacagggctcattcattttcctttccttgttggggaagtagtgcccagactctagacgtttgtaactaacgggaaagtctgataatggccctttatctaagatttatgttcagcttttcctgctgtcttcccaagcttctcctggtggtaactcctttagctttccctcctttttaaaagcctgatggagcccaacgccatctagtggacattggtggttctcaccagaccagccatgctgagaaatttttgttcctcctctgccctccagtggtctgactgcagagatgtagctacttagaagccagcacttgtgatccggaaggcccattctcagttacctgtgacccctctacctccttttttggcatatgttatcttgtgtcctgcacccacttcagggggcttcccccatcagagccagcgaagtcttcttggctcttaaagtaattgagaaagaatgagctgggtttaggagaggggtaacaaggtgggagggactgttgtgtgtgtagcctttttctggtgtgtgttgcgggggtgggggccggtgaaagtgatttgatgtgcagaatattatttattacaaggtccttcttccccgtaaaactttgtccaagtacctcatgtacggtaatccgcccgtaaaatataaccctgcccaactggccaatcgctgatgccgcctcttcctctggacccacccgctgctactgagctgcccaatcagagccaagtctgctatccaggtgtcttggccagaggggggcatgtatatgggctcctgtgatgggcccccttttgcctccctgtcttgcttacatcagggggccaagaagaacactgttctggagagacttgtattgagcaagcaaaaaacatttggaaaggggtggacttgcatcatctccctacttgggacaccccaagaagagcttgtgccagtgctggggcgcctgcccacatgcccttgcccttttgaggactgtgggttgccttgtttgctacagactgttgggatccccatctagggcaccaagacctcctaaagtttgtgatcgcagtgccatgctgtaaaacactgagtgggaccctctacttaagctgtgacgactaggaaccgtgcagaggagtctagggtctgagcccctggggatttaatgctgatgacagcccagcccatgtgtcaccacttgctcatcagatggactttcctttggtccctgttgtccatggtgaagggcagcatgttggttgctccaacttctcctccatccctggaggcagggactcatttcatccacctgactggaaccactgtctcagctggagtccctgaggagatgccagccacaactctccgaagagaagtattctgaccttgctgctgaatgtctgccaggtcctggggtattcacctacccccaggctaccttcatcagaggctccatgatcccactcggtgagaggaccccctccccagttacaggcagaggagaaagggactctggagtcatcacctggattccaagtattgggtggtgttattgctgcagcttgccactggtggacatagggtcctgcctgcctctcacgataaaaggcaaggatcattcctgctactcacaggccatctcatcagggactgcaagatgatgtcccttcagggccaggactgatgtctctgcccctttcccccctctatccctcgctgagcctggccaccgccagtgaactgtcttgacatcatggaaactgggcagcgtccccccacacgtttccctcccgccccccctgcgcccctgggaggactctggcagtgccgtgctgactaccacgccgtgcgcccaccttttttgccaacccaaccccccaccaattgcacagcgcctagcagggagggctcattctgattggaccggcggttgactagatacagtccccacagtgaggtgcgattggctgaactgaagatcccaggtgtgagatggtacctggaacatttgtcatattcctagtttattttcttctttattttcttcttctttttttaatattttattttattttttttctatatctttattttttctgatttcttttatttatttatttggttcatgtttttcctgttttaattaagacctttttttttgttttgtttttctcactaacttacccatcgagagcggcccagctaggggtcaggctggcccttaacagagaccaaggagacttggttagacgacacaaacggggctgcgggtgggggtggatgggaaagggatttcatcacgaggtttctgccctaccctttagaagagtggtagagtggtcttagtttttccagaaataagcacctacacttgaaaatactctattccctttttctctctcacttttctcccccgccccccatagtctttcgtcattcacccactgagtgtttggggtagagacttgtcccaaagatgtcttctggtctttggcagagcccctaaggcttgagccctggttggagaggaaacagtaagactctgctggagctccctgcggtggctggaaagtctaaggatctccttggggacaatctgcccttcataaaaaccttcctttatcaaagacacctttgagttctttttgctagcacttggctcaagagcctcatctccagtgggtctggtgctgcccttttccacagtgtggtgggggtctgggcagtcttgacatgacagtctgctgtccaagcatctcaaagccattgtcagtgggcatcagtctggccattgaagaaaggagggttaccttgttgaagttgccatccaaagttggttttccttgtttcctcgagttagcaaggaaggacctgggaggactagatgacccagtttggggcacagtttgtttggcttggtgtcctctcgactcagacggtgaaagagggggtatgaccaacatctttagggggctgagaggctactgaactcctcttccagcttatttctggttaagctaatacacaggtgtgatacggagtagatgacttttccctgctctgatgtttagttttatttttttctctaacttgcattgattctgcttcgtttttgccgtttgccgcttctgttttggtctctgtctgtctctgtgtctctctctgtctctctctctcactctatctgtgtctttggaggctaagctaagactgccccatctaacctccttcccccctctctgtggggtgtctctctttctcttttttttcccctttttcttcttcatacagagctcgctgcccaaatcattcaagaggaagatctccgttgtctcagctaccaagggggtgccagctggaaacagtgacacagaggggggccagcctggtcggaaacgacgctggggagccagcacagccaccacacagaagaaaccttccatcagtatcaccactgaatcactaaagagcctcatccccgacatcaaacccctggcggggcaggaggctgttgtggatcttcatgctgatgactctcgcatctctgaggatgagacagagcgtaatggcgatgatgggacccatgacaaggggctgaaaatatgccggacagtcactcaggtagtacctgcagagggccaggagaatgggcagagggaagaagaggaagaagagaaggaacctgaagcagaacctcctgtacctccccaggtgtcagtagaggtggccttgcccccacctgcagagcatgaagtaaagaaaggtgagtgacatattgtgagagaaatgtaatgcggctccctgaattctcagagcacctcatttggatcgctgaaagctttgaatgtttcctgcctttcattatattttttcgtatatcatatctttctcctacatattaagtaagctacttgagggccagatttgactctgtttaatctttgaatctccatgatgaggaggttagcctagcacagtactttgcagattataggtgctctgcacgtttagattaaggagtggctgcttggtataaaagaaagggaaccgtgagagttacattgagggtgaaaagagccagtattgcttcctaccaaaagctgttcttgtggtcttcttgatagtgactttaggagataccttaactcgacgttccattagccagcagaagtccggagtttccattaccattgatgacccagtccgaactgcccaggtgccctccccaccccggggcaagattagcaacattgtccatatctccaatttggtccgtcctttcactttaggccagctaaaggagttgttggggcgcacaggaaccttggtggaagaggccttctggattgacaagatcaaatctcattgctttgtaacgtactcaacagtagaggaagctgttgccacccgcacagctctgcacggggtcaaatggccccagtccaatcccaaattcctttgtgctgactatgccgagcaagatgagctggattatcaccgaggcctcttggtggaccgtccctctgaaactaagacagaggagcagggaataccacggcccctgcaccccccacccccacccccggtccagccaccacagcacccccgggcagagcagcgggagcaggaacgggcagtgcgggaacagtgggcagaacgggaacgggaaatggagcggcgggagcggactcgatcagagcgtgaatgggatcgggacaaagttcgagaagggccccgttcccgatcaaggtcccgtgaccgccgccgcaaggaacgtgcgaagtctaaagaaaagaagagtgagaagaaagagaaagcccaggaggaaccacctgccaagctgctggatgaccttttccgaaagaccaaggcagctccctgcatctattggctcccactgactgacagccagatcgttcagaaagaggcagagcgggccgaacgggccaaggagcgggagaagcggcgaaaggagcaagaagaagaagagcaaaaggagcgggagaaggaagccgagcgggaacggaaccgacagctggagcgagagaaacgtcgggagcacagtcgggagagggacagggagagagagagagaaagggagcgggacaggggggaccgagatcgggatagggaaagggaccgagaacgaggcagggaaagggatcgcagggacaccaagcgccacagcagaagccggagtcggagcacacctgtgcgggaccggggtgggcgccgctagctgggaaaacactagagctgcaggtaccagccactcggccccagggggttatggccacagagggataggcacagtctccaccaccctggagccaagggtctttcacatcacctatccctacatacataccaaatggaaaagtggccatccttttccccccaaacacacccccttaacctatctcttgggacttagcccgaccctccctctcatttcccattaagtctgagaggcaagagctaggttaggcaaggaggtggttggccagagatggggaacagccaggtgccccagtcctctgatttttcctccatcctgcttaccacctccctgggtacttacagccttctcttgggaacagccggggccaggactgggtcacctatgagctgaatcagcatctcctcctgagtcccagggcccctgcagttcccagtctcttctgtcctgcagcccttgcctctttcccacaggttccactttatatccaccttttccttttgttcaatttttatttttattttttttattattaaatgatgtggtctatggaaaaaaaaataaaaatctgacttagttttaaa

SEQ ID NO: 356104 - DNA, 2807 bp, Homo sapiens
cctcccctgctgcagcaaggccctcccccatccgcacacacaggctgctgggtaagtggcaagatggctcccctgcatgtctccggctgatcgctgccgctccgccaatacaatagagccagccactaccagcagcctggccctcttcctccttctccagagagaccaatccagccgaactcggggtttgccgtgaggacttaacgcttatctcttaaaagccagatctgttttagcctccccgcaccaccaccacctccccttccatttaccattttttggatccccggttgctacatctcaattttctctctctggatcgggtggctggggaggaggtggtgggatcttggaacaaggaaggtgtggtttttttctttatttttttttaggattttttttgtttggtttttgttatttcttccattccagaaagggataaacagcacttccagggggagaaaaaaaatcatgttatcagaaagcaaagaaggtgaggagaaggaggaagtgaccatggacacaagtgaaaacagacctgaaaatgatgttccagaacctcccatgcctattgcagaccaagtcagcaatgatgaccgcccggagggcagtgttgaagatgaggagaagaaagagagctcgctgcccaaatcattcaagaggaagatctccgttgtctcagctaccaagggggtgccagctggaaacagtgacacagaggggggccagcctggtcggaaacgacgctggggagccagcacagccaccacacagaagaaaccttccatcagtatcaccactgaatcactaaagagcctcatccccgacatcaaacccctggcggggcaggaggctgttgtggatcttcatgctgatgactctcgcatctctgaggatgagacagagcgtaatggcgatgatgggacccatgacaaggggctgaaaatatgccggacagtcactcaggtagtacctgcagagggccaggagaatgggcagagggaagaagaggaagaagagaaggaacctgaagcagaacctcctgtacctccccaggtgtcagtagaggtggccttgcccccacctgcagagcatgaagtaaagaaagtgactttaggagataccttaactcgacgttccattagccagcagaagtccggagtttccattaccattgatgacccagtccgaactgcccaggtgccctccccaccccggggcaagattagcaacattgtccatatctccaatttggtccgtcctttcactttaggccagctaaaggagttgttggggcgcacaggaaccttggtggaagaggccttctggattgacaagatcaaatctcattgctttgtaacgtactcaacagtagaggaagctgttgccacccgcacagctctgcacggggtcaaatggccccagtccaatcccaaattcctttgtgctgactatgccgagcaagatgagctggattatcaccgaggcctcttggtggaccgtccctctgaaactaagacagaggagcagggaataccacggcccctgcaccccccacccccacccccggtccagccaccacagcacccccgggcagagcagcgggagcaggaacgggcagtgcgggaacagtgggcagaacgggaacgggaaatggagcggcgggagcggactcgatcagagcgtgaatgggatcgggacaaagttcgagaagggccccgttcccgatcaaggtcccgtgaccgccgccgcaaggaacgtgcgaagtctaaagaaaagaagagtgagaagaaagagaaagcccaggaggaaccacctgccaagctgctggatgaccttttccgaaagaccaaggcagctccctgcatctattggctcccactgactgacagccagatcgttcagaaagaggcagagcgggccgaacgggccaaggagcgggagaagcggcgaaaggagcaagaagaagaagagcaaaaggagcgggagaaggaagccgagcgggaacggaaccgacagctggagcgagagaaacgtcgggagcacagtcgggagagggacagggagagagagagagaaagggagcgggacaggggggaccgagatcgggatagggaaagggaccgagaacgaggcagggaaagggatcgcagggacaccaagcgccacagcagaagccggagtcggagcacacctgtgcgggaccggggtgggcgccgctagctgggaaaacactagagctgcaggtaccagccactcggccccagggggttatggccacagagggataggcacagtctccaccaccctggagccaagggtctttcacatcacctatccctacatacataccaaatggaaaagtggccatccttttccccccaaacacacccccttaacctatctcttgggacttagcccgaccctccctctcatttcccattaagtctgagaggcaagagctaggttaggcaaggaggtggttggccagagatggggaacagccaggtgccccagtcctctgatttttcctccatcctgcttaccacctccctgggtacttacagccttctcttgggaacagccggggccaggactgggtcacctatgagctgaatcagcatctcctcctgagtcccagggcccctgcagttcccagtctcttctgtcctgcagcccttgcctctttcccacaggttccactttatatccaccttttccttttgttcaatttttatttttattttttttattattaaatgatgtggtctatggaaaaaaaaataaaaatctgacttagttttaaa

SEQ ID NO: 356105 - DNA, 2426 bp, Homo sapiens
cctcccctgctgcagcaaggccctcccccatccgcacacacaggctgctggaaagggataaacagcacttccagggggagaaaaaaaatcatgttatcagaaagcaaagaaggtgaggagaaggaggaagtgaccatggacacaagtgaaaacagacctgaaaatgatgttccagaacctcccatgcctattgcagaccaagtcagcaatgatgaccgcccggagggcagtgttgaagatgaggagaagaaagagagctcgctgcccaaatcattcaagaggaagatctccgttgtctcagctaccaagggggtgccagctggaaacagtgacacagaggggggccagcctggtcggaaacgacgctggggagccagcacagccaccacacagaagaaaccttccatcagtatcaccactgaatcactaaagagcctcatccccgacatcaaacccctggcggggcaggaggctgttgtggatcttcatgctgatgactctcgcatctctgaggatgagacagagcgtaatggcgatgatgggacccatgacaaggggctgaaaatatgccggacagtcactcaggtagtacctgcagagggccaggagaatgggcagagggaagaagaggaagaagagaaggaacctgaagcagaacctcctgtacctccccaggtgtcagtagaggtggccttgcccccacctgcagagcatgaagtaaagaaagtgactttaggagataccttaactcgacgttccattagccagcagaagtccggagtttccattaccattgatgacccagtccgaactgcccaggtgccctccccaccccggggcaagattagcaacattgtccatatctccaatttggtccgtcctttcactttaggccagctaaaggagttgttggggcgcacaggaaccttggtggaagaggccttctggattgacaagatcaaatctcattgctttgtaacgtactcaacagtagaggaagctgttgccacccgcacagctctgcacggggtcaaatggccccagtccaatcccaaattcctttgtgctgactatgccgagcaagatgagctggattatcaccgaggcctcttggtggaccgtccctctgaaactaagacagaggagcagggaataccacggcccctgcaccccccacccccacccccggtccagccaccacagcacccccgggcagagcagcgggagcaggaacgggcagtgcgggaacagtgggcagaacgggaacgggaaatggagcggcgggagcggactcgatcagagcgtgaatgggatcgggacaaagttcgagaagggccccgttcccgatcaaggtcccgtgaccgccgccgcaaggaacgtgcgaagtctaaagaaaagaagagtgagaagaaagagaaagcccaggaggaaccacctgccaagctgctggatgaccttttccgaaagaccaaggcagctccctgcatctattggctcccactgactgacagccagatcgttcagaaagaggcagagcgggccgaacgggccaaggagcgggagaagcggcgaaaggagcaagaagaagaagagcaaaaggagcgggagaaggaagccgagcgggaacggaaccgacagctggagcgagagaaacgtcgggagcacagtcgggagagggacagggagagagagagagaaagggagcgggacaggggggaccgagatcgggatagggaaagggaccgagaacgaggcagggaaagggatcgcagggacaccaagcgccacagcagaagccggagtcggagcacacctgtgcgggaccggggtgggcgccgctagctgggaaaacactagagctgcaggtaccagccactcggccccagggggttatggccacagagggataggcacagtctccaccaccctggagccaagggtctttcacatcacctatccctacatacataccaaatggaaaagtggccatccttttccccccaaacacacccccttaacctatctcttgggacttagcccgaccctccctctcatttcccattaagtctgagaggcaagagctaggttaggcaaggaggtggttggccagagatggggaacagccaggtgccccagtcctctgatttttcctccatcctgcttaccacctccctgggtacttacagccttctcttgggaacagccggggccaggactgggtcacctatgagctgaatcagcatctcctcctgagtcccagggcccctgcagttcccagtctcttctgtcctgcagcccttgcctctttcccacaggttccactttatatccaccttttccttttgttcaatttttatttttattttttttattattaaatgatgtggtctatggaaaaaaaaataaaaatctgacttagttttaaa

SEQ ID NO: 356106 - DNA, 2376 bp, Homo sapiens
actagttctagatcgcgagctagaactagtcctgccagaatcagaaagaattcatcacactgttgaggagaaggaggaagtgaccatggacacaagtgaaaacagacctgaaaatgatgttccagaacctcccatgcctattgcagaccaagtcagcaatgatgaccgcccggagggcagtgttgaagatgaggagaagaaagagagctcgctgcccaaatcattcaagaggaagatctccgttgtctcagctaccaagggggtgccagctggaaacagtgacacagaggggggccagcctggtcggaaacgacgctggggagccagcacagccaccacacagaagaaaccttccatcagtatcaccactgaatcactaaagagcctcatccccgacatcaaacccctggcggggcaggaggctgttgtggatcttcatgctgatgactctcgcatctctgaggatgagacagagcgtaatggcgatgatgggacccatgacaaggggctgaaaatatgccggacagtcactcaggtagtacctgcagagggccaggagaatgggcagagggaagaagaggaagaagagaaggaacctgaagcagaacctcctgtacctccccaggtgtcagtagaggtggccttgcccccacctgcagagcatgaagtaaagaaagtgactttaggagataccttaactcgacgttccattagccagcagaagtccggagtttccattaccattgatgacccagtccgaactgcccaggtgccctccccaccccggggcaagattagcaacattgtccatatctccaatttggtccgtcctttcactttaggccagctaaaggagttgttggggcgcacaggaaccttggtggaagaggccttctggattgacaagatcaaatctcattgctttgtaacgtactcaacagtagaggaagctgttgccacccgcacagctctgcacggggtcaaatggccccagtccaatcccaaattcctttgtgctgactatgccgagcaagatgagctggattatcaccgaggcctcttggtggaccgtccctctgaaactaagacagaggagcagggaataccacggcccctgcaccccccacccccacccccggtccagccaccacagcacccccgggcagagcagcgggagcaggaacgggcagtgcgggaacagtgggcagaacgggaacgggaaatggagcggcgggagcggactcgatcagagcgtgaatgggatcgggacaaagttcgagaagggccccgttcccgatcaaggtcccgtgaccgccgccgcaaggaacgtgcgaagtctaaagaaaagaagagtgagaagaaagagaaagcccaggaggaaccacctgccaagctgctggatgaccttttccgaaagaccaaggcagctccctgcatctattggctcccactgactgacagccagatcgttcagaaagaggcagagcgggccgaacgggccaaggagcgggagaagcggcgaaaggagcaagaagaagaagagcaaaaggagcgggagaaggaagccgagcgggaacggaaccgacagctggagcgagagaaacgtcgggagcacagtcgggagagggacagggagagagagagagaaagggagcgggacaggggggaccgagatcgggatagggaaagggaccgagaacgaggcagggaaagggatcgcagggacaccaagcgccacagcagaagccggagtcggagcacacctgtgcgggaccggggtgggcgccgctagctgggaaaacactagagctgcaggtaccagccactcggccccagggggttatggccacagagggataggcacagtctccaccaccctggagccaagggtctttcacatcacctatccctacatacataccaaatggaaaagtggccatccttttccccccaaacacacccccttaacctatctcttgggacttagcccgaccctccctctcatttcccattaagtctgagaggcaagagctaggttaggcaaggaggtggttggccagagatggggaacagccaggtgccccagtcctctgatttttcctccatcctgcttaccacctccctgggtacttacagccttctcttgggaacagccggggccaggactgggtcacctatgagctgaatcagcatctcctcctgagtcccagggcccctgcagttcccagtctcttctgtcctgcagcccttgcctctttcccacaggttccactttatatccaccttttccttttgttcaatttttatttttattttttttattattaaatgatgtggtctatggaaaaaaaaataaaaatctgacttagttttaaa

SEQ ID NO: 356107 - DNA, 2273 bp, Homo sapiens
cctcccctgctgcagcaaggccctcccccatccgcacacacaggctgctgggtaagtggcaagatggctcccctgcatgtctccggctgatcgctgccgctccgccaatacaatagagccagccactaccagcagcctggccctcttcctccttctccagagagaccaatccagccgaactcggggtttgccgtgaggacttaacgcttatctcttaaaaccagcacagccaccacacagaagaaaccttccatcagtatcaccactgaatcactaaagagcctcatccccgacatcaaacccctggcggggcaggaggctgttgtggatcttcatgctgatgactctcgcatctctgaggatgagacagagcgtaatggcgatgatgggacccatgacaaggggctgaaaatatgccggacagtcactcaggtagtacctgcagagggccaggagaatgggcagagggaagaagaggaagaagagaaggaacctgaagcagaacctcctgtacctccccaggtgtcagtagaggtggccttgcccccacctgcagagcatgaagtaaagaaagtgactttaggagataccttaactcgacgttccattagccagcagaagtccggagtttccattaccattgatgacccagtccgaactgcccaggtgccctccccaccccggggcaagattagcaacattgtccatatctccaatttggtccgtcctttcactttaggccagctaaaggagttgttggggcgcacaggaaccttggtggaagaggccttctggattgacaagatcaaatctcattgctttgtaacgtactcaacagtagaggaagctgttgccacccgcacagctctgcacggggtcaaatggccccagtccaatcccaaattcctttgtgctgactatgccgagcaagatgagctggattatcaccgaggcctcttggtggaccgtccctctgaaactaagacagaggagcagggaataccacggcccctgcaccccccacccccacccccggtccagccaccacagcacccccgggcagagcagcgggagcaggaacgggcagtgcgggaacagtgggcagaacgggaacgggaaatggagcggcgggagcggactcgatcagagcgtgaatgggatcgggacaaagttcgagaagggccccgttcccgatcaaggtcccgtgaccgccgccgcaaggaacgtgcgaagtctaaagaaaagaagagtgagaagaaagagaaagcccaggaggaaccacctgccaagctgctggatgaccttttccgaaagaccaaggcagctccctgcatctattggctcccactgactgacagccagatcgttcagaaagaggcagagcgggccgaacgggccaaggagcgggagaagcggcgaaaggagcaagaagaagaagagcaaaaggagcgggagaaggaagccgagcgggaacggaaccgacagctggagcgagagaaacgtcgggagcacagtcgggagagggacagggagagagagagagaaagggagcgggacaggggggaccgagatcgggatagggaaagggaccgagaacgaggcagggaaagggatcgcagggacaccaagcgccacagcagaagccggagtcggagcacacctgtgcgggaccggggtgggcgccgctagctgggaaaacactagagctgcaggtaccagccactcggccccagggggttatggccacagagggataggcacagtctccaccaccctggagccaagggtctttcacatcacctatccctacatacataccaaatggaaaagtggccatccttttccccccaaacacacccccttaacctatctcttgggacttagcccgaccctccctctcatttcccattaagtctgagaggcaagagctaggttaggcaaggaggtggttggccagagatggggaacagccaggtgccccagtcctctgatttttcctccatcctgcttaccacctccctgggtacttacagccttctcttgggaacagccggggccaggactgggtcacctatgagctgaatcagcatctcctcctgagtcccagggcccctgcagttcccagtctcttctgtcctgcagcccttgcctctttcccacaggttccactttatatccaccttttccttttgttcaatttttatttttattttttttattattaaatgatgtggtctatggaaaaaaaaataaaaatctgacttagttttaaa

SEQ ID NO: 356108 - DNA, 1616 bp, Homo sapiens
ccgaataatcagctcagaacacccagcgtcagatccgactcctacatatgtatgaggatcacagtccgtcctttcactttaggccagctaaaggagttgttggggcgcacaggaaccttggtggaagaggccttctggattgacaagatcaaatctcattgctttgtaacgtactcaacagtagaggaagctgttgccacccgcacagctctgcacggggtcaaatggccccagtccaatcccaaattcctttgtgctgactatgccgagcaagatgagctggattatcaccgaggcctcttggtggaccgtccctctgaaactaagacagaggagcagggaataccacggcccctgcaccccccacccccacccccggtccagccaccacagcacccccgggcagagcagcgggagcaggaacgggcagtgcgggaacagtgggcagaacgggaacgggaaatggagcggcgggagcggactcgatcagagcgtgaatgggatcgggacaaagttcgagaagggccccgttcccgatcaaggtcccgtgaccgccgccgcaaggaacgtgcgaagtctaaagaaaagaagagtgagaagaaagagaaagcccaggaggaaccacctgccaagctgctggatgaccttttccgaaagaccaaggcagctccctgcatctattggctcccactgactgacagccagatcgttcagaaagaggcagagcgggccgaacgggccaaggagcgggagaagcggcgaaaggagcaagaagaagaagagcaaaaggagcgggagaaggaagccgagcgggaacggaaccgacagctggagcgagagaaacgtcgggagcacagtcgggagagggacagggagagagagagagaaagggagcgggacaggggggaccgagatcgggatagggaaagggaccgagaacgaggcagggaaagggatcgcagggacaccaagcgccacagcagaagccggagtcggagcacacctgtgcgggaccggggtgggcgccgctagctgggaaaacactagagctgcaggtaccagccactcggccccagggggttatggccacagagggataggcacagtctccaccaccctggagccaagggtctttcacatcacctatccctacatacataccaaatggaaaagtggccatccttttccccccaaacacacccccttaacctatctcttgggacttagcccgaccctccctctcatttcccattaagtctgagaggcaagagctaggttaggcaaggaggtggttggccagagatggggaacagccaggtgccccagtcctctgatttttcctccatcctgcttaccacctccctgggtacttacagccttctcttgggaacagccggggccaggactgggtcacctatgagctgaatcagcatctcctcctgagtcccagggcccctgcagttcccagtctcttctgtcctgcagcccttgcctctttcccacaggttccactttatatccaccttttccttttgttcaatttttatttttattttttttattattaaatgatgtggtctatggaaaaaaaaataaaaatctgacttagttttaaa

SEQ ID NO: 356109 - DNA, 1604 bp, Homo sapiens
gccattctcctgcctcagcctcccgaatagctgggactacaggcgcccgcaccacgcccggctaatttttttgtattttcagtagagacggggtttcactgtgtcagccaggatggtctcggtctcctgacctcgtgatctgaccgccttggcctcccaaagtgctgggattacaggcgtgacccaccgcgcccggccatcctggctccttgagtgggagtgatatcacctctatcctaactgtccttgtccctcctctccccacagctggattatcaccgaggcctcttggtggaccgtccctctgaaactaagacagaggagcagggaataccacggcccctgcaccccccacccccacccccggtccagccaccacagcacccccgggcagagcagcgggagcaggaacgggcagtgcgggaacagtgggcagaacgggaacgggaaatggagcggcgggagcggactcgatcagagcgtgaatgggatcgggacaaagttcgagaagggccccgttcccgatcaaggtcccgtgaccgccgccgcaaggaacgtgcgaagtctaaagaaaagaagagtgagaagaaagagaaagcccaggaggaaccacctgccaagctgctggatgaccttttccgaaagaccaaggcagctccctgcatctattggctcccactgactgacagccagatcgttcagaaagaggcagagcgggccgaacgggccaaggagcgggagaagcggcgaaaggagcaagaagaagaagagcaaaaggagcgggagaaggaagccgagcgggaacggaaccgacagctggagcgagagaaacgtcgggagcacagtcgggagagggacagggagagagagagagaaagggagcgggacaggggggaccgagatcgggatagggaaagggaccgagaacgaggcagggaaagggatcgcagggacaccaagcgccacagcagaagccggagtcggagcacacctgtgcgggaccggggtgggcgccgctagctgggaaaacactagagctgcaggtaccagccactcggccccagggggttatggccacagagggataggcacagtctccaccaccctggagccaagggtctttcacatcacctatccctacatacataccaaatggaaaagtggccatccttttccccccaaacacacccccttaacctatctcttgggacttagcccgaccctccctctcatttcccattaagtctgagaggcaagagctaggttaggcaaggaggtggttggccagagatggggaacagccaggtgccccagtcctctgatttttcctccatcctgcttaccacctccctgggtacttacagccttctcttgggaacagccggggccaggactgggtcacctatgagctgaatcagcatctcctcctgagtcccagggcccctgcagttcccagtctcttctgtcctgcagcccttgcctctttcccacaggttccactttatatccaccttttccttttgttcaatttttatttttattttttttattattaaatgatgtggtctatggaaaaaaaaataaaaatctgacttagttttaaa

SEQ ID NO: 356110 - DNA, 9068 bp, Homo sapiens
  misc_feature (633)..(633): n is a, c, g, or t
  misc_feature (670)..(670): n is a, c, g, or t
  misc_feature (706)..(706): n is a, c, g, or t
  misc_feature (840)..(840): n is a, c, g, or t
gagacggagtcttgctctgtcacccaggctgtagtgcaatggcgtgatctcaaccactgcttcctgggttcaagcgattctcctgcctcagcctcccgagtagctgggactataggcgtacgccaccacgcccggctaatttgtttgtatttttagtagagacggggtttcaccatattggccagactggtctccaactcctgacctcaagtgatccgcccgcctcggcctcccaaagtgctgggattataggcgtaagccaccgcgcccggcaccttgccactgattttgcatcatgaatgcaacggaaagatcagccaatttgactttaatagttttcagtctcttaaatctctaacgtatctcttaaatctctaaactatttgtctgtgacctattttactgtttgtgtttcttctgcatcaagttggaggattggtagtgacaaagaaagaagcccctaaacaattaatattagttcaagtaccaaaaaagttcagggcgcttgcattttccagttcttgccctacaggaagcagttcctccaagggaacttactctcttctgcggagcaaggaagaactttcccagaatcttgccacatggcttccaaggcaaactcaaactcaagtncagcgtcatagatcagttcatagtctgggtccgaagncacggcgatgcttcttgcgcacccccacggagcttnttattccgattccgccagccccccgcccctccccaaaaaaagcctaagatgggagtggctatgattcagaggacagagggcagaagctgtttgcgttaaggagtggggggcttgccctattaaggtaatccgcnaacaccgagtctgacccggcccatagaggtacttctaccccgcttacctccccttttctctcgaagggcacccgaagattgtcacgagtccttagactccaactactgcggcagcttccaaatttcctgaaaaccctaagctgggccagcccggcagcccacgcacttccggcctcggacccgccccaaacacccaagcgccccagcgcctcatctctaggtccggaaataaacgaacatctccgattatggttataccagggtcgagggtttccgaatatattcgattcaaagcttcggcaagacgaagaaaaccgagcctgaaagcagggcgagaaaaggggcgctgcagggcggatggaaagaattgattggtaacgatgtggagacggaaacatccgaggacatccggaggaacccggggagttctgagtggtaatcgaggggtagagtatggcagtgggcggggtcatctcggtacgttcgaagggcgttggcggaaattaccgaagatgcccgaagccgtcgggacggacccgagtacctcacgcaagatggcggagctggaggaggtgactctggacgggaagcctcttcaggcgctgcgggtgaccgacctgaaggccgcactggagcagcgaggcctagccaagagcgggcagaagagtgccctggtcaagcggctcaaaggggctctaatgctagaaaatttacagaaacactcaacaccccatgctgcattccagccaaattcccagattggtgaggaaatgagccagaacagtttcataaaacagtatctggaaaagcagcaggagctacttaggcagcgtctggaacgtgaagctcgagaagctgcagaacttgaagaagcttcagctgagtcggaggacgagatgatccatcctgagggagtggcttccctgctgcctcctgactttcagagcagcctggagagaccagagctggagctcagcagacattcgcccagaaaaagctcctcaatttctgaagagaaaggtgactctgatgatgagaaaccaaggaaaggagaaagacgatcatctagggtcagacaggcaagagcagctaaactgtctgagggcagccaacctgctgaggaggaagaggatcaagaaacaccttccagaaacctaagggtcagagcagatcgaaatttgaaaacagaggaggaagaagaggaggaggaggaggaggaagaagatgatgaagaagaggaaggtgatgatgagggacaaaaatctagggaggcaccaatcctgaaagagtttaaggaagaaggggaagagatacctagagtaaaaccagaggagatgatggatgagagacccaaaacaagatcccaggaacaggaggtgttagagagaggagggagatttacaagatcccaggaagaggctagaaaaagtcatctggccagacagcagcaggagaaggaaatgaaaacaacatctccccttgaggaggaagaaagagaaataaaatcttcacaaggcttaaaggaaaaatcgaagtctccttcccctcctcgactgactgaagatcgaaagaaggcctcacttgtagcgctgccagagcaaactgccagcgaggaggagactcctccacctttactaacaaaggaagcatcttctccaccacctcatccacagctccatagcgaagaagaaatagagcccatggaaggcccagccccccctgtcctcattcagttatctcctcctaatacagatgctgacaccagggagctattagtatctcagcatactgtccagttggtaggaggcctgtctcctttgtcaagtccttcagacaccaaagcagaatctccagcagagaaagtgccagaggagagtgtcctgcctctggttcagaaaagcacactggctgactactcagcccagaaggatcttgaacctgagtcagacagatctgctcagcccctccctctaaaaattgaggaattagcactggccaaaggaatcactgaagaatgtctgaaacagccatctttggaacagaaggaaggcagaagagcttctcatacccttctcccaagccacagattgaaacagtcagctgattcatcctctagccggtcctcctcatcttcctcctccagttctagatcaagatctcgctctcctgacagttcaggttctcggtctcattcaccgctcagatccaagcagagagatgtagcccaggcacgtactcatgccaaccctcgtggtagacccaagatgggctccagatcaacatcagagtccagatcaaggtccgttcacgttcacgttctcgttcagcatcaagcaacagcagaaaatctctgagccctggagtctccagggacagcagcaccagctatactgaaaccaaagatccctcttctggtcaggaggttgcaactccaccagtgccacaactgcaggtctgtgagccaaaggagaggacttccacctcctcatcctctgtccaagcaaggcgtctgagtcagcctgaatcagctgaaaagcatgtgacccagaggttacagcctgagcgggggagcccaaagaagtgtgaagctgaagaggcagagccaccagctgccacacagccccaaacctcagagactcagacctctcatctgccagaatcagaaagaattcatcacactgttgaggagaaggaggaagtgaccatggacacaagtgaaaacagacctgaaaatgatgttccagaacctcccatgcctattgcagaccaagtcagcaatgatgaccgcccggagggcagtgttgaagatgaggagaagaaagaggtaaacatccaagccacctattggggcgggtgggcaggaatggacctaggggaaagagtagagcactctagtgatccctcttacacggtgggttaacttaaaggagggatgaggcagggacttggatcagaatagggccaagggagaattcgctggtttagcaagggagaccccttgtgacggggacagggctcattcattttcctttccttgttggggaagtagtgcccagactctagacgtttgtaactaacgggaaagtctgataatggccctttatctaagatttatgttcagcttttcctgctgtcttcccaagcttctcctggtggtaactcctttagctttccctcctttttaaaagcctgatggagcccaacgccatctagtggacattggtggttctcaccagaccagccatgctgagaaatttttgttcctcctctgccctccagtggtctgactgcagagatgtagctacttagaagccagcacttgtgatccggaaggcccattctcagttacctgtgacccctctacctccttttttggcatatgttatcttgtgtcctgcacccacttcagggggcttcccccatcagagccagcgaagtcttcttggctcttaaagtaattgagaaagaatgagctgggtttaggagaggggtaacaaggtgggagggactgttgtgtgtgtagcctttttctggtgtgtgttgcgggggtgggggccggtgaaagtgatttgatgtgcagaatattatttattacaaggtccttcttccccgtaaaactttgtccaagtacctcatgtacggtaatccgcccgtaaaatataaccctgcccaactggccaatcgctgatgccgcctcttcctctggacccacccgctgctactgagctgcccaatcagagccaagtctgctatccaggtgtcttggccagaggggggcatgtatatgggctcctgtgatgggcccccttttgcctccctgtcttgcttacatcagggggccaagaagaacactgttctggagagacttgtattgagcaagcaaaaaacatttggaaaggggtggacttgcatcatctccctacttgggacaccccaagaagagcttgtgccagtgctggggcgcctgcccacatgcccttgcccttttgaggactgtgggttgccttgtttgctacagactgttgggatccccatctagggcaccaagacctcctaaagtttgtgatcgcagtgccatgctgtaaaacactgagtgggaccctctacttaagctgtgacgactaggaaccgtgcagaggagtctagggtctgagcccctggggatttaatgctgatgacagcccagcccatgtgtcaccacttgctcatcagatggactttcctttggtccctgttgtccatggtgaagggcagcatgttggttgctccaacttctcctccatccctggaggcagggactcatttcatccacctgactggaaccactgtctcagctggagtccctgaggagatgccagccacaactctccgaagagaagtattctgaccttgctgctgaatgtctgccaggtcctggggtattcacctacccccaggctaccttcatcagaggctccatgatcccactcggtgagaggaccccctccccagttacaggcagaggagaaagggactctggagtcatcacctggattccaagtattgggtggtgttattgctgcagcttgccactggtggacatagggtcctgcctgcctctcacgataaaaggcaaggatcattcctgctactcacaggccatctcatcagggactgcaagatgatgtcccttcagggccaggactgatgtctctgcccctttcccccctctatccctcgctgagcctggccaccgccagtgaactgtcttgacatcatggaaactgggcagcgtccccccacacgtttccctcccgccccccctgcgcccctgggaggactctggcagtgccgtgctgactaccacgccgtgcgcccaccttttttgccaacccaaccccccaccaattgcacagcgcctagcagggagggctcattctgattggaccggcggttgactagatacagtccccacagtgaggtgcgattggctgaactgaagatcccaggtgtgagatggtacctggaacatttgtcatattcctagtttattttcttctttattttcttcttctttttttaatattttattttattttttttctatatctttattttttctgatttcttttatttatttatttggttcatgtttttcctgttttaattaagacctttttttttgttttgtttttctcactaacttacccatcgagagcggcccagctaggggtcaggctggcccttaacagagaccaaggagacttggttagacgacacaaacggggctgcgggtgggggtggatgggaaagggatttcatcacgaggtttctgccctaccctttagaagagtggtagagtggtcttagtttttccagaaataagcacctacacttgaaaatactctattccctttttctctctcacttttctcccccgccccccatagtctttcgtcattcacccactgagtgtttggggtagagacttgtcccaaagatgtcttctggtctttggcagagcccctaaggcttgagccctggttggagaggaaacagtaagactctgctggagctccctgcggtggctggaaagtctaaggatctccttggggacaatctgcccttcataaaaaccttcctttatcaaagacacctttgagttctttttgctagcacttggctcaagagcctcatctccagtgggtctggtgctgcccttttccacagtgtggtgggggtctgggcagtcttgacatgacagtctgctgtccaagcatctcaaagccattgtcagtgggcatcagtctggccattgaagaaaggagggttaccttgttgaagttgccatccaaagttggttttccttgtttcctcgagttagcaaggaaggacctgggaggactagatgacccagtttggggcacagtttgtttggcttggtgtcctctcgactcagacggtgaaagagggggtatgaccaacatctttagggggctgagaggctactgaactcctcttccagcttatttctggttaagctaatacacaggtgtgatacggagtagatgacttttccctgctctgatgtttagttttatttttttctctaacttgcattgattctgcttcgtttttgccgtttgccgcttctgttttggtctctgtctgtctctgtgtctctctctgtctctctctctcactctatctgtgtctttggaggctaagctaagactgccccatctaacctccttcccccctctctgtggggtgtctctctttctcttttttttcccctttttcttcttcatacagagctcgctgcccaaatcattcaagaggaagatctccgttgtctcagctaccaagggggtgccagctggaaacagtgacacagaggggggccagcctggtcggaaacgacgctggggagccagcacagccaccacacagaagaaaccttccatcagtatcaccactgaatcactaaagagcctcatccccgacatcaaacccctggcggggcaggaggctgttgtggatcttcatgctgatgactctcgcatctctgaggatgagacagagcgtaatggcgatgatgggacccatgacaaggggctgaaaatatgccggacagtcactcaggtagtacctgcagagggccaggagaatgggcagagggaagaagaggaagaagagaaggaacctgaagcagaacctcctgtacctccccaggtgtcagtagaggtggccttgcccccacctgcagagcatgaagtaaagaaagtgactttaggagataccttaactcgacgttccattagccagcagaagtccggagtttccattaccattgatgacccagtccgaactgcccaggtgccctccccaccccggggcaagattagcaacattgtccatatctccaatttggtccgtcctttcactttaggccagctaaaggagttgttggggcgcacaggaaccttggtggaagaggccttctggattgacaagatcaaatctcattgctttgtaacgtactcaacagtagaggaagctgttgccacccgcacagctctgcacggggtcaaatggccccagtccaatcccaaattcctttgtgctgactatgccgagcaagatgagctggattatcaccgaggcctcttggtggaccgtccctctgaaactaagacagaggagcagggaataccacggcccctgcaccccccacccccacccccggtccagccaccacagcacccccgggcagagcagcgggagcaggaacgggcagtgcgggaacagtgggcagaacgggaacgggaaatggagcggcgggagcggactcgatcagagcgtgaatgggatcgggacaaagttcgagaagggccccgttcccgatcaaggtcccgtgaccgccgccgcaaggaacgtgcgaagtctaaagaaaagaagagtgagaagaaagagaaagcccaggaggaaccacctgccaagctgctggatgaccttttccgaaagaccaaggcagctccctgcatctattggctcccactgactgacagccagatcgttcagaaagaggcagagcgggccgaacgggccaaggagcgggagaagcggcgaaaggagcaagaagaagaagagcaaaaggagcgggagaaggaagccgagcgggaacggaaccgacagctggagcgagagaaacgtcgggagcacagtcgggagagggacagggagagagagagagaaagggagcgggacaggggggaccgagatcgggatagggaaagggaccgagaacgaggcagggaaagggatcgcagggacaccaagcgccacagcagaagccggagtcggagcacacctgtgcgggaccggggtgggcgccgctagctgggaaaacactagagctgcaggtaccagccactcggccccagggggttatggccacagagggataggcacagtctccaccaccctggagccaagggtctttcacatcacctatccctacatacataccaaatggaaaagtggccatccttttccccccaaacacacccccttaacctatctcttgggacttagcccgaccctccctctcatttcccattaagtctgagaggcaagagctaggttaggcaaggaggtggttggccagagatggggaacagccaggtgccccagtcctctgatttttcctccatcctgcgacctatgagggatcctctagatcgccc

SEQ ID NO: 356111 - DNA, 8731 bp, Homo sapiens
  misc_feature (633)..(633): n is a, c, g, or t
  misc_feature (670)..(670): n is a, c, g, or t
  misc_feature (706)..(706): n is a, c, g, or t
  misc_feature (840)..(840): n is a, c, g, or t
gagacggagtcttgctctgtcacccaggctgtagtgcaatggcgtgatctcaaccactgcttcctgggttcaagcgattctcctgcctcagcctcccgagtagctgggactataggcgtacgccaccacgcccggctaatttgtttgtatttttagtagagacggggtttcaccatattggccagactggtctccaactcctgacctcaagtgatccgcccgcctcggcctcccaaagtgctgggattataggcgtaagccaccgcgcccggcaccttgccactgattttgcatcatgaatgcaacggaaagatcagccaatttgactttaatagttttcagtctcttaaatctctaacgtatctcttaaatctctaaactatttgtctgtgacctattttactgtttgtgtttcttctgcatcaagttggaggattggtagtgacaaagaaagaagcccctaaacaattaatattagttcaagtaccaaaaaagttcagggcgcttgcattttccagttcttgccctacaggaagcagttcctccaagggaacttactctcttctgcggagcaaggaagaactttcccagaatcttgccacatggcttccaaggcaaactcaaactcaagtncagcgtcatagatcagttcatagtctgggtccgaagncacggcgatgcttcttgcgcacccccacggagcttnttattccgattccgccagccccccgcccctccccaaaaaaagcctaagatgggagtggctatgattcagaggacagagggcagaagctgtttgcgttaaggagtggggggcttgccctattaaggtaatccgcnaacaccgagtctgacccggcccatagaggtacttctaccccgcttacctccccttttctctcgaagggcacccgaagattgtcacgagtccttagactccaactactgcggcagcttccaaatttcctgaaaaccctaagctgggccagcccggcagcccacgcacttccggcctcggacccgccccaaacacccaagcgccccagcgcctcatctctaggtccggaaataaacgaacatctccgattatggttataccagggtcgagggtttccgaatatattcgattcaaagcttcggcaagacgaagaaaaccgagcctgaaagcagggcgagaaaaggggcgctgcagggcggatggaaagaattgattggtaacgatgtggagacggaaacatccgaggacatccggaggaacccggggagttctgagtggtaatcgaggggtagagtatggcagtgggcggggtcatctcggtacgttcgaagggcgttggcggaaattaccgaagatgcccgaagccgtcgggacggacccgagtacctcacgcaagatggcggagctggaggaggtgactctggacgggaagcctcttcaggcgctgcgggtgaccgacctgaaggccgcactggagcagcgaggcctagccaagagcgggcagaagagtgccctggtcaagcggctcaaaggggctctaatgctagaaaatttacagaaacactcaacaccccatgctgcattccagccaaattcccagattggtgaggaaatgagccagaacagtttcataaaacagtatctggaaaagcagcaggagctacttaggcagcgtctggaacgtgaagctcgagaagctgcagaacttgaagaagcttcagctgagtcggaggacgagatgatccatcctgagggagtggcttccctgctgcctcctgactttcagagcagcctggagagaccagagctggagctcagcagacattcgcccagaaaaagctcctcaatttctgaagagaaaggtgactctgatgatgagaaaccaaggaaaggagaaagacgatcatctagggtcagacaggcaagagcagctaaactgtctgagggcagccaacctgctgaggaggaagaggatcaagaaacaccttccagaaacctaagggtcagagcagatcgaaatttgaaaacagaggaggaagaagaggaggaggaggaggaggaagaagatgatgaagaagaggaaggtgatgatgagggacaaaaatctagggaggcaccaatcctgaaagagtttaaggaagaaggggaagagatacctagagtaaaaccagaggagatgatggatgagagacccaaaacaagatcccaggaacaggaggtgttagagagaggagggagatttacaagatcccaggaagaggctagaaaaagtcatctggccagacagcagcaggagaaggaaatgaaaacaacatctccccttgaggaggaagaaagagaaataaaatcttcacaaggcttaaaggaaaaatcgaagtctccttcccctcctcgactgactgaagatcgaaagaaggcctcacttgtagcgctgccagagcaaactgccagcgaggaggagactcctccacctttactaacaaaggaagcatcttctccaccacctcatccacagctccatagcgaagaagaaatagagcccatggaaggcccagccccccctgtcctcattcagttatctcctcctaatacagatgctgacaccagggagctattagtatctcagcatactgtccagttggtaggaggcctgtctcctttgtcaagtccttcagacaccaaagcagaatctccagcagagaaagtgccagaggagagtgtcctgcctctggttcagaaaagcacactggctgactactcagcccagaaggatcttgaacctgagtcagacagatctgctcagcccctccctctaaaaattgaggaattagcactggccaaaggaatcactgaagaatgtctgaaacagccatctttggaacagaaggaaggcagaagagcttctcatacccttctcccaagccacagattgaaacagtcagctgattcatcctctagccggtcctcctcatcttcctcctccagttctagatcaagatctcgctctcctgacagttcaggttctcggtctcattcaccgctcagatccaagcagagagatgtagcccaggcacgtactcatgccaaccctcgtggtagacccaagatgggctccagatcaacatcagagtccagatcaaggtccgttcacgttcacgttctcgttcagcatcaagcaacagcagaaaatctctgagccctggagtctccagggacagcagcaccagctatactgaaaccaaagatccctcttctggtcaggaggttgcaactccaccagtgccacaactgcaggtctgtgagccaaaggagaggacttccacctcctcatcctctgtccaagcaaggcgtctgagtcagcctgaatcagctgaaaagcatgtgacccagaggttacagcctgagcgggggagcccaaagaagtgtgaagctgaagaggcagagccaccagctgccacacagccccaaacctcagagactcagacctctcatctgccagaatcagaaagaattcatcacactgttgaggagaaggaggaagtgaccatggacacaagtgaaaacagacctgaaaatgatgttccagaacctcccatgcctattgcagaccaagtcagcaatgatgaccgcccggagggcagtgttgaagatgaggagaagaaagaggtaaacatccaagccacctattggggcgggtgggcaggaatggacctaggggaaagagtagagcactctagtgatccctcttacacggtgggttaacttaaaggagggatgaggcagggacttggatcagaatagggccaagggagaattcgctggtttagcaagggagaccccttgtgacggggacagggctcattcattttcctttccttgttggggaagtagtgcccagactctagacgtttgtaactaacgggaaagtctgataatggccctttatctaagatttatgttcagcttttcctgctgtcttcccaagcttctcctggtggtaactcctttagctttccctcctttttaaaagcctgatggagcccaacgccatctagtggacattggtggttctcaccagaccagccatgctgagaaatttttgttcctcctctgccctccagtggtctgactgcagagatgtagctacttagaagccagcacttgtgatccggaaggcccattctcagttacctgtgacccctctacctccttttttggcatatgttatcttgtgtcctgcacccacttcagggggcttcccccatcagagccagcgaagtcttcttggctcttaaagtaattgagaaagaatgagctgggtttaggagaggggtaacaaggtgggagggactgttgtgtgtgtagcctttttctggtgtgtgttgcgggggtgggggccggtgaaagtgatttgatgtgcagaatattatttattacaaggtccttcttccccgtaaaactttgtccaagtacctcatgtacggtaatccgcccgtaaaatataaccctgcccaactggccaatcgctgatgccgcctcttcctctggacccacccgctgctactgagctgcccaatcagagccaagtctgctatccaggtgtcttggccagaggggggcatgtatatgggctcctgtgatgggcccccttttgcctccctgtcttgcttacatcagggggccaagaagaacactgttctggagagacttgtattgagcaagcaaaaaacatttggaaaggggtggacttgcatcatctccctacttgggacaccccaagaagagcttgtgccagtgctggggcgcctgcccacatgcccttgcccttttgaggactgtgggttgccttgtttgctacagactgttgggatccccatctagggcaccaagacctcctaaagtttgtgatcgcagtgccatgctgtaaaacactgagtgggaccctctacttaagctgtgacgactaggaaccgtgcagaggagtctagggtctgagcccctggggatttaatgctgatgacagcccagcccatgtgtcaccacttgctcatcagatggactttcctttggtccctgttgtccatggtgaagggcagcatgttggttgctccaacttctcctccatccctggaggcagggactcatttcatccacctgactggaaccactgtctcagctggagtccctgaggagatgccagccacaactctccgaagagaagtattctgaccttgctgctgaatgtctgccaggtcctggggtattcacctacccccaggctaccttcatcagaggctccatgatcccactcggtgagaggaccccctccccagttacaggcagaggagaaagggactctggagtcatcacctggattccaagtattgggtggtgttattgctgcagcttgccactggtggacatagggtcctgcctgcctctcacgataaaaggcaaggatcattcctgctactcacaggccatctcatcagggactgcaagatgatgtcccttcagggccaggactgatgtctctgcccctttcccccctctatccctcgctgagcctggccaccgccagtgaactgtcttgacatcatggaaactgggcagcgtccccccacacgtttccctcccgccccccctgcgcccctgggaggactctggcagtgccgtgctgactaccacgccgtgcgcccaccttttttgccaacccaaccccccaccaattgcacagcgcctagcagggagggctcattctgattggaccggcggttgactagatacagtccccacagtgaggtgcgattggctgaactgaagatcccaggtgtgagatggtacctggaacatttgtcatattcctagtttattttcttctttattttcttcttctttttttaatattttattttattttttttctatatctttattttttctgatttcttttatttatttatttggttcatgtttttcctgttttaattaagacctttttttttgttttgtttttctcactaacttacccatcgagagcggcccagctaggggtcaggctggcccttaacagagaccaaggagacttggttagacgacacaaacggggctgcgggtgggggtggatgggaaagggatttcatcacgaggtttctgccctaccctttagaagagtggtagagtggtcttagtttttccagaaataagcacctacacttgaaaatactctattccctttttctctctcacttttctcccccgccccccatagtctttcgtcattcacccactgagtgtttggggtagagacttgtcccaaagatgtcttctggtctttggcagagcccctaaggcttgagccctggttggagaggaaacagtaagactctgctggagctccctgcggtggctggaaagtctaaggatctccttggggacaatctgcccttcataaaaaccttcctttatcaaagacacctttgagttctttttgctagcacttggctcaagagcctcatctccagtgggtctggtgctgcccttttccacagtgtggtgggggtctgggcagtcttgacatgacagtctgctgtccaagcatctcaaagccattgtcagtgggcatcagtctggccattgaagaaaggagggttaccttgttgaagttgccatccaaagttggttttccttgtttcctcgagttagcaaggaaggacctgggaggactagatgacccagtttggggcacagtttgtttggcttggtgtcctctcgactcagacggtgaaagagggggtatgaccaacatctttagggggctgagaggctactgaactcctcttccagcttatttctggttaagctaatacacaggtgtgatacggagtagatgacttttccctgctctgatgtttagttttatttttttctctaacttgcattgattctgcttcgtttttgccgtttgccgcttctgttttggtctctgtctgtctctgtgtctctctctgtctctctctctcactctatctgtgtctttggaggctaagctaagactgccccatctaacctccttcccccctctctgtggggtgtctctctttctcttttttttcccctttttcttcttcatacagagctcgctgcccaaatcattcaagaggaagatctccgttgtctcagctaccaagggggtgccagctggaaacagtgacacagaggggggccagcctggtcggaaacgacgctggggagccagcacagccaccacacagaagaaaccttccatcagtatcaccactgaatcactaaagagcctcatccccgacatcaaacccctggcggggcaggaggctgttgtggatcttcatgctgatgactctcgcatctctgaggatgagacagagcgtaatggcgatgatgggacccatgacaaggggctgaaaatatgccggacagtcactcaggtagtacctgcagagggccaggagaatgggcagagggaagaagaggaagaagagaaggaacctgaagcagaacctcctgtacctccccaggtgtcagtagaggtggccttgcccccacctgcagagcatgaagtaaagaaagtgactttaggagataccttaactcgacgttccattagccagcagaagtccggagtttccattaccattgatgacccagtccgaactgcccaggtgccctccccaccccggggcaagattagcaacattgtccatatctccaatttggtccgtcctttcactttaggccagctaaaggagttgttggggcgcacaggaaccttggtggaagaggccttctggattgacaagatcaaatctcattgctttgtaacgtactcaacagtagaggaagctgttgccacccgcacagctctgcacggggtcaaatggccccagtccaatcccaaattcctttgtgctgactatgccgagcaagatgagctggattatcaccgaggcctcttggtggaccgtccctctgaaactaagacagaggagcagggaataccacggcccctgcaccccccacccccacccccggtccagccaccacagcacccccgggcagagcagcgggagcaggaacgggcagtgcgggaacagtgggcagaacgggaacgggaaatggagcggcgggagcggactcgatcagagcgtgaatgggatcgggacaaagttcgagaagggccccgttcccgatcaaggtcccgtgaccgccgccgcaaggaacgtgcgaagtctaaagaaaagaagagtgagaagaaagagaaagcccaggaggaaccacctgccaagctgctggatgaccttttccgaaagaccaaggcagctccctgcatctattggctcccactgactgacagccagatcgttcagaaagaggcagagcgggccgaacgggccaaggagcgggagaagcggcgaaaggagcaagaagaagaagagcaaaaggagcgggagaaggaagccgagcgggaacagccggggccaggactgggtcacctatgagctgaatcagcatctcctcctgagtcccagggcccctgcagttcccagtctcttctgtcctgcagcccttgcctctttcccacaggttccactttatatccaccttttccttttgttcaatttttatttttattttttttattattaaatgatgtggtctatggaaaaaaaaataaaaatctgacttagttttaaa

SEQ ID NO: 356112 - DNA, 3556 bp, Homo sapiens
  misc_feature (633)..(633): n is a, c, g, or t
  misc_feature (670)..(670): n is a, c, g, or t
  misc_feature (706)..(706): n is a, c, g, or t
  misc_feature (840)..(840): n is a, c, g, or t
gagacggagtcttgctctgtcacccaggctgtagtgcaatggcgtgatctcaaccactgcttcctgggttcaagcgattctcctgcctcagcctcccgagtagctgggactataggcgtacgccaccacgcccggctaatttgtttgtatttttagtagagacggggtttcaccatattggccagactggtctccaactcctgacctcaagtgatccgcccgcctcggcctcccaaagtgctgggattataggcgtaagccaccgcgcccggcaccttgccactgattttgcatcatgaatgcaacggaaagatcagccaatttgactttaatagttttcagtctcttaaatctctaacgtatctcttaaatctctaaactatttgtctgtgacctattttactgtttgtgtttcttctgcatcaagttggaggattggtagtgacaaagaaagaagcccctaaacaattaatattagttcaagtaccaaaaaagttcagggcgcttgcattttccagttcttgccctacaggaagcagttcctccaagggaacttactctcttctgcggagcaaggaagaactttcccagaatcttgccacatggcttccaaggcaaactcaaactcaagtncagcgtcatagatcagttcatagtctgggtccgaagncacggcgatgcttcttgcgcacccccacggagcttnttattccgattccgccagccccccgcccctccccaaaaaaagcctaagatgggagtggctatgattcagaggacagagggcagaagctgtttgcgttaaggagtggggggcttgccctattaaggtaatccgcnaacaccgagtctgacccggcccatagaggtacttctaccccgcttacctccccttttctctcgaagggcacccgaagattgtcacgagtccttagactccaactactgcggcagcttccaaatttcctgaaaaccctaagctgggccagcccggcagcccacgcacttccggcctcggacccgccccaaacacccaagcgccccagcgcctcatctctaggtccggaaataaacgaacatctccgattatggttataccagggtcgagggtttccgaatatattcgattcaaagcttcggcaagacgaagaaaaccgagcctgaaagcagggcgagaaaaggggcgctgcagggcggatggaaagaattgattggtaacgatgtggagacggaaacatccgaggacatccggaggaacccggggagttctgagtggtaatcgaggggtagagtatggcagtgggcggggtcatctcggtacgttcgaagggcgttggcggaaattaccgaagatgcccgaagccgtcgggacggacccgagtacctcacgcaagatggcggagctggaggaggtgactctggacgggaagcctcttcaggcgctgcgggtgaccgacctgaaggccgcactggagcagcgaggcctagccaagagcgggcagaagagtgccctggtcaagcggctcaaaggggctctaatgctagaaaatttacagaaacactcaacaccccatgctgcattccagccaaattcccagattggtgaggaaatgagccagaacagtttcataaaacagtatctggaaaagcagcaggagctacttaggcagcgtctggaacgtgaagctcgagaagctgcagaacttgaagaagcttcagctgagtcggaggacgagatgatccatcctgagggagtggcttccctgctgcctcctgactttcagagcagcctggagagaccagagctggagctcagcagacattcgcccagaaaaagctcctcaatttctgaagagaaaggtgactctgatgatgagaaaccaaggaaaggagaaagacgatcatctagggtcagacaggcaagagcagctaaactgtctgagggcagccaacctgctgaggaggaagaggatcaagaaacaccttccagaaacctaagggtcagagcagatcgaaatttgaaaacagaggaggaagaagaggaggaggaggaggaggaagaagatgatgaagaagaggaaggtgatgatgagggacaaaaatctagggaggcaccaatcctgaaagagtttaaggaagaaggggaagagatacctagagtaaaaccagaggagatgatggatgagagacccaaaacaagatcccaggaacaggaggtgttagagagaggagggagatttacaagatcccaggaagaggctagaaaaagtcatctggccagacagcagcaggagaaggaaatgaaaacaacatctccccttgaggaggaagaaagagaaataaaatcttcacaaggcttaaaggaaaaatcgaagtctccttcccctcctcgactgactgaagatcgaaagaaggcctcacttgtagcgctgccagagcaaactgccagcgaggaggagactcctccacctttactaacaaaggaagcatcttctccaccacctcatccacagctccatagcgaagaagaaatagagcccatggaaggcccagccccccctgtcctcattcagttatctcctcctaatacagatgctgacaccagggagctattagtatctcagcatactgtccagttggtaggaggcctgtctcctttgtcaagtccttcagacaccaaagcagaatctccagcagagaaagtgccagaggagagtgtcctgcctctggttcagaaaagcacactggctgactactcagcccagaaggatcttgaacctgagtcagacagatctgctcagcccctccctctaaaaattgaggaattagcactggccaaaggaatcactgaagaatgtctgaaacagccatctttggaacagaaggaaggcagaagagcttctcatacccttctcccaagccacagattgaaacagtcagctgattcatcctctagccggtcctcctcatcttcctcctccagttctagatcaagatctcgctctcctgacagttcaggttctcggtctcattcaccgctcagatccaagcagagagatgtagcccaggcacgtactcatgccaaccctcgtggtagacccaagatgggctccagatcaacatcagagtccagatcaaggtccgttcacgttcacgttctcgttcagcatcaagcaacagcagaaaatctctgagccctggagtctccagggacagcagcaccagctatactgaaaccaaagatccctcttctggtcaggaggttgcaactccaccagtgccacaactgcaggtctgtgagccaaaggagaggacttccacctcctcatcctctgtccaagcaaggcgtctgagtcagcctgaatcagctgaaaagcatgtgacccagaggttacagcctgagcgggggagcccaaagaagtgtgaagctgaagaggcagagccaccagctgccacacagccccaaacctcagagactcagaccctagactcctctgcacggttcctagtcgtcacagcttaagtagagggtcccactcagtgttttacagcatgg

SEQ ID NO: 356113 - DNA, 1707 bp, Homo sapiens
ctgagctgcatcatggtgcggtctgtggcctgggcaggtttcatggtcctgctgatgatcccatggggctctgctgcaaaactggtctgctacttcaccaactgggcccagtacagacagggggaggctcgcttcctgcccaaggacttggaccccagcctttgcacccacctcatctacgccttcgctggcatgaccaaccaccagctgagcaccactgagtggaatgacgagactctctaccaggagttcaatggcctgaagaagatgaatcccaagctgaagaccctgttagccatcggaggctggaatttcggcactcagaagttcacagatatggtagccacggccaacaaccgtcagacctttgtcaactcggccatcaggtttctgcgcaaatacagctttgacggccttgaccttgactgggagtacccaggaagccaggggagccctgccgtagacaaggagcgcttcacaaccctggtacaggacttggccaatgccttccagcaggaagcccagacctcagggaaggaacgccttcttctgagtgcagcggttccagctgggcagacctatgtggatgctggatacgaggtggacaaaatcgcccagaacctggattttgtcaaccttatggcctacgacttccatggctcttgggagaaggtcacgggacataacagccccctctacaagaggcaagaagagagtggtgcagcagccagcctcaacgtggatgctgctgtgcaacagtggctgcagaaggggacccctgccagcaagctgatccttggcatgcctacctacggacgctccttcacactggcctcctcatcagacaccagagtgggggccccagccacagggtctggcactccaggccccttcaccaaggaaggagggatgctggcctactatgaagtctgctcctggaagggggccaccaaacagagaatccaggatcagaaggtgccctacatcttccgggacaaccagtgggtgggctttgatgatgtggagagcttcaaaaccaaggtcagctatctgaagcagaagggactgggcggggccatggtctgggcactggacttagatgactttgccggcttctcctgcaaccagggccgataccccctcatccagacgctacggcaggaactgaatgggtaaagccttaactgcctgtcacatgtgaggccaggtgttgcctgtggcactgtgcttcagctgtaggtcttccatacttgccttcaggcaccccagagcttgaagttccaaaaccaggtcagccctctgaacctgagcatggccccagccctggacaagacacgttctgccagggcaaagctgatgggctctatcccaatcctcgggaacggtccagcttctacagctgtgcagcggggcggctgttccagcaaagctgcccgacaggcctggtgttcagcaactcctgcaaatgctgcacctggaattgagtcgctaaagcccctccagtcccagctttgaggctgggcccaggatcactctacagcctgcctcctgggttttccctgggggccgcaatctggctcctgcaggcctttctgtggtcttcctttatccaggctttctgctctcagccttgccttccttttttctgggtctcctgggctgcccctttcacttgcaaaataaatctttggtttgtgcccctcttca

SEQ ID NO: 356114 - DNA, 1579 bp, Homo sapiens
ctgagctgcatcatggtgcggtctgtggcctgggcaggtttcatggtcctgctgatgatcccatggggctctgctgcaaaactggtctgctacttcaccaactgggcccagtacagacagggggaggctcgcttcctgcccaaggacttggaccccagcctttgcacccacctcatctacgccttcgctggcatgaccaaccaccagctgagcaccactgagtggaatgacgagactctctaccaggagttcaatggcctgaagaagatgttcacagatatggtagccacggccaacaaccgtcagacctttgtcaactcggccatcaggtttctgcgcaaatacagctttgacggccttgaccttgactgggagtacccaggaagccaggggagccctgccgtagacaaggagcgcttcacaaccctggtacaggacttggccaatgccttccagcaggaagcccagacctcagggaaggaacgccttcttctgagtgcagcggttccagctgggcagacctatgtggatgctggatacgaggtggacaaaatcgcccagaacctggattttgtcaaccttatggcctacgacttccatggctcttgggagaaggtcacgggacataacagccccctctacaagaggcaagaagagagtggtgcagcagccagcctcaacgtggatgctgctgtgcaacagtggctgcagaaggggacccctgccagcaagctgatccttggcatgcctacctacggacgctccttcacactggcctcctcatcagacaccagagtgggggccccagccacagggtctggcactccaggccccttcaccaaggaaggagggatgctggcctactatgaagtctgctcctggaagggggccaccaaacagagaatccaggatcagaaggtgccctacatcttccgggacaaccagtgggtgggctttgatgatgtggagagcttcaaaaccaaggtcagctatctgaagcagaagggactgggcggggccatggtctgggcactggacttagatgactttgccggcttctcctgcaaccagggccgataccccctcatccagacgctacggcaggaactgagtcttccatacttgccttcaggcaccccagagcttgaagttccaaaaccaggtcagccctctgaacctgagcatggccccagccctggacaagacacgttctgccagggcaaagctgatgggctctatcccaatcctcgggaacggtccagcttctacagctgtgcagcggggcggctgttccagcaaagctgcccgacaggcctggtgttcagcaactcctgcaaatgctgcacctggaattgagtcgctaaagcccctccagtcccagctttgaggctgggcccaggatcactctacagcctgcctcctgggttttccctgggggccgcaatctggctcctgcaggcctttctgtggtcttcctttatccaggctttctgctctcagccttgccttccttttttctgggtctcctgggctgcccctttcacttgcaaaataaatctttggtttgtgcccctcttca

SEQ ID NO: 356115 - DNA, 1636 bp, Homo sapiens
ctgagctgcatcatggtgcggtctgtggcctgggcaggtttcatggtcctgctgatgatcccatggggctctgctgcaaaactggtctgctacttcaccaactgggcccagtacagacagggggaggctcgcttcctgcccaaggacttggaccccagcctttgcacccacctcatctacgccttcgctggcatgaccaaccaccagctgagcaccactgagtggaatgacgagactctctaccaggagttcaatggcctgaagaagatgaatcccaagctgaagaccctgttagccatcggaggctggaatttcggcactcagaagttcacagatatggtagccacggccaacaaccgtcagacctttgtcaactcggccatcaggtttctgcgcaaatacagctttgacggccttgaccttgactgggagtacccaggaagccaggggagccctgccgtagacaaggagcgcttcacaaccctggtacaggacttggccaatgccttccagcaggaagcccagacctcagggaaggaacgccttcttctgagtgcagcggttccagctgggcagacctatgtggatgctggatacgaggtggacaaaatcgcccagaacctggattttgtcaaccttatggcctacgacttccatggctcttgggagaaggtcacgggacataacagccccctctacaagaggcaagaagagagtggtgcagcagccagcctcaacgtggatgctgctgtgcaacagtggctgcagaaggggacccctgccagcaagctgatccttggcatgcctacctacggacgctccttcacactggcctcctcatcagacaccagagtgggggccccagccacagggtctggcactccaggccccttcaccaaggaaggagggatgctggcctactatgaagtctgctcctggaagggggccaccaaacagagaatccaggatcagaaggtgccctacatcttccgggacaaccagtgggtgggctttgatgatgtggagagcttcaaaaccaaggtcagctatctgaagcagaagggactgggcggggccatggtctgggcactggacttagatgactttgccggcttctcctgcaaccagggccgataccccctcatccagacgctacggcaggaactgagtcttccatacttgccttcaggcaccccagagcttgaagttccaaaaccaggtcagccctctgaacctgagcatggccccagccctggacaagacacgttctgccagggcaaagctgatgggctctatcccaatcctcgggaacggtccagcttctacagctgtgcagcggggcggctgttccagcaaagctgcccgacaggcctggtgttcagcaactcctgcaaatgctgcacctggaattgagtcgctaaagcccctccagtcccagctttgaggctgggcccaggatcactctacagcctgcctcctgggttttccctgggggccgcaatctggctcctgcaggcctttctgtggtcttcctttatccaggctttctgctctcagccttgccttccttttttctgggtctcctgggctgcccctttcacttgcaaaataaatctttggtttgtgcccctcttca

SEQ ID NO: 356116 - DNA, 501 bp, Homo sapiens
aggctcccagcccaaggctgtctccagaatctacagccactcacaggcctgaggctgctggagcaaaaagggccctgtccagaagaggtagccaggctctggggtggccgggtcaggcttccccgggctcctccactgcatcccctccctgcacaggtcagctatctgaagcagaagggactgggcggggccatggtctgggcactggacttagatgactttgccggcttctcctgcaaccagggccgataccccctcatccagacgctacggcaggaactgagtgcagaaatcacttagaggatttccagactgaagtgctatttcatgacaagagcactactctcccaagcccttctattgaataccactgactcttttaatattagtgtccagccattagtccttccttcaaagagacaggggaattaacattcgttgcatgaccagagaccatactaagcatgtattagacatccaataaatagttactgaatgaat

SEQ ID NO: 356117 - DNA, 1468 bp, Homo sapiens
ctgagctgcatcatggtgcggtctgtggcctgggcaggtttcatggtcctgctgatgatcccatggggctctgctgcaaaactggtctgctacttcaccaactgggcccagtacagacagggggaggctcgcttcctgcccaaggacttggaccccagcctttgcacccacctcatctacgccttcgctggcatgaccaaccaccagctgagcaccactgagtggaatgacgagactctctaccaggagttcaatggcctgaagaagatgaatcccaagctgaagaccctgttagccatcggaggctggaatttcggcactcagaagttcacagatatggtagccacggccaacaaccgtcagacctttgtcaactcggccatcaggtttctgcgcaaatacagctttgacggccttgaccttgactgggagtacccaggaagccaggggagccctgccgtagacaaggagcgcttcacaaccctggtacaggacttggccaatgccttccagcaggaagcccagacctcagggaaggaacgccttcttctgagtgcagcggttccagctgggcagacctatgtggatgctggatacgaggtggacaaaatcgcccagaacctggattttgtcaaccttatggcctacgacttccatggctcttgggagaaggtcacgggacataacagccccctctacaagaggcaagaagagagtggtgcagcagccagcctcaacgtggatgctgctgtgcaacagtggctgcagaaggggacccctgccagcaagctgatccttggcatgcctacctacggacgctccttcacactggcctcctcatcagacaccagagtgggggccccagccacagggtctggcactccaggccccttcaccaaggaaggagggatgctggcctactatgaagtctgctcctggaagggggccaccaaacagagaatccaggatcagaaggtgccctacatcttccgggacaaccagtgggtgggctttgatgatgtggagagcttcaaaaccaaggtcagctatctgaagcagaagggactgggcggggccatggtctgggcactggacttagatgactttgccggcttctcctgcaaccagggccgataccccctcatccagacgctacggcaggaactgagctggagtgcagaggcacgatcacagctcactgcagccttgacctcctgggctcagctgatcctcccacctcagcctcccaggtgcagaaatcacttagaggatttccagactgaagtgctatttcatgacaagagcactactctcccaagcccttctattgaataccactgactcttttaatattagtgtccagccattagtccttccttcaaagagacaggggaattaacattcgttgcatgaccagagaccatactaagcatgtattagacatccaataaatagttactgaatgaat

SEQ ID NO: 356118 - DNA, 6438 bp, Homo sapiens
tgcatgaagacaaaaggtcctgtgctcacctgggacccttctggacgttgccctgtgtacctcttcgactgcctgttcatctacgacgaaccccgggtattgaccccagacaacaatgccacttcatattggggacttcgtctgggattccaaggtgcattcattgcaaagttccttaaatattttctcactgcttcctactaaaggacggacagagcatttgttcttcagccacatactttccttccactggccagcattctcctctattagactagaactgtggataaacctcagaaaatggccacccagcagaaagcctctgacgagaggatctcccagtttgatcacaatttgctgccagagctgtctgctcttctgggcctagatgcagttcagttggcaaaggaactagaagaagaggagcagaaggagcgagcaaaaatgcagaaaggctacaactctcaaatgcgcagtgaagcaaaaaggttaaagacttttgtgacttatgagccgtacagctcatggataccacaggagatggcggccgctgggttttacttcactggggtaaaatctgggattcagtgcttctgctgtagcctaatcctctttggtgccggcctcacgagactccccatagaagaccacaagaggtttcatccagattgtgggttccttttgaacaaggatgttggtaacattgccaagtacgacataagggtgaagaatctgaagagcaggctgagaggaggtaaaatgaggtaccaagaagaggaggctagacttgcgtccttcaggaactggccattttatgtccaagggatatccccttgtgtgctctcagaggctggctttgtctttacaggtaaacaggacacggtacagtgtttttcctgtggtggatgtttaggaaattgggaagaaggagatgatccttggaaggaacatgccaaatggttccccaaatgtgaatttcttcggagtaagaaatcctcagaggaaattacccagtatattcaaagctacaagggatttgttgacataacgggagaacattttgtgaattcctgggtccagagagaattacctatggcatcagcttattgcaatgacagcatctttgcttacgaagaactacggctggactcttttaaggactggccccgggaatcagctgtgggagttgcagcactggccaaagcaggtcttttctacacaggtataaaggacatcgtccagtgcttttcctgtggagggtgtttagagaaatggcaggaaggtgatgacccattagacgatcacaccagatgttttcccaattgtccatttctccaaaatatgaagtcctctgcggaagtgactccagaccttcagagccgtggtgaactttgtgaattactggaaaccacaagtgaaagcaatcttgaagattcaatagcagttggtcctatagtgccagaaatggcacagggtgaagcccagtggtttcaagaggcaaagaatctgaatgagcagctgagagcagcttataccagcgccagtttccgccacatgtctttgcttgatatctcttccgatctggccacggaccacttgctgggctgtgatctgtctattgcttcaaaacacatcagcaaacctgtgcaagaacctctggtgctgcctgaggtctttggcaacttgaactctgtcatgtgtgtggagggtgaagctggaagtggaaagacggtcctcctgaagaaaatagcttttctgtgggcatctggatgctgtcccctgttaaacaggttccagctggttttctacctctcccttagttccaccagaccagacgaggggctggccagtatcatctgtgaccagctcctagagaaagaaggatctgttactgaaatgtgcatgaggaacattatccagcagttaaagaatcaggtcttattccttttagatgactacaaagaaatatgttcaatccctcaagtcataggaaaactgattcaaaaaaaccacttatcccggacctgcctattgattgctgtccgtacaaacagggccagggacatccgccgatacctagagaccattctagagatcaaagcatttcccttttataatactgtctgtatattacggaagctcttttcacataatatgactcgtctgcgaaagtttatggtttactttggaaagaaccaaagtttgcagaagatacagaaaactcctctctttgtggcggcgatctgtgctcattggtttcagtatccttttgacccatcctttgatgatgtggctgttttcaagtcctatatggaacgcctttccttaaggaacaaagcgacagctgaaattctcaaagcaactgtgtcctcctgtggtgagctggccttgaaagggtttttttcatgttgctttgagtttaatgatgatgatctcgcagaagcaggggttgatgaagatgaagatctaaccatgtgcttgatgagcaaatttacagcccagagactaagaccattctaccggtttttaagtcctgccttccaagaatttcttgcggggatgaggctgattgaactcctggattcagataggcaggaacatcaagatttgggactgtatcatttgaaacaaatcaactcacccatgatgactgtaagcgcctacaacaattttttgaactatgtctccagcctcccttcaacaaaagcagggcccaaaattgtgtctcatttgctccatttagtggataacaaagagtcattggagaatatatctgaaaatgatgactacttaaagcaccagccagaaatttcactgcagatgcagttacttaggggattgtggcaaatttgtccacaagcttacttttcaatggtttcagaacatttactggttcttgccctgaaaactgcttatcaaagcaacactgttgctgcgtgttctccatttgttttgcaattccttcaagggagaacactgactttgggtgcgcttaacttacagtactttttcgaccacccagaaagcttgtcattgttgaggagcatccacttcccaatacgaggaaataagacatcacccagagcacatttttcagttctggaaacatgttttgacaaatcacaggtgccaactatagatcaggactatgcttctgcctttgaacctatgaatgaatgggagcgaaatttagctgaaaaagaggataatgtaaagagctatatggatatgcagcgcagggcatcaccagaccttagtactggctattggaaactttctccaaagcagtacaagattccctgtctagaagtcgatgtgaatgatattgatgttgtaggccaggatatgcttgagattctaatgacagttttctcagcttcacagcgcatcgaactccatttaaaccacagcagaggctttatagaaagcatccgcccagctcttgagctgtctaaggcctctgtcaccaagtgctccataagcaagttggaactcagcgcagccgaacaggaactgcttctcaccctgccttccctggaatctcttgaagtctcagggacaatccagtcacaagaccaaatctttcctaatctggataagttcctgtgcctgaaagaactgtctgtggatctggagggcaatataaatgttttttcagtcattcctgaagaatttccaaacttccaccatatggagaaattattgatccaaatttcagctgagtatgatccttccaaactagtaaaattaattcaaaattctccaaaccttcatgttttccatctgaagtgtaacttcttttcggattttgggtctctcatgactatgcttgtttcctgtaagaaactcacagaaattaagttttcggattcattttttcaagccgtcccatttgttgccagtttgccaaattttatttctctgaagatattaaatcttgaaggccagcaatttcctgatgaggaaacatcagaaaaatttgcctacattttaggttctcttagtaacctggaagaattgatccttcctactggggatggaatttatcgagtggccaaactgatcatccagcagtgtcagcagcttcattgtctccgagtcctctcatttttcaagactttgaatgatgacagcgtggtggaaattgccaaagtagcaatcagtggaggtttccagaaacttgagaacctaaagctttcaatcaatcacaagattacagaggaaggatacagaaatttctttcaagcactggacaacatgccaaacttgcaggagttggacatctccaggcatttcacagagtgtatcaaagctcaggccacaacagtcaagtctttgagtcaatgtgtgttacgactaccaaggctcattagactgaacatgttaagttggctcttggatgcagatgatattgcattgcttaatgtcatgaaagaaagacatcctcaatctaagtacttaactattctccagaaatggatactgccgttctctccaatcattcagaaataaaagattcagctaaaaactgctgaatcaataatttgtcttggggcatattgaggatgtaaaaaaagttgttgattaatgctaaaaaccaaattatccaaaattattttattaaatattgcatacaaaagaaaatgtgtaaggcttgctaaaaaacaaaacaaaacaaaacacagtcctgcatactcaccaccaagctcaagaaataaatcatcaccaatacctttgaggtccctgagtaatccaccccagctaaaggcaaacccttcaatcaagtttatacagcaaaccctccattgtccatggtcaacagggaaggggttggggacaggtctgccaatctatctaaaagccacaatatggaagaagtattcaatttatataataaatggctaacttaacggttgaatcactttcatacatggatgaaacgggtttaacacaggatccacatgaatcttctgtgggccaagagatgttccttaatccttgtagaacctgttttctatattgaactagctttggtacagtagagttaacttactttccatttatccactgccaatataaagaggaaacaggggttagggaaaaatgacttcattccagaggcttctcagagttcaacatatgctataatttagaattttcttatgaatccactctacttgggtagaaaatattttatctctagtgattgcatattatttccatatcatagtatttcatagtattatatttgatatgagtgtctatatcaatgtcagtgtccagaatttcgttcctaccagttaagtagttttctgaacggccagaagaccattcgaaattcatgatactactataagttggtaaacaaccatacttttatcctcatttttattctcactaagaaaaaagtcaactcccctccccttgcccaagtatgaaatatagggacagtatgtatggtgtggtctcatttgtttagaaaaccacttatgactgggtgcggtggctcacacctgtaatcccagcactttgggaggctgaggcgggcgaatcatttgaggtgaggaattcgagaccagcctggccagcatggtgaaaccccatctctactaaaaatacaaaaattagccaggtgtggtggcacatgcctgtagtcccagccactagggcggctgagacgcaagacttgcttgaacccgggaggcagaggttgcagtgagccaagatggcgccactgcattccagcctgggcaacagagcaagaccctgtctgtctcaaaacaaaaaacaaaaccacttatattgctagctacattaagaatttctgaatatgttactgagcttgcttgtggtaaccatttataatatcagaaagtatatgtacaccaaaacatgttgaacatccatgttgtacaactgaaatataaataattttgtcaattatacctaaataaaactggaaaaaaatttctggaagtttatatctaaaaatgttaatagtgcgtacctctaggaagtgggcctggaagccattcttacttttcagtctctcccattctgtactgttttttgttttactttcgtgcctgcattatttttctatttaaaacaaaaataaatctagtttagcactaaaatattaactggagctacctctggagggcaagagtactagaaggtgggatggattgtcttcttgcttgtctgattttatatgtaatacctttgtaattagaaaggttgttaagcattatatcagaatccagtcaggagacagaaaccacacagaaatttgaatggggaaagtttaatatacagatgctcggcctgacgcagtggctcacgcctgtaattccagcactttgggaggccgaggtgggcagatcacttgaggtcaggagttcgagaccagcctggccaacatggtgaaatcctgtc

SEQ ID NO: 356119 - DNA, 586 bp, Homo sapiens
gtgttggccaggctggtctcagactcctgacctcaggagatccgctggccttggcctcccaaagtgctgggattacaggcatgagccactgcgcccagccccctcatggagcttcaattccagattctggttgccaatctgtttgttgatcaaaggagaatggggcagagggatggtgtgcatcaaagtgcatggtgtgtaggagcattcaatgactacttgccagttaccccattggtggacagagtcttatatagaaaattgcctcactggtaaccaacttctgactgtcacaaaacccaactggagactgaataggctttcactattacaggtctggtggttattatctgcatgttaatggacagatgcccatgccagtggcactgatcaagtttccttacttttaggtataaaggacatcgtccagtgcttttcctgtggagggtgtttagagaaatggcaggaaggtgatgacccattagacgatcacaccagatgttttcccaagtgagtggaatgaatgttaaccatctgcaactttggatgcacttcaacagttttttctttttcctcatttcctgcc

SEQ ID NO: 356120 - DNA, 916 bp, Homo sapiens
caagcgattctcctgcctcggcctcccgagtagctgggattacagctgcctgccacccacgcctggcaaatgtttgtatttttagtagagacagggtttcaccatgttggccaggctggtctcgagctcctgagctcagatgatccacctgcctcggcctcccaaagtgctgggattacaggcatgagccacagcacctggcctctttgtattcttattgtgtaaatgtcatgtacaaacttagagttattaggtgttaaagctgaaggtgatgctactgagtcaatgcttgtattttatagaagagaaaactgttacccagagagggtcaataatgtgtcaaaattcacattacttgctagttgcagaacctgaacccaagcccagtgacctgattcttagatcatgagatcgtggtacctggttttaattaagtattattgaaacaaaataataaactacttggctaattttgatagaaatttgcagtattttctaatttctgaaaatccttgatcttttacagtaaaattaattcaaaattctccaaaccttcatgttttccatctgaagtgtaacttcttttcggattttgggtctctcatgactatgcttgtttcctgtaagaaactcacagaaattaagttttcggattcattttttcaagccgtcccatttggtaagagttataatattacaatggtggtttaaaatgtttctatggacacagagtcatattaagcactctttaaaaagggccatattttgaggctgggtgtggtggctatcataaagccgttctagtagttgtgaagtggtatctcattgtggttttgatttgcatttctctaatgcaaatcatgaaaatgatgtgaagtatcttttcactttttgcaaaaatatctgtttgctcatt

SEQ ID NO: 356121 - DNA, 261 bp, Homo sapiens
tcaccttgtgctttttattcaagcttattgcaatgacagcatctttgcttacgaagaactacggctggactcttttaaggactggccccgggaatcagctgtgggagttgcagcactggccaaagcaggtcttttctacacaggtgagtcagtaggttgtgcccacttgcttgcttgacctttaattcccacatagactttatgctcctgggcttacgtttagctacactcagcaatgtccactagcttcagcgtttcttt

SEQ ID NO: 356122 - DNA, 5550 bp, Homo sapiens
  misc_feature (15)..(15): n is a, c, g, or t
  misc_feature (25)..(25): n is a, c, g, or t
  misc_feature (32)..(33): n is a, c, g, or t
  misc_feature (38)..(42): n is a, c, g, or t
  misc_feature (63)..(63): n is a, c, g, or t
ccccccgggaaaaanctttgccccngtttcgnnatttnnnnnggggccccggccttttttttnccccttaagcctgggcacaaaaataaaaccttccccccaaaaaaaaaaaaaaaaaaaaaaagtcagataatcaacaacttgaattttaatttccctcagggagaacattttgtgaattcctgggtccagagagaattacctatggcatcagcttattgcaatgacagcatctttgcttacgaagaactacggctggactcttttaaggactggccccgggaatcagctgtgggagttgcagcactggccaaagcaggtcttttctacacaggtataaaggacatcgtccagtgcttttcctgtggagggtgtttagagaaatggcaggaaggtgatgacccattagacgatcacaccagatgttttcccaattgtccatttctccaaaatatgaagtcctctgcggaagtgactccagaccttcagagccgtggtgaactttgtgaattactggaaaccacaagtgaaagcaatcttgaagattcaatagcagttggtcctatagtgccagaaatggcacagggtgaagcccagtggtttcaagaggcaaagaatctgaatgagcagctgagagcagcttataccagcgccagtttccgccacatgtctttgcttgatatctcttccgatctggccacggaccacttgctgggctgtgatctgtctattgcttcaaaacacatcagcaaacctgtgcaagaacctctggtgctgcctgaggtctttggcaacttgaactctgtcatgtgtgtggagggtgaagctggaagtggaaagacggtcctcctgaagaaaatagcttttctgtgggcatctggatgctgtcccctgttaaacaggttccagctggttttctacctctcccttagttccaccagaccagacgaggggctggccagtatcatctgtgaccagctcctagagaaagaaggatctgttactgaaatgtgcatgaggaacattatccagcagttaaagaatcaggtcttattccttttagatgactacaaagaaatatgttcaatccctcaagtcataggaaaactgattcaaaaaaaccacttatcccggacctgcctattgattgctgtccgtacaaacagggccagggacatccgccgatacctagagaccattctagagatcaaagcatttcccttttataatactgtctgtatattacggaagctcttttcacataatatgactcgtctgcgaaagtttatggtttactttggaaagaaccaaagtttgcagaagatacagaaaactcctctctttgtggcggcgatctgtgctcattggtttcagtatccttttgacccatcctttgatgatgtggctgttttcaagtcctatatggaacgcctttccttaaggaacaaagcgacagctgaaattctcaaagcaactgtgtcctcctgtggtgagctggccttgaaagggtttttttcatgttgctttgagtttaatgatgatgatctcgcagaagcaggggttgatgaagatgaagatctaaccatgtgcttgatgagcaaatttacagcccagagactaagaccattctaccggtttttaagtcctgccttccaagaatttcttgcggggatgaggctgattgaactcctggattcagataggcaggaacatcaagatttgggactgtatcatttgaaacaaatcaactcacccatgatgactgtaagcgcctacaacaattttttgaactatgtctccagcctcccttcaacaaaagcagggcccaaaattgtgtctcatttgctccatttagtggataacaaagagtcattggagaatatatctgaaaatgatgactacttaaagcaccagccagaaatttcactgcagatgcagttacttaggggattgtggcaaatttgtccacaagcttacttttcaatggtttcagaacatttactggttcttgccctgaaaactgcttatcaaagcaacactgttgctgcgtgttctccatttgttttgcaattccttcaagggagaacactgactttgggtgcgcttaacttacagtactttttcgaccacccagaaagcttgtcattgttgaggagcatccacttcccaatacgaggaaataagacatcacccagagcacatttttcagttctggaaacatgttttgacaaatcacaggtgccaactatagatcaggactatgcttctgcctttgaacctatgaatgaatgggagcgaaatttagctgaaaaagaggataatgtaaagagctatatggatatgcagcgcagggcatcaccagaccttagtactggctattggaaactttctccaaagcagtacaagattccctgtctagaagtcgatgtgaatgatattgatgttgtaggccaggatatgcttgagattctaatgacagttttctcagcttcacagcgcatcgaactccatttaaaccacagcagaggctttatagaaagcatccgcccagctcttgagctgtctaaggcctctgtcaccaagtgctccataagcaagttggaactcagcgcagccgaacaggaactgcttctcaccctgccttccctggaatctcttgaagtctcagggacaatccagtcacaagaccaaatctttcctaatctggataagttcctgtgcctgaaagaactgtctgtggatctggagggcaatataaatgttttttcagtcattcctgaagaatttccaaacttccaccatatggagaaattattgatccaaatttcagctgagtatgatccttccaaactagtaaaattaattcaaaattctccaaaccttcatgttttccatctgaagtgtaacttcttttcggattttgggtctctcatgactatgcttgtttcctgtaagaaactcacagaaattaagttttcggattcattttttcaagccgtcccatttgttgccagtttgccaaattttatttctctgaagatattaaatcttgaaggccagcaatttcctgatgaggaaacatcagaaaaatttgcctacattttaggttctcttagtaacctggaagaattgatccttcctactggggatggaatttatcgagtggccaaactgatcatccagcagtgtcagcagcttcattgtctccgagtcctctcatttttcaagactttgaatgatgacagcgtggtggaaattgccaaagtagcaatcagtggaggtttccagaaacttgagaacctaaagctttcaatcaatcacaagattacagaggaaggatacagaaatttctttcaagcactggacaacatgccaaacttgcaggagttggacatctccaggcatttcacagagtgtatcaaagctcaggccacaacagtcaagtctttgagtcaatgtgtgttacgactaccaaggctcattagactgaacatgttaagttggctcttggatgcagatgatattgcattgcttaatgtcatgaaagaaagacatcctcaatctaagtacttaactattctccagaaatggatactgccgttctctccaatcattcagaaataaaagattcagctaaaaactgctgaatcaataatttgtcttggggcatattgaggatgtaaaaaaagttgttgattaatgctaaaaaccaaattatccaaaattattttattaaatattgcatacaaaagaaaatgtgtaaggcttgctaaaaaacaaaacaaaacaaaacacagtcctgcatactcaccaccaagctcaagaaataaatcatcaccaatacctttgaggtccctgagtaatccaccccagctaaaggcaaacccttcaatcaagtttatacagcaaaccctccattgtccatggtcaacagggaaggggttggggacaggtctgccaatctatctaaaagccacaatatggaagaagtattcaatttatataataaatggctaacttaacggttgaatcactttcatacatggatgaaacgggtttaacacaggatccacatgaatcttctgtgggccaagagatgttccttaatccttgtagaacctgttttctatattgaactagctttggtacagtagagttaacttactttccatttatccactgccaatataaagaggaaacaggggttagggaaaaatgacttcattccagaggcttctcagagttcaacatatgctataatttagaattttcttatgaatccactctacttgggtagaaaatattttatctctagtgattgcatattatttccatatcatagtatttcatagtattatatttgatatgagtgtctatatcaatgtcagtgtccagaatttcgttcctaccagttaagtagttttctgaacggccagaagaccattcgaaattcatgatactactataagttggtaaacaaccatacttttatcctcatttttattctcactaagaaaaaagtcaactcccctccccttgcccaagtatgaaatatagggacagtatgtatggtgtggtctcatttgtttagaaaaccacttatgactgggtgcggtggctcacacctgtaatcccagcactttgggaggctgaggcgggcgaatcatttgaggtgaggaattcgagaccagcctggccagcatggtgaaaccccatctctactaaaaatacaaaaattagccaggtgtggtggcacatgcctgtagtcccagccactagggcggctgagacgcaagacttgcttgaacccgggaggcagaggttgcagtgagccaagatggcgccactgcattccagcctgggcaacagagcaagaccctgtctgtctcaaaacaaaaaacaaaaccacttatattgctagctacattaagaatttctgaatatgttactgagcttgcttgtggtaaccatttataatatcagaaagtatatgtacaccaaaacatgttgaacatccatgttgtacaactgaaatataaataattttgtcaattatacctaaataaaactggaaaaaaatttctggaagtttatatctaaaaatgttaatagtgcgtacctctaggaagtgggcctggaagccattcttacttttcagtctctcccattctgtactgttttttgttttactttcgtgcctgcattatttttctatttaaaacaaaaataaatctagtttagcactaaaatattaactggagctacctctggagggcaagagtactagaaggtgggatggattgtcttcttgcttgtctgattttatatgtaatacctttgtaattagaaaggttgttaagcattatatcagaatccagtcaggagacagaaaccacacagaaatttgaatggggaaagtttaatatacagatgctcggcctgacgcagtggctcacgcctgtaattccagcactttgggaggccgaggtgggcagatcacttgaggtcaggagttcgagaccagcctggccaacatggtgaaatcctgtc

SEQ ID NO: 356123 - DNA, 5504 bp, Homo sapiens
acgagaacctgccactgcacttcagcctgggcaacagagtgagactctgcctcaaaaaaaaaaaaaaaaaaaaaaaaagtcagataatcaacaacttgaattttaatttccctcagggagaacattttgtgaattcctgggtccagagagaattacctatggcatcagcttattgcaatgacagcatctttgcttacgaagaactacggctggactcttttaaggactggccccgggaatcagctgtgggagttgcagcactggccaaagcaggtcttttctacacaggtataaaggacatcgtccagtgcttttcctgtggagggtgtttagagaaatggcaggaaggtgatgacccattagacgatcacaccagatgttttcccaattgtccatttctccaaaatatgaagtcctctgcggaagtgactccagaccttcagagccgtggtgaactttgtgaattactggaaaccacaagtgaaagcaatcttgaagattcaatagcagttggtcctatagtgccagaaatggcacagggtgaagcccagtggtttcaagaggcaaagaatctgaatgagcagctgagagcagcttataccagcgccagtttccgccacatgtctttgcttgatatctcttccgatctggccacggaccacttgctgggctgtgatctgtctattgcttcaaaacacatcagcaaacctgtgcaagaacctctggtgctgcctgaggtctttggcaacttgaactctgtcatgtgtgtggagggtgaagctggaagtggaaagacggtcctcctgaagaaaatagcttttctgtgggcatctggatgctgtcccctgttaaacaggttccagctggttttctacctctcccttagttccaccagaccagacgaggggctggccagtatcatctgtgaccagctcctagagaaagaaggatctgttactgaaatgtgcatgaggaacattatccagcagttaaagaatcaggtcttattccttttagatgactacaaagaaatatgttcaatccctcaagtcataggaaaactgattcaaaaaaaccacttatcccggacctgcctattgattgctgtccgtacaaacagggccagggacatccgccgatacctagagaccattctagagatcaaagcatttcccttttataatactgtctgtatattacggaagctcttttcacataatatgactcgtctgcgaaagtttatggtttactttggaaagaaccaaagtttgcagaagatacagaaaactcctctctttgtggcggcgatctgtgctcattggtttcagtatccttttgacccatcctttgatgatgtggctgttttcaagtcctatatggaacgcctttccttaaggaacaaagcgacagctgaaattctcaaagcaactgtgtcctcctgtggtgagctggccttgaaagggtttttttcatgttgctttgagtttaatgatgatgatctcgcagaagcaggggttgatgaagatgaagatctaaccatgtgcttgatgagcaaatttacagcccagagactaagaccattctaccggtttttaagtcctgccttccaagaatttcttgcggggatgaggctgattgaactcctggattcagataggcaggaacatcaagatttgggactgtatcatttgaaacaaatcaactcacccatgatgactgtaagcgcctacaacaattttttgaactatgtctccagcctcccttcaacaaaagcagggcccaaaattgtgtctcatttgctccatttagtggataacaaagagtcattggagaatatatctgaaaatgatgactacttaaagcaccagccagaaatttcactgcagatgcagttacttaggggattgtggcaaatttgtccacaagcttacttttcaatggtttcagaacatttactggttcttgccctgaaaactgcttatcaaagcaacactgttgctgcgtgttctccatttgttttgcaattccttcaagggagaacactgactttgggtgcgcttaacttacagtactttttcgaccacccagaaagcttgtcattgttgaggagcatccacttcccaatacgaggaaataagacatcacccagagcacatttttcagttctggaaacatgttttgacaaatcacaggtgccaactatagatcaggactatgcttctgcctttgaacctatgaatgaatgggagcgaaatttagctgaaaaagaggataatgtaaagagctatatggatatgcagcgcagggcatcaccagaccttagtactggctattggaaactttctccaaagcagtacaagattccctgtctagaagtcgatgtgaatgatattgatgttgtaggccaggatatgcttgagattctaatgacagttttctcagcttcacagcgcatcgaactccatttaaaccacagcagaggctttatagaaagcatccgcccagctcttgagctgtctaaggcctctgtcaccaagtgctccataagcaagttggaactcagcgcagccgaacaggaactgcttctcaccctgccttccctggaatctcttgaagtctcagggacaatccagtcacaagaccaaatctttcctaatctggataagttcctgtgcctgaaagaactgtctgtggatctggagggcaatataaatgttttttcagtcattcctgaagaatttccaaacttccaccatatggagaaattattgatccaaatttcagctgagtatgatccttccaaactagtaaaattaattcaaaattctccaaaccttcatgttttccatctgaagtgtaacttcttttcggattttgggtctctcatgactatgcttgtttcctgtaagaaactcacagaaattaagttttcggattcattttttcaagccgtcccatttgttgccagtttgccaaattttatttctctgaagatattaaatcttgaaggccagcaatttcctgatgaggaaacatcagaaaaatttgcctacattttaggttctcttagtaacctggaagaattgatccttcctactggggatggaatttatcgagtggccaaactgatcatccagcagtgtcagcagcttcattgtctccgagtcctctcatttttcaagactttgaatgatgacagcgtggtggaaattgccaaagtagcaatcagtggaggtttccagaaacttgagaacctaaagctttcaatcaatcacaagattacagaggaaggatacagaaatttctttcaagcactggacaacatgccaaacttgcaggagttggacatctccaggcatttcacagagtgtatcaaagctcaggccacaacagtcaagtctttgagtcaatgtgtgttacgactaccaaggctcattagactgaacatgttaagttggctcttggatgcagatgatattgcattgcttaatgtcatgaaagaaagacatcctcaatctaagtacttaactattctccagaaatggatactgccgttctctccaatcattcagaaataaaagattcagctaaaaactgctgaatcaataatttgtcttggggcatattgaggatgtaaaaaaagttgttgattaatgctaaaaaccaaattatccaaaattattttattaaatattgcatacaaaagaaaatgtgtaaggcttgctaaaaaacaaaacaaaacaaaacacagtcctgcatactcaccaccaagctcaagaaataaatcatcaccaatacctttgaggtccctgagtaatccaccccagctaaaggcaaacccttcaatcaagtttatacagcaaaccctccattgtccatggtcaacagggaaggggttggggacaggtctgccaatctatctaaaagccacaatatggaagaagtattcaatttatataataaatggctaacttaacggttgaatcactttcatacatggatgaaacgggtttaacacaggatccacatgaatcttctgtgggccaagagatgttccttaatccttgtagaacctgttttctatattgaactagctttggtacagtagagttaacttactttccatttatccactgccaatataaagaggaaacaggggttagggaaaaatgacttcattccagaggcttctcagagttcaacatatgctataatttagaattttcttatgaatccactctacttgggtagaaaatattttatctctagtgattgcatattatttccatatcatagtatttcatagtattatatttgatatgagtgtctatatcaatgtcagtgtccagaatttcgttcctaccagttaagtagttttctgaacggccagaagaccattcgaaattcatgatactactataagttggtaaacaaccatacttttatcctcatttttattctcactaagaaaaaagtcaactcccctccccttgcccaagtatgaaatatagggacagtatgtatggtgtggtctcatttgtttagaaaaccacttatgactgggtgcggtggctcacacctgtaatcccagcactttgggaggctgaggcgggcgaatcatttgaggtgaggaattcgagaccagcctggccagcatggtgaaaccccatctctactaaaaatacaaaaattagccaggtgtggtggcacatgcctgtagtcccagccactagggcggctgagacgcaagacttgcttgaacccgggaggcagaggttgcagtgagccaagatggcgccactgcattccagcctgggcaacagagcaagaccctgtctgtctcaaaacaaaaaacaaaaccacttatattgctagctacattaagaatttctgaatatgttactgagcttgcttgtggtaaccatttataatatcagaaagtatatgtacaccaaaacatgttgaacatccatgttgtacaactgaaatataaataattttgtcaattatacctaaataaaactggaaaaaaatttctggaagtttatatctaaaaatgttaatagtgcgtacctctaggaagtgggcctggaagccattcttacttttcagtctctcccattctgtactgttttttgttttactttcgtgcctgcattatttttctatttaaaacaaaaataaatctagtttagcactaaaatattaactggagctacctctggagggcaagagtactagaaggtgggatggattgtcttcttgcttgtctgattttatatgtaatacctttgtaattagaaaggttgttaagcattatatcagaatccagtcaggagacagaaaccacacagaaatttgaatggggaaagtttaatatacagatgctcggcctgacgcagtggctcacgcctgtaattccagcactttgggaggccgaggtgggcagatcacttgaggtcaggagttcgagaccagcctggccaacatggtgaaatcctgtc

SEQ ID NO: 356124 - DNA, 6118 bp, Homo sapiens
ggtaattttttgttcagtagataaatatattgttatcttaaaaagattttttgtatttacttttgagactgggtctcagtctgttgcccaggctggagtgtagcagcctgatcatggctcagtgcagcctctacctccccgggctcaggtgatcctcccccttcagcctcctgagtagctgggactacagaggtgtggcaccatgcccggctaatttttgtattttttgtggagatggggttttgccatgttgcccaggctagtcttgaactcctggatgtgagccactgcgtctggcctattattttaaatatagttctctttactgccagtagctttcatataaccctagcgactagatttagtcaccactgcttaattccaaaaaacaaaagctccatcctatatttactgtaaatcagtctctttgattgtattgcatgttttatttcaagaaaaaagttaacctgaagatttaattttaaataactacacatgttgtcactaatagaaataacaaataattatatgagaataatggtaattctcctaagttttgtggtaaattttttggcaattttattgaagtataataaaattcaacaattcaatacgtctttataaatgttcattgtgatataggacagctctatcacagtactggggtaaattttaattatatttattaattacagatgtgaatttcttcggagtaagaaatcctcagaggaaattacccagtatattcaaagctacaagggatttgttgacataacgggagaacattttgtgaattcctgggtccagagagaattacctatggcatcagcttattgcaatgacagcatctttgcttacgaagaactacggctggactcttttaaggactggccccgggaatcagctgtgggagttgcagcactggccaaagcaggtcttttctacacaggtataaaggacatcgtccagtgcttttcctgtggagggtgtttagagaaatggcaggaaggtgatgacccattagacgatcacaccagatgttttcccaattgtccatttctccaaaatatgaagtcctctgcggaagtgactccagaccttcagagccgtggtgaactttgtgaattactggaaaccacaagtgaaagcaatcttgaagattcaatagcagttggtcctatagtgccagaaatggcacagggtgaagcccagtggtttcaagaggcaaagaatctgaatgagcagctgagagcagcttataccagcgccagtttccgccacatgtctttgcttgatatctcttccgatctggccacggaccacttgctgggctgtgatctgtctattgcttcaaaacacatcagcaaacctgtgcaagaacctctggtgctgcctgaggtctttggcaacttgaactctgtcatgtgtgtggagggtgaagctggaagtggaaagacggtcctcctgaagaaaatagcttttctgtgggcatctggatgctgtcccctgttaaacaggttccagctggttttctacctctcccttagttccaccagaccagacgaggggctggccagtatcatctgtgaccagctcctagagaaagaaggatctgttactgaaatgtgcatgaggaacattatccagcagttaaagaatcaggtcttattccttttagatgactacaaagaaatatgttcaatccctcaagtcataggaaaactgattcaaaaaaaccacttatcccggacctgcctattgattgctgtccgtacaaacagggccagggacatccgccgatacctagagaccattctagagatcaaagcatttcccttttataatactgtctgtatattacggaagctcttttcacataatatgactcgtctgcgaaagtttatggtttactttggaaagaaccaaagtttgcagaagatacagaaaactcctctctttgtggcggcgatctgtgctcattggtttcagtatccttttgacccatcctttgatgatgtggctgttttcaagtcctatatggaacgcctttccttaaggaacaaagcgacagctgaaattctcaaagcaactgtgtcctcctgtggtgagctggccttgaaagggtttttttcatgttgctttgagtttaatgatgatgatctcgcagaagcaggggttgatgaagatgaagatctaaccatgtgcttgatgagcaaatttacagcccagagactaagaccattctaccggtttttaagtcctgccttccaagaatttcttgcggggatgaggctgattgaactcctggattcagataggcaggaacatcaagatttgggactgtatcatttgaaacaaatcaactcacccatgatgactgtaagcgcctacaacaattttttgaactatgtctccagcctcccttcaacaaaagcagggcccaaaattgtgtctcatttgctccatttagtggataacaaagagtcattggagaatatatctgaaaatgatgactacttaaagcaccagccagaaatttcactgcagatgcagttacttaggggattgtggcaaatttgtccacaagcttacttttcaatggtttcagaacatttactggttcttgccctgaaaactgcttatcaaagcaacactgttgctgcgtgttctccatttgttttgcaattccttcaagggagaacactgactttgggtgcgcttaacttacagtactttttcgaccacccagaaagcttgtcattgttgaggagcatccacttcccaatacgaggaaataagacatcacccagagcacatttttcagttctggaaacatgttttgacaaatcacaggtgccaactatagatcaggactatgcttctgcctttgaacctatgaatgaatgggagcgaaatttagctgaaaaagaggataatgtaaagagctatatggatatgcagcgcagggcatcaccagaccttagtactggctattggaaactttctccaaagcagtacaagattccctgtctagaagtcgatgtgaatgatattgatgttgtaggccaggatatgcttgagattctaatgacagttttctcagcttcacagcgcatcgaactccatttaaaccacagcagaggctttatagaaagcatccgcccagctcttgagctgtctaaggcctctgtcaccaagtgctccataagcaagttggaactcagcgcagccgaacaggaactgcttctcaccctgccttccctggaatctcttgaagtctcagggacaatccagtcacaagaccaaatctttcctaatctggataagttcctgtgcctgaaagaactgtctgtggatctggagggcaatataaatgttttttcagtcattcctgaagaatttccaaacttccaccatatggagaaattattgatccaaatttcagctgagtatgatccttccaaactagtaaaattaattcaaaattctccaaaccttcatgttttccatctgaagtgtaacttcttttcggattttgggtctctcatgactatgcttgtttcctgtaagaaactcacagaaattaagttttcggattcattttttcaagccgtcccatttgttgccagtttgccaaattttatttctctgaagatattaaatcttgaaggccagcaatttcctgatgaggaaacatcagaaaaatttgcctacattttaggttctcttagtaacctggaagaattgatccttcctactggggatggaatttatcgagtggccaaactgatcatccagcagtgtcagcagcttcattgtctccgagtcctctcatttttcaagactttgaatgatgacagcgtggtggaaattgctttcaatcaatcacaagattacagaggaaggatacagaaatttctttcaagcactggacaacatgccaaacttgcaggagttggacatctccaggcatttcacagagtgtatcaaagctcaggccacaacagtcaagtctttgagtcaatgtgtgttacgactaccaaggctcattagactgaacatgttaagttggctcttggatgcagatgatattgcattgcttaatgtcatgaaagaaagacatcctcaatctaagtacttaactattctccagaaatggatactgccgttctctccaatcattcagaaataaaagattcagctaaaaactgctgaatcaataatttgtcttggggcatattgaggatgtaaaaaaagttgttgattaatgctaaaaaccaaattatccaaaattattttattaaatattgcatacaaaagaaaatgtgtaaggcttgctaaaaaacaaaacaaaacaaaacacagtcctgcatactcaccaccaagctcaagaaataaatcatcaccaatacctttgaggtccctgagtaatccaccccagctaaaggcaaacccttcaatcaagtttatacagcaaaccctccattgtccatggtcaacagggaaggggttggggacaggtctgccaatctatctaaaagccacaatatggaagaagtattcaatttatataataaatggctaacttaacggttgaatcactttcatacatggatgaaacgggtttaacacaggatccacatgaatcttctgtgggccaagagatgttccttaatccttgtagaacctgttttctatattgaactagctttggtacagtagagttaacttactttccatttatccactgccaatataaagaggaaacaggggttagggaaaaatgacttcattccagaggcttctcagagttcaacatatgctataatttagaattttcttatgaatccactctacttgggtagaaaatattttatctctagtgattgcatattatttccatatcatagtatttcatagtattatatttgatatgagtgtctatatcaatgtcagtgtccagaatttcgttcctaccagttaagtagttttctgaacggccagaagaccattcgaaattcatgatactactataagttggtaaacaaccatacttttatcctcatttttattctcactaagaaaaaagtcaactcccctccccttgcccaagtatgaaatatagggacagtatgtatggtgtggtctcatttgtttagaaaaccacttatgactgggtgcggtggctcacacctgtaatcccagcactttgggaggctgaggcgggcgaatcatttgaggtgaggaattcgagaccagcctggccagcatggtgaaaccccatctctactaaaaatacaaaaattagccaggtgtggtggcacatgcctgtagtcccagccactagggcggctgagacgcaagacttgcttgaacccgggaggcagaggttgcagtgagccaagatggcgccactgcattccagcctgggcaacagagcaagaccctgtctgtctcaaaacaaaaaacaaaaccacttatattgctagctacattaagaatttctgaatatgttactgagcttgcttgtggtaaccatttataatatcagaaagtatatgtacaccaaaacatgttgaacatccatgttgtacaactgaaatataaataattttgtcaattatacctaaataaaactggaaaaaaatttctggaagtttatatctaaaaatgttaatagtgcgtacctctaggaagtgggcctggaagccattcttacttttcagtctctcccattctgtactgttttttgttttactttcgtgcctgcattatttttctatttaaaacaaaaataaatctagtttagcactaaaatattaactggagctacctctggagggcaagagtactagaaggtgggatggattgtcttcttgcttgtctgattttatatgtaatacctttgtaattagaaaggttgttaagcattatatcagaatccagtcaggagacagaaaccacacagaaatttgaatggggaaagtttaatatacagatgctcggcctgacgcagtggctcacgcctgtaattccagcactttgggaggccgaggtgggcagatcacttgaggtcaggagttcgagaccagcctggccaacatggtgaaatcctgtc

SEQ ID NO: 356125 - DNA, 3092 bp, Homo sapiens
gctgtatttctttttgtgagtctgaagagtagcacagggcttcccatacagtgcataagctgcaaaaagcaatatcttcatatatgtattctttaaaaaaaaaaaagaatgttttatggtatgtggaaggtttgcatgtgaaaatagctggatgaatcaaaatgacagttttaaaatgtccattcagaactctttagattaataatgggaaactgtgctgctttccagaccaaatctttcctaatctggataagttcctgtgcctgaaagaactgtctgtggatctggagggcaatataaatgttttttcagtcattcctgaagaatttccaaacttccaccatatggagaaattattgatccaaatttcagctgagtatgatccttccaaactagtaaaattaattcaaaattctccaaaccttcatgttttccatctgaagtgtaacttcttttcggattttgggtctctcatgactatgcttgtttcctgtaagaaactcacagaaattaagttttcggattcattttttcaagccgtcccatttgttgccagtttgccaaattttatttctctgaagatattaaatcttgaaggccagcaatttcctgatgaggaaacatcagaaaaatttgcctacattttaggttctcttagtaacctggaagaattgatccttcctactggggatggaatttatcgagtggccaaactgatcatccagcagtgtcagcagcttcattgtctccgagtcctctcatttttcaagactttgaatgatgacagcgtggtggaaattgccaaagtagcaatcagtggaggtttccagaaacttgagaacctaaagctttcaatcaatcacaagattacagaggaaggatacagaaatttctttcaagcactggacaacatgccaaacttgcaggagttggacatctccaggcatttcacagagtgtatcaaagctcaggccacaacagtcaagtctttgagtcaatgtgtgttacgactaccaaggctcattagactgaacatgttaagttggctcttggatgcagatgatattgcattgcttaatgtcatgaaagaaagacatcctcaatctaagtacttaactattctccagaaatggatactgccgttctctccaatcattcagaaataaaagattcagctaaaaactgctgaatcaataatttgtcttggggcatattgaggatgtaaaaaaagttgttgattaatgctaaaaaccaaattatccaaaattattttattaaatattgcatacaaaagaaaatgtgtaaggcttgctaaaaaacaaaacaaaacaaaacacagtcctgcatactcaccaccaagctcaagaaataaatcatcaccaatacctttgaggtccctgagtaatccaccccagctaaaggcaaacccttcaatcaagtttatacagcaaaccctccattgtccatggtcaacagggaaggggttggggacaggtctgccaatctatctaaaagccacaatatggaagaagtattcaatttatataataaatggctaacttaacggttgaatcactttcatacatggatgaaacgggtttaacacaggatccacatgaatcttctgtgggccaagagatgttccttaatccttgtagaacctgttttctatattgaactagctttggtacagtagagttaacttactttccatttatccactgccaatataaagaggaaacaggggttagggaaaaatgacttcattccagaggcttctcagagttcaacatatgctataatttagaattttcttatgaatccactctacttgggtagaaaatattttatctctagtgattgcatattatttccatatcatagtatttcatagtattatatttgatatgagtgtctatatcaatgtcagtgtccagaatttcgttcctaccagttaagtagttttctgaacggccagaagaccattcgaaattcatgatactactataagttggtaaacaaccatacttttatcctcatttttattctcactaagaaaaaagtcaactcccctccccttgcccaagtatgaaatatagggacagtatgtatggtgtggtctcatttgtttagaaaaccacttatgactgggtgcggtggctcacacctgtaatcccagcactttgggaggctgaggcgggcgaatcatttgaggtgaggaattcgagaccagcctggccagcatggtgaaaccccatctctactaaaaatacaaaaattagccaggtgtggtggcacatgcctgtagtcccagccactagggcggctgagacgcaagacttgcttgaacccgggaggcagaggttgcagtgagccaagatggcgccactgcattccagcctgggcaacagagcaagaccctgtctgtctcaaaacaaaaaacaaaaccacttatattgctagctacattaagaatttctgaatatgttactgagcttgcttgtggtaaccatttataatatcagaaagtatatgtacaccaaaacatgttgaacatccatgttgtacaactgaaatataaataattttgtcaattatacctaaataaaactggaaaaaaatttctggaagtttatatctaaaaatgttaatagtgcgtacctctaggaagtgggcctggaagccattcttacttttcagtctctcccattctgtactgttttttgttttactttcgtgcctgcattatttttctatttaaaacaaaaataaatctagtttagcactaaaatattaactggagctacctctggagggcaagagtactagaaggtgggatggattgtcttcttgcttgtctgattttatatgtaatacctttgtaattagaaaggttgttaagcattatatcagaatccagtcaggagacagaaaccacacagaaatttgaatggggaaagtttaatatacagatgctcggcctgacgcagtggctcacgcctgtaattccagcactttgggaggccgaggtgggcagatcacttgaggtcaggagttcgagaccagcctggccaacatggtgaaatcctgtc

SEQ ID NO: 356126 - DNA, 3222 bp, Homo sapiens
caagcgattctcctgcctcggcctcccgagtagctgggattacagctgcctgccacccacgcctggcaaatgtttgtatttttagtagagacagggtttcaccatgttggccaggctggtctcgagctcctgagctcagatgatccacctgcctcggcctcccaaagtgctgggattacaggcatgagccacagcacctggcctctttgtattcttattgtgtaaatgtcatgtacaaacttagagttattaggtgttaaagctgaaggtgatgctactgagtcaatgcttgtattttatagaagagaaaactgttacccagagagggtcaataatgtgtcaaaattcacattacttgctagttgcagaacctgaacccaagcccagtgacctgattcttagatcatgagatcgtggtacctggttttaattaagtattattgaaacaaaataataaactacttggctaattttgatagaaatttgcagtattttctaatttctgaaaatccttgatcttttacagtaaaattaattcaaaattctccaaaccttcatgttttccatctgaagtgtaacttcttttcggattttgggtctctcatgactatgcttgtttcctgtaagaaactcacagaaattaagttttcggattcattttttcaagccgtcccatttgttgccagtttgccaaattttatttctctgaagatattaaatcttgaaggccagcaatttcctgatgaggaaacatcagaaaaatttgcctacattttaggttctcttagtaacctggaagaattgatccttcctactggggatggaatttatcgagtggccaaactgatcatccagcagtgtcagcagcttcattgtctccgagtcctctcatttttcaagactttgaatgatgacagcgtggtggaaattgccaaagtagcaatcagtggaggtttccagaaacttgagaacctaaagctttcaatcaatcacaagattacagaggaaggatacagaaatttctttcaagcactggacaacatgccaaacttgcaggagttggacatctccaggcatttcacagagtgtatcaaagctcaggccacaacagtcaagtctttgagtcaatgtgtgttacgactaccaaggctcattagactgaacatgttaagttggctcttggatgcagatgatattgcattgcttaatgtcatgaaagaaagacatcctcaatctaagtacttaactattctccagaaatggatactgccgttctctccaatcattcagaaataaaagattcagctaaaaactgctgaatcaataatttgtcttggggcatattgaggatgtaaaaaaagttgttgattaatgctaaaaaccaaattatccaaaattattttattaaatattgcatacaaaagaaaatgtgtaaggcttgctaaaaaacaaaacaaaacaaaacacagtcctgcatactcaccaccaagctcaagaaataaatcatcaccaatacctttgaggtccctgagtaatccaccccagctaaaggcaaacccttcaatcaagtttatacagcaaaccctccattgtccatggtcaacagggaaggggttggggacaggtctgccaatctatctaaaagccacaatatggaagaagtattcaatttatataataaatggctaacttaacggttgaatcactttcatacatggatgaaacgggtttaacacaggatccacatgaatcttctgtgggccaagagatgttccttaatccttgtagaacctgttttctatattgaactagctttggtacagtagagttaacttactttccatttatccactgccaatataaagaggaaacaggggttagggaaaaatgacttcattccagaggcttctcagagttcaacatatgctataatttagaattttcttatgaatccactctacttgggtagaaaatattttatctctagtgattgcatattatttccatatcatagtatttcatagtattatatttgatatgagtgtctatatcaatgtcagtgtccagaatttcgttcctaccagttaagtagttttctgaacggccagaagaccattcgaaattcatgatactactataagttggtaaacaaccatacttttatcctcatttttattctcactaagaaaaaagtcaactcccctccccttgcccaagtatgaaatatagggacagtatgtatggtgtggtctcatttgtttagaaaaccacttatgactgggtgcggtggctcacacctgtaatcccagcactttgggaggctgaggcgggcgaatcatttgaggtgaggaattcgagaccagcctggccagcatggtgaaaccccatctctactaaaaatacaaaaattagccaggtgtggtggcacatgcctgtagtcccagccactagggcggctgagacgcaagacttgcttgaacccgggaggcagaggttgcagtgagccaagatggcgccactgcattccagcctgggcaacagagcaagaccctgtctgtctcaaaacaaaaaacaaaaccacttatattgctagctacattaagaatttctgaatatgttactgagcttgcttgtggtaaccatttataatatcagaaagtatatgtacaccaaaacatgttgaacatccatgttgtacaactgaaatataaataattttgtcaattatacctaaataaaactggaaaaaaatttctggaagtttatatctaaaaatgttaatagtgcgtacctctaggaagtgggcctggaagccattcttacttttcagtctctcccattctgtactgttttttgttttactttcgtgcctgcattatttttctatttaaaacaaaaataaatctagtttagcactaaaatattaactggagctacctctggagggcaagagtactagaaggtgggatggattgtcttcttgcttgtctgattttatatgtaatacctttgtaattagaaaggttgttaagcattatatcagaatccagtcaggagacagaaaccacacagaaatttgaatggggaaagtttaatatacagatgctcggcctgacgcagtggctcacgcctgtaattccagcactttgggaggccgaggtgggcagatcacttgaggtcaggagttcgagaccagcctggccaacatggtgaaatcctgtc

SEQ ID NO: 356127 - DNA, 3835 bp, Homo sapiens
ggtaattttttgttcagtagataaatatattgttatcttaaaaagattttttgtatttacttttgagactgggtctcagtctgttgcccaggctggagtgtagcagcctgatcatggctcagtgcagcctctacctccccgggctcaggtgatcctcccccttcagcctcctgagtagctgggactacagaggtgtggcaccatgcccggctaatttttgtattttttgtggagatggggttttgccatgttgcccaggctagtcttgaactcctggatgtgagccactgcgtctggcctattattttaaatatagttctctttactgccagtagctttcatataaccctagcgactagatttagtcaccactgcttaattccaaaaaacaaaagctccatcctatatttactgtaaatcagtctctttgattgtattgcatgttttatttcaagaaaaaagttaacctgaagatttaattttaaataactacacatgttgtcactaatagaaataacaaataattatatgagaataatggtaattctcctaagttttgtggtaaattttttggcaattttattgaagtataataaaattcaacaattcaatacgtctttataaatgttcattgtgatataggacagctctatcacagtactggggtaaattttaattatatttattaattacagatgtgaatttcttcggagtaagaaatcctcagaggaaattacccagtatattcaaagctacaagggatttgttgacataacgggagaacattttgtgaattcctgggtccagagagaattacctatggcatcagcttattgcaatgacagcatctttgcttacgaagaactacggctggactcttttaaggactggccccgggaatcagctgtgggagttgcagcactggccaaagcaggtcttttctacacaggtataaaggacatcgtccagtgcttttcctgtggagggtgtttagagaaatggcaggaaggtgatgacccattagacgatcacaccagatgttttcccaattgtccatttctccaaaatatgaagtcctctgcggaagtgactccagaccttcagagccgtggtgaactttgtgaattactggaaaccacaagtgaaagcaatcttgaagattcaatagcagttggtcctatagtgccagaaatggcacagggtgaagcccagtggtttcaagaggcaaagaatctgaatgagcagctgagagcagcttataccagcgccagtttccgccacatgtctttgcttgatatctcttccgatctggccacggaccacttgctgggctgtgatctgtctattgcttcaaaacacatcagcaaacctgtgcaagaacctctggtgctgcctgaggtctttggcaacttgaactctgtcatgtgtgtggagggtgaagctggaagtggaaagacggtcctcctgaagaaaatagcttttctgtgggcatctggatgctgtcccctgttaaacaggttccagctggttttctacctctcccttagttccaccagaccagacgaggggctggccagtatcatctgtgaccagctcctagagaaagaaggatctgttactgaaatgtgcatgaggaacattatccagcagttaaagaatcaggtcttattccttttagatgactacaaagaaatatgttcaatccctcaagtcataggaaaactgattcaaaaaaaccacttatcccggacctgcctattgattgctgtccgtacaaacagggccagggacatccgccgatacctagagaccattctagagatcaaagcatttcccttttataatactgtctgtatattacggaagctcttttcacataatatgactcgtctgcgaaagtttatggtttactttggaaagaaccaaagtttgcagaagatacagaaaactcctctctttgtggcggcgatctgtgctcattggtttcagtatccttttgacccatcctttgatgatgtggctgttttcaagtcctatatggaacgcctttccttaaggaacaaagcgacagctgaaattctcaaagcaactgtgtcctcctgtggtgagctggccttgaaagggtttttttcatgttgctttgagtttaatgatgatgatctcgcagaagcaggggttgatgaagatgaagatctaaccatgtgcttgatgagcaaatttacagcccagagactaagaccattctaccggtttttaagtcctgccttccaagaatttcttgcggggatgaggctgattgaactcctggattcagataggcaggaacatcaagatttgggactgtatcatttgaaacaaatcaactcacccatgatgactgtaagcgcctacaacaattttttgaactatgtctccagcctcccttcaacaaaagcagggcccaaaattgtgtctcatttgctccatttagtggataacaaagagtcattggagaatatatctgaaaatgatgactacttaaagcaccagccagaaatttcactgcagatgcagttacttaggggattgtggcaaatttgtccacaagcttacttttcaatggtttcagaacatttactggttcttgccctgaaaactgcttatcaaagcaacactgttgctgcgtgttctccatttgttttgcaattccttcaagggagaacactgactttgggtgcgcttaacttacagtactttttcgaccacccagaaagcttgtcattgttgaggagcatccacttcccaatacgaggaaataagacatcacccagagcacatttttcagttctggaaacatgttttgacaaatcacaggtgccaactatagatcaggactatgcttctgcctttgaacctatgaatgaatgggagcgaaatttagctgaaaaagaggataatgtaaagagctatatggatatgcagcgcagggcatcaccagaccttagtactggctattggaaactttctccaaagcagtacaagattccctgtctagaagtcgatgtgaatgatattgatgttgtaggccaggatatgcttgagattctaatgacagttttctcagcttcacagcgcatcgaactccatttaaaccacagcagaggctttatagaaagcatccgcccagctcttgagctgtctaaggcctctgtcaccaagtgctccataagcaagttggaactcagcgcagccgaacaggaactgcttctcaccctgccttccctggaatctcttgaagtctcagggacaatccagtcacaaggtatacctgtatatattttggatgactattctgatgtataatttctttttcttactttaagaggttgaaaacttctgaggccatgaaagcatgcatgctcattgatagaacagatataaaataaaccttcactaattttttttgacagtagcatgaattagtgaaaagtccttgaataatagaatggttttcaaataactcagacaaaatgaataaaatatttatattaaattattgaaggttcttaataaagacatgaattatctgttattagtaaaagaattagctatatgtaagatgatgcttagaaattaccttcaccctagctgcctaaaggaagaaaggcctgtagtccctgggaaataaataaattaatgggaaataatatcttcatctatttgtgtcttaactcctctaagcactatttgatagttttcagtgtagacttaacccatctttcattaaatttattcctagatactcatatcttttgaaagtattgtaaatgtcattaaaaatattttttcattttct

SEQ ID NO: 356128 - DNA, 1593 bp, Homo sapiens
ggtaattttttgttcagtagataaatatattgttatcttaaaaagattttttgtatttacttttgagactgggtctcagtctgttgcccaggctggagtgtagcagcctgatcatggctcagtgcagcctctacctccccgggctcaggtgatcctcccccttcagcctcctgagtagctgggactacagaggtgtggcaccatgcccggctaatttttgtattttttgtggagatggggttttgccatgttgcccaggctagtcttgaactcctggatgtgagccactgcgtctggcctattattttaaatatagttctctttactgccagtagctttcatataaccctagcgactagatttagtcaccactgcttaattccaaaaaacaaaagctccatcctatatttactgtaaatcagtctctttgattgtattgcatgttttatttcaagaaaaaagttaacctgaagatttaattttaaataactacacatgttgtcactaatagaaataacaaataattatatgagaataatggtaattctcctaagttttgtggtaaattttttggcaattttattgaagtataataaaattcaacaattcaatacgtctttataaatgttcattgtgatataggacagctctatcacagtactggggtaaattttaattatatttattaattacagatgtgaatttcttcggagtaagaaatcctcagaggaaattacccagtatattcaaagctacaagggatttgttgacataacggtaatgtataacagcaatttttttctcaagtttttggattacctgtaagtgtctgactcagaagggcataggcattctttttatgtcatgggtttgatttctttcttcctttctcctttcattcccctggctcccatcttcaaagtgaaaaatatcacattcacttgctgacctagagcctttttctttttccagggctggcttctgacgggctctgcttgccttcctgatagtcttcccctttatgaatgaagccacttgccccagcttccctctgctgcccctatctgcaggcttgctaagatctcctgacctaggcgctgtcacccacagtgggctgcagagctggctcttcctagctggctaactatcctgaatcagtaaaaatttcctagtggagagtgatgggaaatcgaatccaaactggcttaaacaaaaatgagaatttattgattaacatgactcaggagaccagaactctatagagaacatggcctgacagtgggggaagagaggtgtttcctcaaaaagaaactgggtgcagctttcccagaagaatcagttgctcaatatataataccctgatgaatttagttaccattctatgtctcttacttcctcattcgtcaaagtacatctgtgatatttaaatgcaggtctgttttcaaggtcagtttccggaaacagtgaccctgagaaggcttcctcctgagtatgcataaacacacacacacacacacacgcacgcacgcacaccccttcatatgccaaaatgacattaagtttcatttaaaaatataaaaatattgaaagagc

SEQ ID NO: 356129 - DNA, 1656 bp, Homo sapiens
ggtaattttttgttcagtagataaatatattgttatcttaaaaagattttttgtatttacttttgagactgggtctcagtctgttgcccaggctggagtgtagcagcctgatcatggctcagtgcagcctctacctccccgggctcaggtgatcctcccccttcagcctcctgagtagctgggactacagaggtgtggcaccatgcccggctaatttttgtattttttgtggagatggggttttgccatgttgcccaggctagtcttgaactcctggatgtgagccactgcgtctggcctattattttaaatatagttctctttactgccagtagctttcatataaccctagcgactagatttagtcaccactgcttaattccaaaaaacaaaagctccatcctatatttactgtaaatcagtctctttgattgtattgcatgttttatttcaagaaaaaagttaacctgaagatttaattttaaataactacacatgttgtcactaatagaaataacaaataattatatgagaataatggtaattctcctaagttttgtggtaaattttttggcaattttattgaagtataataaaattcaacaattcaatacgtctttataaatgttcattgtgatataggacagctctatcacagtactggggtaaattttaattatatttattaattacagatgtgaatttcttcggagtaagaaatcctcagaggaaattacccagtatattcaaagctacaagggatttgttgacataacggtaatgtataacagcaatttttttctcaagtttttggattacctgtaagtgtctgactcagaagggcataggcattctttttatgtcatgggtttgatttctttcttcctttctcctttcattcccctggctcccatcttcaaagtgaaaaatatcacattcacttgctgacctagagcctttttctttttccagggctggcttctgacgggctctgcttgccttcctgatagtcttcccctttatgaatgaagccacttgccccagcttccctctgctgcccctatctgcaggcttgctaagatctcctgacctaggcgctgtcacccacagtgggctgcagagctggctcttcctagctggctaactatcctgaatcagtaaaaatttcctagtggagagtgatgggaaatcgaatccaaactggcttaaacaaaaatgagaatttattgattaacatgactcaggagaccagaactctatagagaacatggcctgacagtgggggaagagaggtgtttcctcaaaaagaaactgggtgcagctttcccagaagaatcagttgctcaatatataataccctgatgaatttagttaccattctatgtctcttacttcctcattcgtcaaagtacatctgtgatatttaaatgcaggtctgttttcaaggtcagtttccggaaacagtgaccctgagaaggcttcctcctgagtatgcataaacattcacagcttgcatgcgtgtgtgtgtgtgtgtgtgtgtgtgtgtgtgtgtgtgtatgtttgcttgcactgcataaaaacaattgcaacatcaacagaaataaaaattaaaggaataattctcctccgactctgccgttccatccagtgaaactc

SEQ ID NO: 356130 - DNA, 2190 bp, Homo sapiens
ggtaattttttgttcagtagataaatatattgttatcttaaaaagattttttgtatttacttttgagactgggtctcagtctgttgcccaggctggagtgtagcagcctgatcatggctcagtgcagcctctacctccccgggctcaggtgatcctcccccttcagcctcctgagtagctgggactacagaggtgtggcaccatgcccggctaatttttgtattttttgtggagatggggttttgccatgttgcccaggctagtcttgaactcctggatgtgagccactgcgtctggcctattattttaaatatagttctctttactgccagtagctttcatataaccctagcgactagatttagtcaccactgcttaattccaaaaaacaaaagctccatcctatatttactgtaaatcagtctctttgattgtattgcatgttttatttcaagaaaaaagttaacctgaagatttaattttaaataactacacatgttgtcactaatagaaataacaaataattatatgagaataatggtaattctcctaagttttgtggtaaattttttggcaattttattgaagtataataaaattcaacaattcaatacgtctttataaatgttcattgtgatataggacagctctatcacagtactggggtaaattttaattatatttattaattacagatgtgaatttcttcggagtaagaaatcctcagaggaaattacccagtatattcaaagctacaagggatttgttgacataacgggagaacattttgtgaattcctgggtccagagagaattacctatggcatcagcttattgcaatgacagcatctttgcttacgaagaactacggctggactcttttaaggactggccccgggaatcagctgtgggagttgcagcactggccaaagcaggtcttttctacacaggtataaaggacatcgtccagtgcttttcctgtggagggtgtttagagaaatggcaggaaggtgatgacccattagacgatcacaccagatgttttcccaattgtccatttctccaaaatatgaagtcctctgcggaagtgactccagaccttcagagccgtggtgaactttgtgaattactggaaaccacaagtgaaagcaatcttgaagattcaatagcagttggtcctatagtgccaggtaagaactttgaagtagcacgtgggattatatgtatttgtaaatatatttgtatacagggcagttgcaaaaaaaagagtatttataattgtccaaagagcttccaaagaggagcagcattgcaacagtgtcgtgtatgagcaaaagtcaagattcttgtggcttctccagagtgcaggcaggaccaaactgatagtaggcaacgtgtctcaggtacaagcaaaccagtccttagaagcaccaatcagtaaacttctttcctgagatttttatttttattcattttattttattttattttattccagcctgggcaacagagcaagaccctgtctgtctcaaaacaaaaaacaaaaccacttatattgctagctacattaagaatttctgaatatgttactgagcttgcttgtggtaaccatttataatatcagaaagtatatgtacaccaaaacatgttgaacatccatgttgtacaactgaaatataaataattttgtcaattatacctaaataaaactggaaaaaaatttctggaagtttatatctaaaaatgttaatagtgcgtacctctaggaagtgggcctggaagccattcttacttttcagtctctcccattctgtactgttttttgttttactttcgtgcctgcattatttttctatttaaaacaaaaataaatctagtttagcactaaaatattaactggagctacctctggagggcaagagtactagaaggtgggatggattgtcttcttgcttgtctgattttatatgtaatacctttgtaattagaaaggttgttaagcattatatcagaatccagtcaggagacagaaaccacacagaaatttgaatggggaaagtttaatatacagatgctcggcctgacgcagtggctcacgcctgtaattccagcactttgggaggccgaggtgggcagatcacttgaggtcaggagttcgagaccagcctggccaacatggtgaaatcctgtc

SEQ ID NO: 356131 - DNA, 1094 bp, Homo sapiens
aattttgatttaagaaaagattttatttttcaaaggaaaccacaagtgaaagcaatcttgaagattcaatagcagttggtcctatagtgccaggtaagaactttgaagtagcacgtgggattatatgtatttgtaaatatatttgtatacagggcagttgcaaaaaaaagagtatttataattgtccaaagagcttccaaagaggagcagcattgcaacagtgtcgtgtatgagcaaaagtcaagattcttgtggcttctccagagtgcaggcaggaccaaactgatagtaggcaacgtgtctcaggtacaagcaaaccagtccttagaagcaccaatcagtaaacttctttcctgagatttttatttttattcattttattttattttattttattccagcctgggcaacagagcaagaccctgtctgtctcaaaacaaaaaacaaaaccacttatattgctagctacattaagaatttctgaatatgttactgagcttgcttgtggtaaccatttataatatcagaaagtatatgtacaccaaaacatgttgaacatccatgttgtacaactgaaatataaataattttgtcaattatacctaaataaaactggaaaaaaatttctggaagtttatatctaaaaatgttaatagtgcgtacctctaggaagtgggcctggaagccattcttacttttcagtctctcccattctgtactgttttttgttttactttcgtgcctgcattatttttctatttaaaacaaaaataaatctagtttagcactaaaatattaactggagctacctctggagggcaagagtactagaaggtgggatggattgtcttcttgcttgtctgattttatatgtaatacctttgtaattagaaaggttgttaagcattatatcagaatccagtcaggagacagaaaccacacagaaatttgaatggggaaagtttaatatacagatgctcggcctgacgcagtggctcacgcctgtaattccagcactttgggaggccgaggtgggcagatcacttgaggtcaggagttcgagaccagcctggccaacatggtgaaatcctgtc

SEQ ID NO: 356132 - DNA, 1709 bp, Homo sapiens
aaagcttcatgaatggaggcagatgggtgtctgtcttgttggttgctagatccccaatgtctagcactgtacctgatatatagtaggtgcttagtaaatatttgttgattaagtagatgaatactgatgtttcataattttccaacaatttatcttttgtgttgaaattccaggcattcctttaattcctggtttcttcggaaacagtgggaaatgctcttctaagaaaaatcttactataagggatcaacctgctttattttccttttcagaaaatggccacccagcagaaagcctctgacgagaggatctcccagtttgatcacaatttgctgccagagctgtctgctcttctgggcctagatgcagttcagttggcaaaggaactagaagaagaggagcagaaggagcgagcaaaaatgcagaaaggctacaactctcaaatgcgcagtgaagcaaaaaggttaaagacttttgtgacttatgagccgtacagctcatggataccacaggagatggcggccgctgggttttacttcactggggtaaaatctgggattcagtgcttctgctgtagcctaatcctctttggtgccggcctcacgagactccccatagaagaccacaagaggtttcatccagattgtgggttccttttgaacaaggatgttggtaacattgccaagtacgacataagggtgaagaatctgaagagcaggctgagaggaggtaaaatgaggtaccaagaagaggaggctagacttgcgtccttcaggaactggccattttatgtccaagggatatccccttgtgtgctctcagaggctggctttgtctttacaggtaaacaggacacggtacagtgtttttcctgtggtggatgtttaggaaattgggaagaaggagatgatccttggaaggaacatgccaaatggttccccaaatgtgaatttcttcggagtaagaaatcctcagaggaaattacccagtatattcaaagctacaagggatttgttgacataacgggctggcttctgacgggctctgcttgccttcctgatagtcttcccctttatgaatgaagccacttgccccagcttccctctgctgcccctatctgcaggcttgctaagatctcctgacctaggcgctgtcacccacagtgggctgcagagctggctcttcctagctggctaactatcctgaatcagtaaaaatttcctagtggagagtgatgggaaatcgaatccaaactggcttaaacaaaaatgagaatttattgattaacatgactcaggagaccagaactctatagagaacatggcctgacagtgggggaagagaggtgtttcctcaaaaagaaactgggtgcagctttcccagaagaatcagttgctcaatatataataccctgatgaatttagttaccattctatgtctcttacttcctcattcgtcaaagtacatctgtgatatttaaatgcaggtctgttttcaaggtcagtttccggaaacagtgaccctgagaaggcttcctcctgagtatgcataaacattcacagcttgcatgcgtgtgtgtgtgtgtgtgtgtgtgtgtgtgtgtgtgtgtatgtttgcttgcactgcataaaaacaattgcaacatcaacagaaataaaaattaaaggaataattctcctccgactctgccgttccatccagtgaaactc

SEQ ID NO: 356133 - DNA, 908 bp, Homo sapiens
tgttgacataacgggtaatgtataacaaatcccttgtagctttgaatatactggggtatattcaaagctacaagggatttgttgacataacggtaatgtataacagcaatttttttctcaagtttttggattacctgtaagtgtctgactcagaagggcataggcattctttttatgtcatgggtttgatttctttcttcctttctcctttcattcccctggctcccatcttcaaagtgaaaaatatcacattcacttgctgacctagagcctttttctttttccagggctggcttctgacgggctctgcttgccttcctgatagtcttcccctttatgaatgaagccacttgccccagcttccctctgctgcccctatctgcaggcttgctaagatctcctgacctaggcgctgtcacccacagtgggctgcagagctggctcttcctagctggctaactatcctgaatcagtaaaaatttcctagtggagagtgatgggaaatcgaatccaaactggcttaaacaaaaatgagaatttattgattaacatgactcaggagaccagaactctatagagaacatggcctgacagtgggggaagagaggtgtttcctcaaaaagaaactgggtgcagctttcccagaagaatcagttgctcaatatataataccctgatgaatttagttaccattctatgtctcttacttcctcattcgtcaaagtacatctgtgatatttaaatgcaggtctgttttcaaggtcagtttccggaaacagtgaccctgagaaggcttcctcctgagtatgcataaacacacacacacacacacacgcacgcacgcacaccccttcatatgccaaaatgacattaagtttcatttaaaaatataaaaatattgaaagagc

SEQ ID NO: 356134 - DNA, 1740 bp, Homo sapiens
ggtaattttttgttcagtagataaatatattgttatcttaaaaagattttttgtatttacttttgagactgggtctcagtctgttgcccaggctggagtgtagcagcctgatcatggctcagtgcagcctctacctccccgggctcaggtgatcctcccccttcagcctcctgagtagctgggactacagaggtgtggcaccatgcccggctaatttttgtattttttgtggagatggggttttgccatgttgcccaggctagtcttgaactcctggatgtgagccactgcgtctggcctattattttaaatatagttctctttactgccagtagctttcatataaccctagcgactagatttagtcaccactgcttaattccaaaaaacaaaagctccatcctatatttactgtaaatcagtctctttgattgtattgcatgttttatttcaagaaaaaagttaacctgaagatttaattttaaataactacacatgttgtcactaatagaaataacaaataattatatgagaataatggtaattctcctaagttttgtggtaaattttttggcaattttattgaagtataataaaattcaacaattcaatacgtctttataaatgttcattgtgatataggacagctctatcacagtactggggtaaattttaattatatttattaattacagatgtgaatttcttcggagtaagaaatcctcagaggaaattacccagtatattcaaagctacaagggatttgttgacataacgggagaacattttgtgaattcctgggtccagagagaattacctatggcatcagcttattgcaatgacagcatctttgcttacgaagaactacggctggactcttttaaggactggccccgggaatcagctgtgggagttgcagcactggccaaagcaggtcttttctacacaggtataaaggacatcgtccagtgcttttcctgtggagggtgtttagagaaatggcaggaaggtgatgacccattagacgatcacaccagatgttttcccaatagagacggggtttcaccgtgttagccaggatggtctccatctcctgacctcgtgatccacccgcctcagcctcccaaagtgctctgattacaggcgtgagccaccgcgcccggccagccatctgcttaatttttatgtacattgcttatttttgtttcttgagataaaattcatgtattaataattttatttatttaaatgaaataaatgaagacgaacaccagctcatcttcaacttatcccaaatgtttaaatctcctcttaagtcattcagacctaccagatatctcatcattttcatttcttgaaagagtcatcattttttttttctttttcttttttttttgagacggagtctggctctgtcacccaggctggagtgcagtggcatgatctcggctcactgcagactctgcctcccaggttcaagcaattcttcctgcctcagcatcccaagtagctgggactacaggcatgcaccactatgcctggctaatttttgtatttttaatagagatggagttttgccacgttggccaggctagtttcaaactcctgacctcaagtgatccgcctgcctcagcctcccaaagtgctggtattacaggcgtgagccactgcggctggtccattttcatcttgaaatgagtttccctggaagtcttctggcctgctggattatgaacaact

SEQ ID NO: 356135 - DNA, 1659 bp, Homo sapiens
ggtaattttttgttcagtagataaatatattgttatcttaaaaagattttttgtatttacttttgagactgggtctcagtctgttgcccaggctggagtgtagcagcctgatcatggctcagtgcagcctctacctccccgggctcaggtgatcctcccccttcagcctcctgagtagctgggactacagaggtgtggcaccatgcccggctaatttttgtattttttgtggagatggggttttgccatgttgcccaggctagtcttgaactcctggatgtgagccactgcgtctggcctattattttaaatatagttctctttactgccagtagctttcatataaccctagcgactagatttagtcaccactgcttaattccaaaaaacaaaagctccatcctatatttactgtaaatcagtctctttgattgtattgcatgttttatttcaagaaaaaagttaacctgaagatttaattttaaataactacacatgttgtcactaatagaaataacaaataattatatgagaataatggtaattctcctaagttttgtggtaaattttttggcaattttattgaagtataataaaattcaacaattcaatacgtctttataaatgttcattgtgatataggacagctctatcacagtactggggtaaattttaattatatttattaattacagatgtgaatttcttcggagtaagaaatcctcagaggaaattacccagtatattcaaagctacaagggatttgttgacataacgggagaacattttgtgaattcctgggtccagagagaattacctatggcatcagcttattgcaatgacagcatctttgcttacgaagaactacggctggactcttttaaggactggccccgggaatcagctgtgggagttgcagcactggccaaagcaggtcttttctacacaggtataaaggacatcgtccagtgcttttcctgtggagggtgtttagagaaatggcaggaaggtgatgacccattagacgatcacaccagatgttttcccaatagagacggggtttcaccgtgttagccaggatggtctccatctcctgacctcgtgatccacccgcctcagcctcccaaagtgctctgattacaggcgtgagccaccgcgcccggccagccatctgcttaatttttatgtacattgcttatttttgtttcttgagataaaattcatgtattaataattttatttatttaaatgaaataaatgaagacgaacaccagctcatcttcaacttatcccaaatgtttaaatctcctcttaagtcattcagacctaccagatatctcatcattttcatttcttgaaagagtcatcattttttttttctttttcttttttttttgagacggagtctggctctgtcacccaggctggagtctctttaaaaaaagaaagaaagaaaagaaaaattgtttctcaaataataaagtataggtgtttccagaattttcttttttacctttacgctcagttggatttgaaatttctagaattttaacaacatttctagttatcagaattattttctgagcaaaaatttgttttatctacttagtcatatgaattcaatctgaattattacattaatttctaatttcttcattt

SEQ ID NO: 356136 - DNA, 1067 bp, Homo sapiens
ggtaattttttgttcagtagataaatatattgttatcttaaaaagattttttgtatttacttttgagactgggtctcagtctgttgcccaggctggagtgtagcagcctgatcatggctcagtgcagcctctacctccccgggctcaggtgatcctcccccttcagcctcctgagtagctgggactacagaggtgtggcaccatgcccggctaatttttgtattttttgtggagatggggttttgccatgttgcccaggctagtcttgaactcctggatgtgagccactgcgtctggcctattattttaaatatagttctctttactgccagtagctttcatataaccctagcgactagatttagtcaccactgcttaattccaaaaaacaaaagctccatcctatatttactgtaaatcagtctctttgattgtattgcatgttttatttcaagaaaaaagttaacctgaagatttaattttaaataactacacatgttgtcactaatagaaataacaaataattatatgagaataatggtaattctcctaagttttgtggtaaattttttggcaattttattgaagtataataaaattcaacaattcaatacgtctttataaatgttcattgtgatataggacagctctatcacagtactggggtaaattttaattatatttattaattacagatgtgaatttcttcggagtaagaaatcctcagaggaaattacccagtatattcaaagctacaagggatttgttgacataacgggagaacattttgtgaattcctgggtccagagagaattacctatggcatcagcttattgcaatgacagcatctttgcttacgaagaactacggctggactcttttaaggactggccccgggaatcagctgtgggagttgcagcactggccaaagcaggtcttttctacacaggtgagtcagtaggttgtgcccacttgcttgcttgacctttaattcccacatagactttatgctcctgggcttacgtttagctacactcagcaatgtccactagcttcagcgtttcttt

SEQ ID NO: 356137 - DNA, 1021 bp, Homo sapiens
  misc_feature (967)..(967): n is a, c, g, or t
  misc_feature (969)..(969): n is a, c, g, or t
tgcatgaagacaaaaggtcctgtgctcacctgggacccttctggacgttgccctgtgtacctcttcgactgcctgttcatctacgacgaaccccgggtattgaccccagacaacaatgccacttcatattggggacttcgtctgggattccaaggtgcattcattgcaaagttccttaaatattttctcactgcttcctactaaaggacggacagagcatttgttcttcagccacatactttccttccactggccagcattctcctctattagactagaactgtggataaacctcagatgtgaatttcttcggagtaagaaatcctcagaggaaattacccagtatattcaaagctacaagggatttgttgacataacgggagaacattttgtgaattcctgggtccagagagaattacctatggcatcagcttattgcaatgacagcatctttgcttacgaagaactacggctggactcttttaaggactggccccgggaatcagctgtgggagttgcagcactggccaaagcaggtcttttctacacaggtataaaggacatcgtccagtgcttttcctgtggagggtgtttagagaaatggcaggaaggtgatgacccattagacgatcacaccagatgttttcccaaacggagtctggctctgtcacccaggctggagtgcagtggcatgatctcggctcactgcagactctgcctcccaggttcaagcaattcttcctgcctcagcatcccaagtagctgggactacaggcatgcaccactatgcctggctaatttttgtatttttaatagagatggagttttgccacgttggccaggctagtttcaaactcctgacctcaagtgatccgcctgcctcagcctcccaaagtgctggtattacaggcgtgagccactgcggctggtccattttcatcttgggagtcatcaatcattttcaccntncttgaaatgagtttccctggaagtcttctggcctgctggattatgaacaact

SEQ ID NO: 356138 - DNA, 221 bp, Homo sapiens
ctaagtgatggcacctccattaaaaaataaaccacaggtttggagagctttcggtttggttaaccccaaccacataccaagaaggcgatgcacctcaaactgcatgaagacaaaaggtcctgtgctcacctgggacccttctggacgttgccctgtgtacctcttcgactgcctgttcatctgtatcctttataataaagcagtaaacataagtaaagttt

SEQ ID NO: 356139 - DNA, 6165 bp, Homo sapiens
ggtaattttttgttcagtagataaatatattgttatcttaaaaagattttttgtatttacttttgagactgggtctcagtctgttgcccaggctggagtgtagcagcctgatcatggctcagtgcagcctctacctccccgggctcaggtgatcctcccccttcagcctcctgagtagctgggactacagaggtgtggcaccatgcccggctaatttttgtattttttgtggagatggggttttgccatgttgcccaggctagtcttgaactcctggatgtgagccactgcgtctggcctattattttaaatatagttctctttactgccagtagctttcatataaccctagcgactagatttagtcaccactgcttaattccaaaaaacaaaagctccatcctatatttactgtaaatcagtctctttgattgtattgcatgttttatttcaagaaaaaagttaacctgaagatttaattttaaataactacacatgttgtcactaatagaaataacaaataattatatgagaataatggtaattctcctaagttttgtggtaaattttttggcaattttattgaagtataataaaattcaacaattcaatacgtctttataaatgttcattgtgatataggacagctctatcacagtactggggtaaattttaattatatttattaattacagatgtgaatttcttcggagtaagaaatcctcagaggaaattacccagtatattcaaagctacaagggatttgttgacataacgggagaacattttgtgaattcctgggtccagagagaattacctatggcatcagcttattgcaatgacagcatctttgcttacgaagaactacggctggactcttttaaggactggccccgggaatcagctgtgggagttgcagcactggccaaagcaggtcttttctacacaggtataaaggacatcgtccagtgcttttcctgtggagggtgtttagagaaatggcaggaaggtgatgacccattagacgatcacaccagatgttttcccaattgtccatttctccaaaatatgaagtcctctgcggaagtgactccagaccttcagagccgtggtgaactttgtgaattactggaaaccacaagtgaaagcaatcttgaagattcaatagcagttggtcctatagtgccagaaatggcacagggtgaagcccagtggtttcaagaggcaaagaatctgaatgagcagctgagagcagcttataccagcgccagtttccgccacatgtctttgcttgatatctcttccgatctggccacggaccacttgctgggctgtgatctgtctattgcttcaaaacacatcagcaaacctgtgcaagaacctctggtgctgcctgaggtctttggcaacttgaactctgtcatgtgtgtggagggtgaagctggaagtggaaagacggtcctcctgaagaaaatagcttttctgtgggcatctggatgctgtcccctgttaaacaggttccagctggttttctacctctcccttagttccaccagaccagacgaggggctggccagtatcatctgtgaccagctcctagagaaagaaggatctgttactgaaatgtgcatgaggaacattatccagcagttaaagaatcaggtcttattccttttagatgactacaaagaaatatgttcaatccctcaagtcataggaaaactgattcaaaaaaaccacttatcccggacctgcctattgattgctgtccgtacaaacagggccagggacatccgccgatacctagagaccattctagagatcaaagcatttcccttttataatactgtctgtatattacggaagctcttttcacataatatgactcgtctgcgaaagtttatggtttactttggaaagaaccaaagtttgcagaagatacagaaaactcctctctttgtggcggcgatctgtgctcattggtttcagtatccttttgacccatcctttgatgatgtggctgttttcaagtcctatatggaacgcctttccttaaggaacaaagcgacagctgaaattctcaaagcaactgtgtcctcctgtggtgagctggccttgaaagggtttttttcatgttgctttgagtttaatgatgatgatctcgcagaagcaggggttgatgaagatgaagatctaaccatgtgcttgatgagcaaatttacagcccagagactaagaccattctaccggtttttaagtcctgccttccaagaatttcttgcggggatgaggctgattgaactcctggattcagataggcaggaacatcaagatttgggactgtatcatttgaaacaaatcaactcacccatgatgactgtaagcgcctacaacaattttttgaactatgtctccagcctcccttcaacaaaagcagggcccaaaattgtgtctcatttgctccatttagtggataacaaagagtcattggagaatatatctgaaaatgatgactacttaaagcaccagccagaaatttcactgcagatgcagttacttaggggattgtggcaaatttgtccacaagcttacttttcaatggtttcagaacatttactggttcttgccctgaaaactgcttatcaaagcaacactgttgctgcgtgttctccatttgttttgcaattccttcaagggagaacactgactttgggtgcgcttaacttacagtactttttcgaccacccagaaagcttgtcattgttgaggagcatccacttcccaatacgaggaaataagacatcacccagagcacatttttcagttctggaaacatgttttgacaaatcacaggtgccaactatagatcaggactatgcttctgcctttgaacctatgaatgaatgggagcgaaatttagctgaaaaagaggataatgtaaagagctatatggatatgcagcgcagggcatcaccagaccttagtactggctattggaaactttctccaaagcagtacaagattccctgtctagaagtcgatgtgaatgatattgatgttgtaggccaggatatgcttgagattctaatgacagttttctcagcttcacagcgcatcgaactccatttaaaccacagcagaggctttatagaaagcatccgcccagctcttgagctgtctaaggcctctgtcaccaagtgctccataagcaagttggaactcagcgcagccgaacaggaactgcttctcaccctgccttccctggaatctcttgaagtctcagggacaatccagtcacaagaccaaatctttcctaatctggataagttcctgtgcctgaaagaactgtctgtggatctggagggcaatataaatgttttttcagtcattcctgaagaatttccaaacttccaccatatggagaaattattgatccaaatttcagctgagtatgatccttccaaactagtaaaattaattcaaaattctccaaaccttcatgttttccatctgaagtgtaacttcttttcggattttgggtctctcatgactatgcttgtttcctgtaagaaactcacagaaattaagttttcggattcattttttcaagccgtcccatttgttgccagtttgccaaattttatttctctgaagatattaaatcttgaaggccagcaatttcctgatgaggaaacatcagaaaaatttgcctacattttaggttctcttagtaacctggaagaattgatccttcctactggggatggaatttatcgagtggccaaactgatcatccagcagtgtcagcagcttcattgtctccgagtcctctcatttttcaagactttgaatgatgacagcgtggtggaaattgccaaagtagcaatcagtggaggtttccagaaacttgagaacctaaagctttcaatcaatcacaagattacagaggaaggatacagaaatttctttcaagcactggacaacatgccaaacttgcaggagttggacatctccaggcatttcacagagtgtatcaaagctcaggccacaacagtcaagtctttgagtcaatgtgtgttacgactaccaaggctcattagactgaacatgttaagttggctcttggatgcagatgatattgcattgcttaatgtcatgaaagaaagacatcctcaatctaagtacttaactattctccagaaatggatactgccgttctctccaatcattcagaaataaaagattcagctaaaaactgctgaatcaataatttgtcttggggcatattgaggatgtaaaaaaagttgttgattaatgctaaaaaccaaattatccaaaattattttattaaatattgcatacaaaagaaaatgtgtaaggcttgctaaaaaacaaaacaaaacaaaacacagtcctgcatactcaccaccaagctcaagaaataaatcatcaccaatacctttgaggtccctgagtaatccaccccagctaaaggcaaacccttcaatcaagtttatacagcaaaccctccattgtccatggtcaacagggaaggggttggggacaggtctgccaatctatctaaaagccacaatatggaagaagtattcaatttatataataaatggctaacttaacggttgaatcactttcatacatggatgaaacgggtttaacacaggatccacatgaatcttctgtgggccaagagatgttccttaatccttgtagaacctgttttctatattgaactagctttggtacagtagagttaacttactttccatttatccactgccaatataaagaggaaacaggggttagggaaaaatgacttcattccagaggcttctcagagttcaacatatgctataatttagaattttcttatgaatccactctacttgggtagaaaatattttatctctagtgattgcatattatttccatatcatagtatttcatagtattatatttgatatgagtgtctatatcaatgtcagtgtccagaatttcgttcctaccagttaagtagttttctgaacggccagaagaccattcgaaattcatgatactactataagttggtaaacaaccatacttttatcctcatttttattctcactaagaaaaaagtcaactcccctccccttgcccaagtatgaaatatagggacagtatgtatggtgtggtctcatttgtttagaaaaccacttatgactgggtgcggtggctcacacctgtaatcccagcactttgggaggctgaggcgggcgaatcatttgaggtgaggaattcgagaccagcctggccagcatggtgaaaccccatctctactaaaaatacaaaaattagccaggtgtggtggcacatgcctgtagtcccagccactagggcggctgagacgcaagacttgcttgaacccgggaggcagaggttgcagtgagccaagatggcgccactgcattccagcctgggcaacagagcaagaccctgtctgtctcaaaacaaaaaacaaaaccacttatattgctagctacattaagaatttctgaatatgttactgagcttgcttgtggtaaccatttataatatcagaaagtatatgtacaccaaaacatgttgaacatccatgttgtacaactgaaatataaataattttgtcaattatacctaaataaaactggaaaaaaatttctggaagtttatatctaaaaatgttaatagtgcgtacctctaggaagtgggcctggaagccattcttacttttcagtctctcccattctgtactgttttttgttttactttcgtgcctgcattatttttctatttaaaacaaaaataaatctagtttagcactaaaatattaactggagctacctctggagggcaagagtactagaaggtgggatggattgtcttcttgcttgtctgattttatatgtaatacctttgtaattagaaaggttgttaagcattatatcagaatccagtcaggagacagaaaccacacagaaatttgaatggggaaagtttaatatacagatgctcggcctgacgcagtggctcacgcctgtaattccagcactttgggaggccgaggtgggcagatcacttgaggtcaggagttcgagaccagcctggccaacatggtgaaatcctgtc

SEQ ID NO: 356140 - DNA, 6413 bp, Homo sapiens
aaagcttcatgaatggaggcagatgggtgtctgtcttgttggttgctagatccccaatgtctagcactgtacctgatatatagtaggtgcttagtaaatatttgttgattaagtagatgaatactgatgtttcataattttccaacaatttatcttttgtgttgaaattccaggcattcctttaattcctggtttcttcggaaacagtgggaaatgctcttctaagaaaaatcttactataagggatcaacctgctttattttccttttcagaaaatggccacccagcagaaagcctctgacgagaggatctcccagtttgatcacaatttgctgccagagctgtctgctcttctgggcctagatgcagttcagttggcaaaggaactagaagaagaggagcagaaggagcgagcaaaaatgcagaaaggctacaactctcaaatgcgcagtgaagcaaaaaggttaaagacttttgtgacttatgagccgtacagctcatggataccacaggagatggcggccgctgggttttacttcactggggtaaaatctgggattcagtgcttctgctgtagcctaatcctctttggtgccggcctcacgagactccccatagaagaccacaagaggtttcatccagattgtgggttccttttgaacaaggatgttggtaacattgccaagtacgacataagggtgaagaatctgaagagcaggctgagaggaggtaaaatgaggtaccaagaagaggaggctagacttgcgtccttcaggaactggccattttatgtccaagggatatccccttgtgtgctctcagaggctggctttgtctttacaggtaaacaggacacggtacagtgtttttcctgtggtggatgtttaggaaattgggaagaaggagatgatccttggaaggaacatgccaaatggttccccaaatgtgaatttcttcggagtaagaaatcctcagaggaaattacccagtatattcaaagctacaagggatttgttgacataacgggagaacattttgtgaattcctgggtccagagagaattacctatggcatcagcttattgcaatgacagcatctttgcttacgaagaactacggctggactcttttaaggactggccccgggaatcagctgtgggagttgcagcactggccaaagcaggtcttttctacacaggtataaaggacatcgtccagtgcttttcctgtggagggtgtttagagaaatggcaggaaggtgatgacccattagacgatcacaccagatgttttcccaattgtccatttctccaaaatatgaagtcctctgcggaagtgactccagaccttcagagccgtggtgaactttgtgaattactggaaaccacaagtgaaagcaatcttgaagattcaatagcagttggtcctatagtgccagaaatggcacagggtgaagcccagtggtttcaagaggcaaagaatctgaatgagcagctgagagcagcttataccagcgccagtttccgccacatgtctttgcttgatatctcttccgatctggccacggaccacttgctgggctgtgatctgtctattgcttcaaaacacatcagcaaacctgtgcaagaacctctggtgctgcctgaggtctttggcaacttgaactctgtcatgtgtgtggagggtgaagctggaagtggaaagacggtcctcctgaagaaaatagcttttctgtgggcatctggatgctgtcccctgttaaacaggttccagctggttttctacctctcccttagttccaccagaccagacgaggggctggccagtatcatctgtgaccagctcctagagaaagaaggatctgttactgaaatgtgcatgaggaacattatccagcagttaaagaatcaggtcttattccttttagatgactacaaagaaatatgttcaatccctcaagtcataggaaaactgattcaaaaaaaccacttatcccggacctgcctattgattgctgtccgtacaaacagggccagggacatccgccgatacctagagaccattctagagatcaaagcatttcccttttataatactgtctgtatattacggaagctcttttcacataatatgactcgtctgcgaaagtttatggtttactttggaaagaaccaaagtttgcagaagatacagaaaactcctctctttgtggcggcgatctgtgctcattggtttcagtatccttttgacccatcctttgatgatgtggctgttttcaagtcctatatggaacgcctttccttaaggaacaaagcgacagctgaaattctcaaagcaactgtgtcctcctgtggtgagctggccttgaaagggtttttttcatgttgctttgagtttaatgatgatgatctcgcagaagcaggggttgatgaagatgaagatctaaccatgtgcttgatgagcaaatttacagcccagagactaagaccattctaccggtttttaagtcctgccttccaagaatttcttgcggggatgaggctgattgaactcctggattcagataggcaggaacatcaagatttgggactgtatcatttgaaacaaatcaactcacccatgatgactgtaagcgcctacaacaattttttgaactatgtctccagcctcccttcaacaaaagcagggcccaaaattgtgtctcatttgctccatttagtggataacaaagagtcattggagaatatatctgaaaatgatgactacttaaagcaccagccagaaatttcactgcagatgcagttacttaggggattgtggcaaatttgtccacaagcttacttttcaatggtttcagaacatttactggttcttgccctgaaaactgcttatcaaagcaacactgttgctgcgtgttctccatttgttttgcaattccttcaagggagaacactgactttgggtgcgcttaacttacagtactttttcgaccacccagaaagcttgtcattgttgaggagcatccacttcccaatacgaggaaataagacatcacccagagcacatttttcagttctggaaacatgttttgacaaatcacaggtgccaactatagatcaggactatgcttctgcctttgaacctatgaatgaatgggagcgaaatttagctgaaaaagaggataatgtaaagagctatatggatatgcagcgcagggcatcaccagaccttagtactggctattggaaactttctccaaagcagtacaagattccctgtctagaagtcgatgtgaatgatattgatgttgtaggccaggatatgcttgagattctaatgacagttttctcagcttcacagcgcatcgaactccatttaaaccacagcagaggctttatagaaagcatccgcccagctcttgagctgtctaaggcctctgtcaccaagtgctccataagcaagttggaactcagcgcagccgaacaggaactgcttctcaccctgccttccctggaatctcttgaagtctcagggacaatccagtcacaagaccaaatctttcctaatctggataagttcctgtgcctgaaagaactgtctgtggatctggagggcaatataaatgttttttcagtcattcctgaagaatttccaaacttccaccatatggagaaattattgatccaaatttcagctgagtatgatccttccaaactagtaaaattaattcaaaattctccaaaccttcatgttttccatctgaagtgtaacttcttttcggattttgggtctctcatgactatgcttgtttcctgtaagaaactcacagaaattaagttttcggattcattttttcaagccgtcccatttgttgccagtttgccaaattttatttctctgaagatattaaatcttgaaggccagcaatttcctgatgaggaaacatcagaaaaatttgcctacattttaggttctcttagtaacctggaagaattgatccttcctactggggatggaatttatcgagtggccaaactgatcatccagcagtgtcagcagcttcattgtctccgagtcctctcatttttcaagactttgaatgatgacagcgtggtggaaattgccaaagtagcaatcagtggaggtttccagaaacttgagaacctaaagctttcaatcaatcacaagattacagaggaaggatacagaaatttctttcaagcactggacaacatgccaaacttgcaggagttggacatctccaggcatttcacagagtgtatcaaagctcaggccacaacagtcaagtctttgagtcaatgtgtgttacgactaccaaggctcattagactgaacatgttaagttggctcttggatgcagatgatattgcattgcttaatgtcatgaaagaaagacatcctcaatctaagtacttaactattctccagaaatggatactgccgttctctccaatcattcagaaataaaagattcagctaaaaactgctgaatcaataatttgtcttggggcatattgaggatgtaaaaaaagttgttgattaatgctaaaaaccaaattatccaaaattattttattaaatattgcatacaaaagaaaatgtgtaaggcttgctaaaaaacaaaacaaaacaaaacacagtcctgcatactcaccaccaagctcaagaaataaatcatcaccaatacctttgaggtccctgagtaatccaccccagctaaaggcaaacccttcaatcaagtttatacagcaaaccctccattgtccatggtcaacagggaaggggttggggacaggtctgccaatctatctaaaagccacaatatggaagaagtattcaatttatataataaatggctaacttaacggttgaatcactttcatacatggatgaaacgggtttaacacaggatccacatgaatcttctgtgggccaagagatgttccttaatccttgtagaacctgttttctatattgaactagctttggtacagtagagttaacttactttccatttatccactgccaatataaagaggaaacaggggttagggaaaaatgacttcattccagaggcttctcagagttcaacatatgctataatttagaattttcttatgaatccactctacttgggtagaaaatattttatctctagtgattgcatattatttccatatcatagtatttcatagtattatatttgatatgagtgtctatatcaatgtcagtgtccagaatttcgttcctaccagttaagtagttttctgaacggccagaagaccattcgaaattcatgatactactataagttggtaaacaaccatacttttatcctcatttttattctcactaagaaaaaagtcaactcccctccccttgcccaagtatgaaatatagggacagtatgtatggtgtggtctcatttgtttagaaaaccacttatgactgggtgcggtggctcacacctgtaatcccagcactttgggaggctgaggcgggcgaatcatttgaggtgaggaattcgagaccagcctggccagcatggtgaaaccccatctctactaaaaatacaaaaattagccaggtgtggtggcacatgcctgtagtcccagccactagggcggctgagacgcaagacttgcttgaacccgggaggcagaggttgcagtgagccaagatggcgccactgcattccagcctgggcaacagagcaagaccctgtctgtctcaaaacaaaaaacaaaaccacttatattgctagctacattaagaatttctgaatatgttactgagcttgcttgtggtaaccatttataatatcagaaagtatatgtacaccaaaacatgttgaacatccatgttgtacaactgaaatataaataattttgtcaattatacctaaataaaactggaaaaaaatttctggaagtttatatctaaaaatgttaatagtgcgtacctctaggaagtgggcctggaagccattcttacttttcagtctctcccattctgtactgttttttgttttactttcgtgcctgcattatttttctatttaaaacaaaaataaatctagtttagcactaaaatattaactggagctacctctggagggcaagagtactagaaggtgggatggattgtcttcttgcttgtctgattttatatgtaatacctttgtaattagaaaggttgttaagcattatatcagaatccagtcaggagacagaaaccacacagaaatttgaatggggaaagtttaatatacagatgctcggcctgacgcagtggctcacgcctgtaattccagcactttgggaggccgaggtgggcagatcacttgaggtcaggagttcgagaccagcctggccaacatggtgaaatcctgtc

SEQ ID NO: 356141 - DNA, 5746 bp, Homo sapiens
ggtaattttttgttcagtagataaatatattgttatcttaaaaagattttttgtatttacttttgagactgggtctcagtctgttgcccaggctggagtgtagcagcctgatcatggctcagtgcagcctctacctccccgggctcaggtgatcctcccccttcagcctcctgagtagctgggactacagaggtgtggcaccatgcccggctaatttttgtattttttgtggagatggggttttgccatgttgcccaggctagtcttgaactcctggatgtgagccactgcgtctggcctattattttaaatatagttctctttactgccagtagctttcatataaccctagcgactagatttagtcaccactgcttaattccaaaaaacaaaagctccatcctatatttactgtaaatcagtctctttgattgtattgcatgttttatttcaagaaaaaagttaacctgaagatttaattttaaataactacacatgttgtcactaatagaaataacaaataattatatgagaataatggtaattctcctaagttttgtggtaaattttttggcaattttattgaagtataataaaattcaacaattcaatacgtctttataaatgttcattgtgatataggacagctctatcacagtactggggtaaattttaattatatttattaattacagatgtgaatttcttcggagtaagaaatcctcagaggaaattacccagtatattcaaagctacaagggatttgttgacataacgggagaacattttgtgaattcctgggtccagagagaattacctatggcatcagcttattgcaatgacagcatctttgcttacgaagaactacggctggactcttttaaggactggccccgggaatcagctgtgggagttgcagcactggccaaagcaggtcttttctacacaggtataaaggacatcgtccagtgcttttcctgtggagggtgtttagagaaatggcaggaaggtgatgacccattagacgatcacaccagatgttttcccaattgtccatttctccaaaatatgaagtcctctgcggaagtgactccagaccttcagagccgtggtgaactttgtgaattactggaaaccacaagtgaaagcaatcttgaagattcaatagcagttggtcctatagtgccagaaatggcacagggtgaagcccagtggtttcaagaggcaaagaatctgaatgagcagctgagagcagcttataccagcgccagtttccgccacatgtctttgcttgatatctcttccgatctggccacggaccacttgctgggctgtgatctgtctattgcttcaaaacacatcagcaaacctgtgcaagaacctctggtgctgcctgaggtctttggcaacttgaactctgtcatgtgtgtggagggtgaagctggaagtggaaagacggtcctcctgaagaaaatagcttttctgtgggcatctggatgctgtcccctgttaaacaggttccagctggttttctacctctcccttagttccaccagaccagacgaggggctggccagtatcatctgtgaccagctcctagagaaagaaggatctgttactgaaatgtgcatgaggaacattatccagcagttaaagaatcaggtcttattccttttagatgactacaaagaaatatgttcaatccctcaagtcataggaaaactgattcaaaaaaaccacttatcccggacctgcctattgattgctgtccgtacaaacagggccagggacatccgccgatacctagagaccattctagagatcaaagcatttcccttttataatactgtctgtatattacggaagctcttttcacataatatgactcgtctgcgaaagtttatggtttactttggaaagaaccaaagtttgcagaagatacagaaaactcctctctttgtggcggcgatctgtgctcattggtttcagtatccttttgacccatcctttgatgatgtggctgttttcaagtcctatatggaacgcctttccttaaggaacaaagcgacagctgaaattctcaaagcaactgtgtcctcctgtggtgagctggccttgaaagggtttttttcatgttgctttgagtttaatgatgatgatctcgcagaagcaggggttgatgaagatgaagatctaaccatgtgcttgatgagcaaatttacagcccagagactaagaccattctaccggtttttaagtcctgccttccaagaatttcttgcggggatgaggctgattgaactcctggattcagataggcaggaacatcaagatttgggactgtatcatttgaaacaaatcaactcacccatgatgactgtaagcgcctacaacaattttttgaactatgtctccagcctcccttcaacaaaagcagggcccaaaattgtgtctcatttgctccatttagtggataacaaagagtcattggagaatatatctgaaaatgatgactacttaaagcaccagccagaaatttcactgcagatgcagttacttaggggattgtggcaaatttgtccacaagcttacttttcaatggtttcagaacatttactggttcttgccctgaaaactgcttatcaaagcaacactgttgctgcgtgttctccatttgttttgcaattccttcaagggagaacactgactttgggtgcgcttaacttacagtactttttcgaccacccagaaagcttgtcattgttgaggagcatccacttcccaatacgaggaaataagacatcacccagagcacatttttcagttctggaaacatgttttgacaaatcacaggtgccaactatagatcaggactatgcttctgcctttgaacctatgaatgaatgggagcgaaatttagctgaaaaagaggataatgtaaagagctatatggatatgcagcgcagggcatcaccagaccttagtactggctattggaaactttctccaaagcagtacaagattccctgtctagaagtcgatgtgaatgatattgatgttgtaggccaggatatgcttgagattctaatgacagttttctcagcttcacagcgcatcgaactccatttaaaccacagcagaggctttatagaaagcatccgcccagctcttgagctgtctaaggcctctgtcaccaagtgctccataagcaagttggaactcagcgcagccgaacaggaactgcttctcaccctgccttccctggaatctcttgaagtctcagggacaatccagtcacaagaccaaatctttcctaatctggataagttcctgtgcctgaaagaactgtctgtggatctggagggcaatataaatgttttttcagtcattcctgaagaatttccaaacttccaccatatggagaaattattgatccaaatttcagctgagtatgatccttccaaactagtaaaattaattcaaaattctccaaaccttcatgttttccatctgaagtgtaacttcttttcggattttgggtctctcatgactatgcttgtttcctgtaagaaactcacagaaattaagttttcggattcattttttcaagccgtcccatttgttgccagtttgccaaattttatttctctgaagatattaaatcttgaaggccagcaatttcctgatgaggaaacatcagaaaaatttgcctacattttaggttctcttagtaacctggaagaattgatccttcctactggggatggaatttatcgagtggccaaactgatcatccagcagtgtcagcagcttcattgtctccgagtcctctcatttttcaagactttgaatgatgacagcgtggtggaaattgccaaagtagcaatcagtggaggtttccagaaacttgagaacctaaagctttcaatcaatcacaagattacagaggaaggatacagaaatttctttcaagcactggacaacatgccaaacttgcaggagttggacatctccaggcatttcacagagtgtatcaaagctcaggccacaacagtcaagtctttgagtcaatgtgtgttacgactaccaaggctcattagactgaacatgttaagttggctcttggatgcagatgatattgcattgcttaatgtcatgaaagaaagacatcctcaatctaagtacttaactattctccagaaatggatactgccgttctctccaatcattcagaaataaaagattcagctaaaaactgctgaatcaataatttgtcttggggcatattgaggatgtaaaaaaagttgttgattaatgctaaaaaccaaattatccaaaattattttattaaatattgcatacaaaagaaaatgtgtaaggcttgctaaaaaacaaaacaaaacaaaacacagtcctgcatactcaccaccaagctcaagaaataaatcatcaccaatacctttgaggtccctgagtaatccaccccagctaaaggcaaacccttcaatcaagtttatacagcaaaccctccattgtccatggtcaacagggaaggggttggggacaggtctgccaatctatctaaaagccacaatatggaagaagtattcaatttatataataaatggctaacttaacggttgaatcactttcatacatggatgaaacgggtttaacacaggatccacatgaatcttctgtgggccaagagatgttccttaatccttgtagaacctgttttctatattgaactagctttggtacagtagagttaacttactttccatttatccactgccaatataaagaggaaacaggggttagggaaaaatgacttcattccagaggcttctcagagttcaacatatgctataatttagaattttcttatgaatccactctacttgggtagaaaatattttatctctagtgattgcatattatttccatatcatagtatttcatagtattatatttgatatgagtgtctatatcaatgtcagtgtccagaatttcgttcctaccagttaagtagttttctgaacggccagaagaccattcgaaattcatgatactactataagttggtaaacaaccatacttttatcctcatttttattctcactaagaaaaaagtcaactcccctccccttgcccaagtatgaaatatagggacagtatgtatggtgtggtctcatttgtttagaaaaccacttatgactgggtgcggtggctcacacctgtaatcccagcactttgggaggctgaggcgggcgaatcatttgaggtgaggaattcgagaccagcctggccagcatggtgaaaccccatctctactaaaaatacaaaaattagccaggtgtggtggcacatgcctgtagtcccagccactagggcggctgagacgcaagacttgcttgaacccgggaggcagaggttgcagtgagccaagatggcgccactgcattccagcctgggcaacagagcaagaccctgtctgtctcaaaacaaaaaacaaaaccacttatattgctagctacattaagaatttctgaatatgttactgagcttgcttgtggtaaccatttataatatcagaaagtatatgtacaccaaaacatgttgaacatccatgttgtacaactgaaatataaataattttgtcaattatacctaaataaaactggaaaaatataattcgcgctactctcctactccctgtcggccgcctgggccaatcccattt

SEQ ID NO: 356142 - DNA, 1195 bp, Homo sapiens
tgcatgaagacaaaaggtcctgtgctcacctgggacccttctggacgttgccctgtgtacctcttcgactgcctgttcatctacgacgaaccccgggtattgaccccagacaacaatgccacttcatattggggacttcgtctgggattccaaggtgcattcattgcaaagttccttaaatattttctcactgcttcctactaaaggacggacagagcatttgttcttcagccacatactttccttccactggccagcattctcctctattagactagaactgtggataaacctcagatgtgaatttcttcggagtaagaaatcctcagaggaaattacccagtatattcaaagctacaagggatttgttgacataacggtaatgtataacagcaatttttttctcaagtttttggattacctgtaagtgtctgactcagaagggcataggcattctttttatgtcatgggtttgatttctttcttcctttctcctttcattcccctggctcccatcttcaaagtgaaaaatatcacattcacttgctgacctagagcctttttctttttccagggctggcttctgacgggctctgcttgccttcctgatagtcttcccctttatgaatgaagccacttgccccagcttccctctgctgcccctatctgcaggcttgctaagatctcctgacctaggcgctgtcacccacagtgggctgcagagctggctcttcctagctggctaactatcctgaatcagtaaaaatttcctagtggagagtgatgggaaatcgaatccaaactggcttaaacaaaaatgagaatttattgattaacatgactcaggagaccagaactctatagagaacatggcctgacagtgggggaagagaggtgtttcctcaaaaagaaactgggtgcagctttcccagaagaatcagttgctcaatatataataccctgatgaatttagttaccattctatgtctcttacttcctcattcgtcaaagtacatctgtgatatttaaatgcaggtctgttttcaaggtcagtttccggaaacagtgaccctgagaaggcttcctcctgagtatgcataaacacacacacacacacacacgcacgcacgcacaccccttcatatgccaaaatgacattaagtttcatttaaaaatataaaaatattgaaagagc

SEQ ID NO: 356143 - DNA, 838 bp, Homo sapiens
tgcatgaagacaaaaggtcctgtgctcacctgggacccttctggacgttgccctgtgtacctcttcgactgcctgttcatctacgacgaaccccgggtattgaccccagacaacaatgccacttcatattggggacttcgtctgggattccaaggtgcattcattgcaaagttccttaaatattttctcactgcttcctactaaaggacggacagagcatttgttcttcagccacatactttccttccactggccagcattctcctctattagactagaactgtggataaacctcagatgtgaatttcttcggagtaagaaatcctcagaggaaattacccagtatattcaaagctacaagggatttgttgacataacgggagaacattttgtgaattcctgggtccagagagaattacctatggcatcagcttattgcaatgacagcatctttgcttacgaagaactacggctggactcttttaaggactggccccgggaatcagctgtgggagttgcagcactggccaaagcaggtcttttctacacaggtataaaggacatcgtccagtgcttttcctgtggagggtgtttagagaaatggcaggaaggtgatgacccattagacgatcacaccagatgttttcccaagttctctctcttgcccaggttggagtgcagtggtgcaatcatggctcactgcagccttgacctctctggctcaagcaatcttcctcgctcagcctcccaagtagctgggactacaggcacatgtcttcacacccagctaattttttttttttttttttaagagacagggtctctctatgttgcccag

SEQ ID NO: 356144 - DNA, 471 bp, Homo sapiens
agcctggaagcacgaatggttggaaaggagaaataggcgagggcctgtggtggtaaaaccaatcccagttaaaggagatggatctgaaatgaatcacttagcagctgagtctccaggagaggtccaggcaagtgcggcttcaccagcttccaaaggccgacgcagtccttctcctggcaactccccaaagttcactttcacaatgaaattatatttgctgtgtgactatgattcctaagatttccagggcttaagggctaacttctattagcaccttactgtgtaagcaaatgttacaaaaaaaaaaaaaaaaaaatctctgggttaagaaaatttggcttaaatgtatcctttgttattttaaatatattgagatattttaattaaaatttttaccccattgaaccgattttatagtatttgtacctattttggtgtttttgtctttatagtaaataaaagtttttgaac

SEQ ID NO: 356145 - DNA, 3227 bp, Homo sapiens
caagatgtgggaactggaactttaatggctgttaaacaggtgacttatgtcagaaacacatcttctgagcaagaagaagtagtagaagcactaagagaagagataagaatgatgagccatctgaatcatccaaacatcattaggatgttgggagccacgtgtgagaagagcaattacaatctcttcattgaatggatggcagggggatcggtggctcatttgctgagtaaatatggagccttcaaagaatcagtagttattaactacactgaacagttactccgtggcctttcgtatctccatgaaaaccaaatcattcacagagatgtcaaaggtgccaatttgctaattgacagcactggtcagagactaagaattgcagattttggagctgcagccaggttggcatcaaaaggaactggtgcaggagagtttcagggacaattactggggacaattgcatttatggcacctgaggtactaagaggtcaacagtatggaaggagctgtgatgtatggagtgttggctgtgctattatagaaatggcttgtgcaaaaccaccatggaatgcagaaaaacactccaatcatcttgctttgatatttaagattgctagtgcaactactgctccatcgatcccttcacatttgtctcctggtttacgagatgtggctcttcgttgtttagaacttcaacctcaggacagacctccatcaagagagctactgaagcatccagtctttcgtactacatggtagccaattatgcagatcaactacagtagaaacaggatgctcaacaagagaaaaaaaacttgtggggaaccacattgatattctactggccatgatgccactgaacagctatgaacgaggccagtggggaacccttacctaagtatgtgattgacaaatcatgatctgtacctaagctcagtatgcaaaagcccaaactagtgcagaaactgtaaactgtgcctttcaaagaactggccctaggtgaacaggaaaacaatgaagtttgcatgactaaattgcagaagcataattttatttttttggagcactttttcagcaatattagcggctgaggggctcaggatctattttaatatttcaattattcttccatttcatatagtgatcacaagcagggggttctgcaattccgttcaaattttttgtcactggctataaaatcagtatctgcctcttttaggtcagagtatgctatgagtagcaatacatacatatatttttaaaagttgatacttctttatgacccacagttgacctttattttcttaaataccagggcagttgtggctcattgtgcattttactgttggcccattcatttcgtttttggaaattatggttttgtattttcatgtttatttacattcatttttgtttattcagggaaagctgatctttttttcaaaccagaaaaaaaaaatgaactagatatgaagtagagttcattaaatatcttgctattgtcagagtttttaaaatatagacttaattttgtttttttaaattggaatacaataaagtactacctacatttgagtcagtcaccactcttattgtgcaggttaagtacaagttaactaaaaataaactgtcctctctggtgcaactcacaaccaagatcaagattaccttaaaatttatttgaattttttagatgttttggttgtcaaactgtaggaaacttcacaacatttaagtcttactctgtatgtaacaatccatcattcaccttcactactggtaataacatagagctgccattttccttttaccatgcatcatctctttacagtaggcctggcagatcattttttaaaaagattattcaactaccaatcagtaatgtttttaaacagtacatttgctttgaacttggaaaatgtgttcagaaagaaaaatggaattgaatttcatttatacactaattccttggattttgcacagttacctaacggttttagtctggagttaaattcagatgcatggaatcctgaaggaaaatggtagctttttaatctttttgtgtgtgtgtgagtcttttaaatcaagtactgattaactattaagtacaactttgagattttagttttaactcttcagaagccagtgtgaaatagaattggttattctcaaagactcaggataaactaaataagctatatatagagtacatttaaaatgtacaacacaaattggaagtaaaataagttacaagataagtttacagggatatattgcttacaatttttaaaaggcagtttgttttttatgtgaatatgtttcttagtgaaattttacattcctttgttttggaagattggcgatatttgaagagttaaaaatagtacagaaatgtgaagtttggtatctctaaatgtgttgtacttgactttcttttttatttttttttattttttttgactacttagaattttcacaattctaataagattgtttccaagtctctcatgtgcaagctttaaaggatgcactcttgccattttatgtactggaagatcattggtcagatgaatactgtgtctgacaaaaatgtaaactgtataaactgaggaacctcagctaatcagtattactttgtagatcaccatgcccaccacatttcaaactcaaactatctgtagatttcaaaatccattgtgtttgagtttgtttgcagttccctcagcttgctggtaattgtggtgttttgttttttgttttgttttcaatgcaaatgtgatgtaatattcttattttctttggatcaaagctggactggaaattgtatcgtgtaattatttttgtgttcttaatgttatttggtactcaagttgtaaataacgtctactactgtttattccagtttctactacctcaggtgtcctatagatttttcttctaccaaagttcactttcacaatgaaattatatttgctgtgtgactatgattcctaagatttccagggcttaagggctaacttctattagcaccttactgtgtaagcaaatgttacaaaaaaaaaaaaaaaaaaatctctgggttaagaaaatttggcttaaatgtatcctttgttattttaaatatattgagatattttaattaaaatttttaccccattgaaccgattttatagtatttgtacctattttggtgtttttgtctttatagtaaataaaagtttttgaac

SEQ ID NO: 356146 - DNA, 493 bp, Homo sapiens
gcggccgcctgcccggcgtggggagcgggcgccccgggccgccgccgagagggggagccggaagtcggcgcgggcgcccctcggccccgacgacgccgtgaccttggccggcccgctcacctctcggaatctcgcctgccgggaccgcgaaatgggggcgaccgcggcgtccctctccgtcggcgcagccctcgacggcgcttgggtttgaccccggcgcgcttgctcgccccttctcccgagaaggggtttcggaggtagacatgggatggatactggacatgttcctgtcgcggcccgggtttggtccccttcctgggattcagccgaaagggccgaggaagggaagcaaacatgttgacgaggcgattgggaggtggggttggttagtgggcagtgacagaattcgggccgctctctagtcccttgtaaaagacctgaaaaaatcggacacccagggtctccagtccttactacccagctgtggtggctg

SEQ ID NO: 356147 - DNA, 777 bp, Homo sapiens
tagcaatgtagggtgactatcattaacaagaatttagtttgtatctttaaatatctagaagagaggattttgaatgttcctaacacaaagatgatgaatgtttaaggtgattgatatgccattaccctgatttgattattaaacattctatatatgtattgaaatatcaccgtaccccataaatatagttactaaatgtcaattttttaaaaagctattatttttcaaatgataaaaaagaagtattttgtagaatgttaattatctatattccattttattaaaatatatacaattttgtttttgtttgcttcaagagaaatgtcccagtgtagtttatatattaattatgcatatcttaatgaattcagaatagtactttaaatatattaagtttatttactgctccccccacccattttccaaagtagactgcattaatttcatgtgattgatccaagtagatccaattgattgacttactgttttcctaatttcaggttccagttacagctatatcagagaatgagttaatctcctcagaaatcactaaatactactctgaggggcttagaaattaacaggttgtttatataattggccttaaatgaggtgagagtgaagagactagagccatctctggaaaacatcattatcccattccccgggaagctaccctctggaactcaagatttgaccatatctgttttgaggattcattatgaacaaagaagtctccccaggtaggaattgtagttctatttttaaagagctttg

SEQ ID NO: 356148 - DNA, 301 bp, Homo sapiens
aacatggcggccgcggagagcggctgaaatgcctgttcttcaggccgggcgagcgggagtctgacgcgatttgctgagctctgtcctccgacggctgcctcgcggccttgagggcctccgccgcctgttcgctgctgctccctcgagcggagcctgcgtcaggttccctctgcatccccctgcggggggacccctgctccggaggagggggccggagagccgcggcggcggcggcggcaggcgcctgggcccagggggccgggctccgggcccgaggagcggcggaggccggggcggcgcc

SEQ ID NO: 356149 - DNA, 7112 bp, Homo sapiens
gcggccgcctgcccggcgtggggagcgggcgccccgggccgccgccgagagggggagccggaagtcggcgcgggcgcccctcggccccgacgacgccgtgaccttggccggcccgctcacctctcggaatctcgcctgccgggaccgcgaaatgggggcgaccgcggcgtccctctccgtcggcgcagccctcgacggcgcttgggtttgaccccggcgcgcttgctcgccccttctcccgagaaggggtttcggagatctatccatactaatggaaatgtaactggaactgactctgatgataaaatcaaggaccatcaagcaagatcatgcagtaggcaactttgcttccaaaagaagttaccaacatttagaatttctacttattctgaggttccagttacagctatatcagagaatgagttaatctcctcagaaatcactaaatactactctgaggggcttagaaattaacaggttgtttatataattggccttaaatgaggtgagagtgaagagactagagccatctctggaaaacatcattatcccattccccgggaagctaccctctggaactcaagatttgaccatatctgttttgaggattcattatgaacaaagaagtctccccaggtgtgaagtttttcaacatgagtggcctcggggacagttcatccgaccctgctaacccagactcacataagaggaaaggatcgccatgtgacacactggcatcaagcacggaaaagaggcgcagggagcaagaaaataaatatttagaagaactagctgagttactgtctgccaacattagtgacattgacagcttgagtgtaaaaccagacaaatgcaagattttgaagaaaacagtcgatcagatacagctaatgaagagaatggaacaagagaaatcaacaactgatgacgatgtacagaaatcagacatctcatcaagtagtcaaggagtgatagaaaaggaatccttgggacctcttcttttggaggctttggatggatttttctttgttgtgaactgtgaagggagaattgtatttgtgtcagagaatgtaaccagctacttaggttacaatcaggaggaattaatgaataccagcgtctacagcatactgcacgtgggggatcatgcagaatttgtgaagaatctgctaccaaaatcactagtaaatggagttccttggcctcaagaggcaacacgacgaaatagccatacctttaactgcaggatgctaattcaccctccagatgagccagggaccgagaaccaagaagcttgccagcgttatgaagtaatgcagtgtttcactgtgtcacagccaaaatcaattcaagaggatggagaagatttccagtcatgtctgatttgtattgcacggcgattacctcggcctccagctattacgggtgtagaatcctttatgaccaagcaagatactacaggtaaaatcatctctattgatactagttccctgagagctgctggcagaactggttgggaagatttagtgaggaagtgcatttatgcttttttccaacctcagggcagagaaccatcttatgccagacagctgttccaagaagtgatgactcgtggcactgcctccagcccctcctatagattcatattgaatgatgggacaatgcttagcgcccacaccaagtgtaaactttgctaccctcaaagtccagacatgcaacctttcatcatgggaattcatatcatcgacagggagcacagtgggctttctcctcaagatgacactaattctggaatgtcaattccccgagtaaatccctcggtcaatcctagtatctctccagctcatggtgtggctcgttcatccacattgccaccatccaacagcaacatggtatccaccagaataaaccgccagcagagctcagaccttcatagcagcagtcatagtaattctagcaacagccaaggaagtttcggatgctcacccggaagtcagattgtagccaatgttgccttaaaccaaggacaggccagttcacagagcagtaatccctctttaaacctcaataattctcctatggaaggtacaggaatatccctagcacagttcatgtctccaaggagacaggttacttctggattggcaacaaggcccaggatgccaaacaattcctttcctcctaatatttcgacattaagctctcccgttggcatgacaagtagtgcctgtaataataataaccgatcttattcaaacatcccagtaacatctttacagggtatgaatgaaggacccaataactccgttggcttctctgccagttctccagtcctcaggcagatgagctcacagaattcacctagcagattaaatatacaaccagcaaaagctgagtccaaagataacaaagagattgcctcaattttaaatgaaatgattcaatctgacaacagctctagtgatggcaaacctctggattcagggcttctgcataacaatgacagactttcagatggagacagtaaatactctcaaaccagtcacaaactagtgcagcttttgacaacaactgccgaacagcagttacggcatgctgatatagacacaagctgcaaagatgtcctgtcttgcacaggcacttccaactctgcctctgctaactcttcaggaggttcttgtccctcttctcatagctcattgacagaacggcataaaattctacaccggctcttacaggagggtagcccctcagatatcaccactttgtctgtcgagcctgataaaaaggacagtgcatctacttctgtgtcagtgactggacaggtacaaggaaactccagtataaaactagaactggatgcttcaaagaaaaaagaatcaaaagaccatcagctcctacgctatcttttagataaagatgagaaagatttaagatcaactccaaacctgagcctggatgatgtaaaggtgaaagtggaaaagaaagaacagatggatccatgtaatacaaacccaaccccaatgaccaaacccactcctgaggaaataaaactggaggcccagagccagtttacagctgaccttgaccagtttgatcagttactgcccacgctggagaaggcagcacagttgccaggcttatgtgagacagacaggatggatggtgcggtcaccagtgtaaccatcaaatcggagatcctgccagcttcacttcagtccgccactgccagacccacttccaggctaaatagattacctgagctggaattggaagcaattgataaccaatttggacaaccaggaacaggcgatcagattccatggacaaataatacagtgacagctataaatcagagtaaatcagaagaccagtgtattagctcacaattagatgagcttctctgtccacccacaacagtagaagggagaaatgatgagaaggctcttcttgaacagctggtatccttccttagtggcaaagatgaaactgagctagctgaactagacagagctctgggaattgacaaacttgttcaggggggtggattagatgtattatcagagagatttccaccacaacaagcaacgccacctttgatcatggaagaaagacccaacctttattcccagccttactcttctccttctcctactgccaatctccctagccctttccaaggcatggtcaggcaaaaaccttcactggggacgatgcctgttcaagtaacacctccccgaggtgctttttcacctggcatgggcatgcagcccaggcaaactctaaacagacctccggctgcacctaaccagcttcgacttcaactacagcagcgattacagggacaacagcagttgatacaccaaaatcggcaagctatcttaaaccagtttgcagcaactgctcctgttggcatcaatatgagatcaggcatgcaacagcaaattacacctcagccacccctgaatgctcaaatgttggcacaacgtcagcgggaactgtacagtcaacagcaccgacagaggcagctaatacagcagcaaagagccatgcttatgaggcagcaaagctttgggaacaacctccctccctcatctggactaccagttcaaatggggaacccccgtcttcctcagggtgctccacagcaattcccctatccaccaaactatggtacaaatccaggaaccccacctgcttctaccagcccgttttcacaactagcagcaaatcctgaagcatccttggccaaccgcaacagcatggtgagcagaggcatgacaggaaacataggaggacagtttggcactggaatcaatcctcagatgcagcagaatgtcttccagtatccaggagcaggaatggttccccaaggtgaggccaactttgctccatctctaagccctgggagctccatggtgccgatgccaatccctcctcctcagagttctctgctccagcaaactccacctgcctccgggtatcagtcaccagacatgaaggcctggcagcaaggagcgataggaaacaacaatgtgttcagtcaagctgtccagaaccagcccacgcctgcacagccaggagtatacaacaacatgagcatcaccgtttccatggcaggtggaaatacgaatgttcagaacatgaacccaatgatggcccagatgcagatgagctctttgcagatgccaggaatgaacactgtgtgccctgagcagataaatgatcccgcactgagacacacaggcctctactgcaaccagctctcatccactgaccttctcaaaacagaagcagatggaacccagcaggtgcaacaggttcaggtgtttgctgacgtccagtgtacagtgaatctggtaggcggggacccttacctgaaccagcctggtccactgggaactcaaaagcccacgtcaggaccacagaccccccaggcccagcagaagagcctccttcagcagctactgactgaataaccacttttaaaggaatgtgaaatttaaataatagacatacagagatatacaaatatattatatatttttctgagatttttgatatctcaatctgcagccattcttcaggtcgtagcatttggagcaaaaaaaaaaaaaaaaaaaaaaaaaaaggagtttgcttttgtcgggagattgaaagatgtttttgtttctttctttgtaaaggccttggatattgaaaaaataccaaggcagaacagttggacaatctatttcttgagccaaatttaattattcttatttttgtaatcagtcattggcttcttatctggatgaaggcttttggaggagaaccaaaacgacaagttccaagaagaagatgaagctccgcctccgccgcttagtcccaaccctgcccaggaagaagggcccgtggggctttgcctgtgcccgtccaccaaaggctgtcatgtgtctcgaaatcagcagccctccccatcccaatcccaggcagcttgtgtgtacaatcagcttctctagcaactctgtatctgttggcttcaagagaatattttgcctccacatatgtaccccttctcctttttttaaagatggatttaaaccaagatgcctccaggaaagaggacgaaatgagtatattcacagaggaatccaaaaaatacagtttgggggaaaatgcaataatttttgatgagatgggtgaaggacaagaagtgagttgtgtcaattattgtagatacaattttctgattaaatctggaaaaataaaaggcagcctgttttttctgcttttattgtattaacagctgaggtagctaaagttatttaaaataaaattaaatttatgatccaagtagcttatttttccctttaaatctcattgtaaatatatttgatttcttgtagaaattgatttccttctgtttaattttatgcttttattatactcttgatttttctaaatttgtgtgtgaaatataacattgattgaattgcagttacatttggttagtaatatttcattattttaataactgtgatgtcatgtatggatttactttggggttcaaatcaaaatgtcactgccagaaagagctgttccagctgatctagagcatactgccctagagtgtccctgggatcatctgaacagaagtgcacaggctacttgtacagagaaaaaattaatactcaaaggaaatcttcattttttagattgactttgggaatttgaattttcatcagtgcaaatataaatttctctatcctgctctgaggctaattggtaccatattttccctttgtgtcttgtgactctgccacatcccatctcatcctggcctctgagtcaagaacccagtgaactgactttctagttctagaagttccgctgcaaggccaggaaagcttgagaaaggtattgtggaagaagcaaaggtagacccccatcactcacctttgtctgcatccctgggcctgtgaatgatgacagcacctgacattctgcaccagctacctctgcctccatggcagagaaaaggccataagaacagtggaagaggagcatggactcagacttcaaggaagaagccatttccccaggtccttccttctgcatctcaccacccctagttacaaataactccattgaacagcatctattcagaaactatgccgaataaaaagattggtggaagggctcatgtggttagcaactatgaaacagaaataggacactcagttacaaacattatctcctttagtttttcagaaaatgcatccctgatttcattcatttccagcttgaaagccagccatattactctagtccctaccaaactgctctagaaggtcatttccattttgtttgtgatatttagacgcgcagacttcaggaagttcacctttaacttcagcattccagatgaagtttcctgactcagtgcttttgcataaggaactagaaaaaaaaagtaaggaaaattggagatgctaacatcctcccccatcccaactgcaccttaaaatatgcatgtcaccttcaaggttttataattgcactgtttgttttatgtatgtacagattaaaattattgctacatttgaggaaaataaaattgcttgcttcta

SEQ ID NO: 356150 - DNA, 7235 bp, Homo sapiens
gcggccgcctgcccggcgtggggagcgggcgccccgggccgccgccgagagggggagccggaagtcggcgcgggcgcccctcggccccgacgacgccgtgaccttggccggcccgctcacctctcggaatctcgcctgccgggaccgcgaaatgggggcgaccgcggcgtccctctccgtcggcgcagccctcgacggcgcttgggtttgaccccggcgcgcttgctcgccccttctcccgagaaggggtttcggagatctatccatactaatggaaatgtaactggaactgactctgatgataaaatcaaggaccatcaagcaagatcatgcagtaggcaactttgcttccaaaagaagttaccaacatttagaatttctacttattctgaggttccagttacagctatatcagagaatgagttaatctcctcagaaatcactaaatactactctgaggggcttagaaattaacaggttgtttatataattggccttaaatgaggtgagagtgaagagactagagccatctctggaaaacatcattatcccattccccgggaagctaccctctggaactcaagatttgaccatatctgttttgaggattcattatgaacaaagaagtctccccaggtgtgaagtttttcaacatgagtggcctcggggacagttcatccgaccctgctaacccagactcacataagaggaaaggatcgccatgtgacacactggcatcaagcacggaaaagaggcgcagggagcaagaaaataaatatttagaagaactagctgagttactgtctgccaacattagtgacattgacagcttgagtgtaaaaccagacaaatgcaagattttgaagaaaacagtcgatcagatacagctaatgaagagaatggaacaagagaaatcaacaactgatgacgatgtacagaaatcagacatctcatcaagtagtcaaggagtgatagaaaaggaatccttgggacctcttcttttggaggctttggatggatttttctttgttgtgaactgtgaagggagaattgtatttgtgtcagagaatgtaaccagctacttaggttacaatcaggaggaattaatgaataccagcgtctacagcatactgcacgtgggggatcatgcagaatttgtgaagaatctgctaccaaaatcactagtaaatggagttccttggcctcaagaggcaacacgacgaaatagccatacctttaactgcaggatgctaattcaccctccagatgagccagggaccgagaaccaagaagcttgccagcgttatgaagtaatgcagtgtttcactgtgtcacagccaaaatcaattcaagaggatggagaagatttccagtcatgtctgatttgtattgcacggcgattacctcggcctccagctattacgggtgtagaatcctttatgaccaagcaagatactacaggtaaaatcatctctattgatactagttccctgagagctgctggcagaactggttgggaagatttagtgaggaagtgcatttatgcttttttccaacctcagggcagagaaccatcttatgccagacagctgttccaagaagtgatgactcgtggcactgcctccagcccctcctatagattcatattgaatgatgggacaatgcttagcgcccacaccaagtgtaaactttgctaccctcaaagtccagacatgcaacctttcatcatgggaattcatatcatcgacagggagcacagtgggctttctcctcaagatgacactaattctggaatgtcaattccccgagtaaatccctcggtcaatcctagtatctctccagctcatggtgtggctcgttcatccacattgccaccatccaacagcaacatggtatccaccagaataaaccgccagcagagctcagaccttcatagcagcagtcatagtaattctagcaacagccaaggaagtttcggatgctcacccggaagtcagattgtagccaatgttgccttaaaccaaggacaggccagttcacagagcagtaatccctctttaaacctcaataattctcctatggaaggtacaggaatatccctagcacagttcatgtctccaaggagacaggttacttctggattggcaacaaggcccaggatgccaaacaattcctttcctcctaatatttcgacattaagctctcccgttggcatgacaagtagtgcctgtaataataataaccgatcttattcaaacatcccagtaacatctttacagggtatgaatgaaggacccaataactccgttggcttctctgccagttctccagtcctcaggcagatgagctcacagaattcacctagcagattaaatatacaaccagcaaaagctgagtccaaagataacaaagagattgcctcaattttaaatgaaatgattcaatctgacaacagctctagtgatggcaaacctctggattcagggcttctgcataacaatgacagactttcagatggagacagtaaatactctcaaaccagtcacaaactagtgcagcttttgacaacaactgccgaacagcagttacggcatgctgatatagacacaagctgcaaagatgtcctgtcttgcacaggcacttccaactctgcctctgctaactcttcaggaggttcttgtccctcttctcatagctcattgacagaacggcataaaattctacaccggctcttacaggagggtagcccctcagatatcaccactttgtctgtcgagcctgataaaaaggacagtgcatctacttctgtgtcagtgactggacaggtacaaggaaactccagtataaaactagaactggatgcttcaaagaaaaaagaatcaaaagaccatcagctcctacgctatcttttagataaagatgagaaagatttaagatcaactccaaacctgagcctggatgatgtaaaggtgaaagtggaaaagaaagaacagatggatccatgtaatacaaacccaaccccaatgaccaaacccactcctgaggaaataaaactggaggcccagagccagtttacagctgaccttgaccagtttgatcagttactgcccacgctggagaaggcagcacagttgccaggcttatgtgagacagacaggatggatggtgcggtcaccagtgtaaccatcaaatcggagatcctgccagcttcacttcagtccgccactgccagacccacttccaggctaaatagattacctgagctggaattggaagcaattgataaccaatttggacaaccaggaacaggcgatcagattccatggacaaataatacagtgacagctataaatcagagtaaatcagaagaccagtgtattagctcacaattagatgagcttctctgtccacccacaacagtagaagggagaaatgatgagaaggctcttcttgaacagctggtatccttccttagtggcaaagatgaaactgagctagctgaactagacagagctctgggaattgacaaacttgttcaggggggtggattagatgtattatcagagagatttccaccacaacaagcaacgccacctttgatcatggaagaaagacccaacctttattcccagccttactcttctccttctcctactgccaatctccctagccctttccaaggcatggtcaggcaaaaaccttcactggggacgatgcctgttcaagtaacacctccccgaggtgctttttcacctggcatgggcatgcagcccaggcaaactctaaacagacctccggctgcacctaaccagcttcgacttcaactacagcagcgattacagggacaacagcagttgatacaccaaaatcggcaagctatcttaaaccagtttgcagcaactgctcctgttggcatcaatatgagatcaggcatgcaacagcaaattacacctcagccacccctgaatgctcaaatgttggcacaacgtcagcgggaactgtacagtcaacagcaccgacagaggcagctaatacagcagcaaagagccatgcttatgaggcagcaaagctttgggaacaacctccctccctcatctggactaccagttcaaatggggaacccccgtcttcctcagggtgctccacagcaattcccctatccaccaaactatggtacaaatccaggaaccccacctgcttctaccagcccgttttcacaactagcagcaaatcctgaagcatccttggccaaccgcaacagcatggtgagcagaggcatgacaggaaacataggaggacagtttggcactggaatcaatcctcagatgcagcagaatgtcttccagtatccaggagcaggaatggttccccaaggtgaggccaactttgctccatctctaagccctgggagctccatggtgccgatgccaatccctcctcctcagagttctctgctccagcaaactccacctgcctccgggtatcagtcaccagacatgaaggcctggcagcaaggagcgataggaaacaacaatgtgttcagtcaagctgtccagaaccagcccacgcctgcacagccaggagtatacaacaacatgagcatcaccgtttccatggcaggtggaaatacgaatgttcagaacatgaacccaatgatggcccagatgcagatgagctctttgcagatgccaggaatgaacactgtgtgccctgagcagataaatgatcccgcactgagacacacaggcctctactgcaaccagctctcatccactgaccttctcaaaacagaagcagatggaacccagcaggtgcaacaggttcaggtgtttgctgacgtccagtgtacagtgaatctggtaggcggggacccttacctgaaccagcctggtccactgggaactcaaaagcccacgtcaggaccacagaccccccaggcccagcagaagagcctccttcagcagctactgactgaataaccacttttaaaggaatgtgaaatttaaataatagacatacagagatatacaaatatattatatatttttctgagatttttgatatctcaatctgcagccattcttcaggtcgtagcatttggagcaaaaaaaaaaaaaaaaaaaaaaaaaaaggagtttgcttttgtcgggagattgaaagatgtttttgtttctttctttgtaaaggccttggatattgaaaaaataccaaggcagaacagttggacaatctatttcttgagccaaatttaattattcttatttttgtaatcagtcattggcttcttatctggatgaaggcttttggaggagaaccacctgcccaggaagaagggcccgtggggctttgcctgtgcccgtccaccaaaggctgtcatgtgtctcgaaatcagcagccctccccatcccaatcccaggcagcttgtgtgtacaatcagcttctctagcaactctgtatctgttggcttcaagagaatattttgcctccacatatgtaccccttctcctttttttaaagatggatttaaaccaagatgcctccaggaaagaggacgaaatgagtatattcacagaggaatccaaaaaatacagtttgggggaaaatgcaataatttttgatgagatgggtgaaggacaagaagtgagttgtgtcaattattgtagatacaattttctgattaaatctggaaaaataaaaggcagcctgttttttctgcttttattgtattaacagctgaggtagctaaagttatttaaaataaaattaaatttatgatccaagtagcttatttttccctttaaatctcattgtaaatatatttgatttcttgtagaaattgatttccttctgtttaattttatgcttttattatactcttgatttttctaaatttgtgtgtgaaatataacattgattgaattgcagttacatttggttagtaatatttcattattttaataactgtgatgtcatgtatggatttactttggggttcaaatcaaaatgtcactgccagaaagagctgttccagctgatctagagcatactgccctagagtgtccctgggatcatctgaacagaagtgcacaggctacttgtacagagaaaaaattaatactcaaaggaaatcttcattttttagattgactttgggaatttgaattttcatcagtgcaaatataaatttctctatcctgctctgaggctaattggtaccatattttccctttgtgtcttgtgactctgccacatcccatctcatcctggcctctgagtcaagaacccagtgaactgactttctagttctagaagttccgctgcaaggccaggaaagcttgagaaaggtattgtggaagaagcaaaggtagacccccatcactcacctttgtctgcatccctgggcctgtgaatgatgacagcacctgacattctgcaccagctacctctgcctccatggcagagaaaaggccataagaacagtggaagaggagcatggactcagacttcaaggaagaagccatttccccaggtccttccttctgcatctcaccacccctagttacaaataactccattgaacagcatctattcagaaactatgccgaataaaaagattggtggaagggctcatgtggttagcaactatgaaacagaaataggacactcagttacaaacattatctcctttagtttttcagaaaatgcatccctgatttcattcatttccagcttgaaagccagccatattactctagtccctaccaaactgctctagaaggtcatttccattttgtttgtgatatttagacgcgcagacttcaggaagttcacctttaacttcagcattccagatgaagtttcctgactcagtgcttttgcataaggaactagaaaaaaaaagtaaggaaaattggagatgctaacatcctcccccatcccaactgcaccttaaaatatgcatgtcaccttcaaggttttataattgcactgtttgttttatgtatgtacagattaaaattattgctacatttgaggaaaataaaattgcttgcttctatgtaattcctgtcattccacaggaaattcacttttccagctactgaatagaatttgtttaacaacctcatgggttgcctcttcatttacagggaagaaatgaaatgtacatctgcagaaattgccaaagcccaaattaacgagtattataaaaggataataaagcatccctgaagcca

SEQ ID NO: 356151 - DNA, 7347 bp, Homo sapiens
gcggccgcctgcccggcgtggggagcgggcgccccgggccgccgccgagagggggagccggaagtcggcgcgggcgcccctcggccccgacgacgccgtgaccttggccggcccgctcacctctcggaatctcgcctgccgggaccgcgaaatgggggcgaccgcggcgtccctctccgtcggcgcagccctcgacggcgcttgggtttgaccccggcgcgcttgctcgccccttctcccgagaaggggtttcggagatctatccatactaatggaaatgtaactggaactgactctgatgataaaatcaaggaccatcaagcaagatcatgcagtaggcaactttgcttccaaaagaagttaccaacatttagaatttctacttattctgaggttccagttacagctatatcagagaatgagttaatctcctcagaaatcactaaatactactctgaggggcttagaaattaacaggttgtttatataattggccttaaatgaggtgagagtgaagagactagagccatctctggaaaacatcattatcccattccccgggaagctaccctctggaactcaagatttgaccatatctgttttgaggattcattatgaacaaagaagtctccccaggtgtgaagtttttcaacatgagtggcctcggggacagttcatccgaccctgctaacccagactcacataagaggaaaggatcgccatgtgacacactggcatcaagcacggaaaagaggcgcagggagcaagaaaataaatatttagaagaactagctgagttactgtctgccaacattagtgacattgacagcttgagtgtaaaaccagacaaatgcaagattttgaagaaaacagtcgatcagatacagctaatgaagagaatggaacaagagaaatcaacaactgatgacgatgtacagaaatcagacatctcatcaagtagtcaaggagtgatagaaaaggaatccttgggacctcttcttttggaggctttggatggatttttctttgttgtgaactgtgaagggagaattgtatttgtgtcagagaatgtaaccagctacttaggttacaatcaggaggaattaatgaataccagcgtctacagcatactgcacgtgggggatcatgcagaatttgtgaagaatctgctaccaaaatcactagtaaatggagttccttggcctcaagaggcaacacgacgaaatagccatacctttaactgcaggatgctaattcaccctccagatgagccagggaccgagaaccaagaagcttgccagcgttatgaagtaatgcagtgtttcactgtgtcacagccaaaatcaattcaagaggatggagaagatttccagtcatgtctgatttgtattgcacggcgattacctcggcctccagctattacgggtgtagaatcctttatgaccaagcaagatactacaggtaaaatcatctctattgatactagttccctgagagctgctggcagaactggttgggaagatttagtgaggaagtgcatttatgcttttttccaacctcagggcagagaaccatcttatgccagacagctgttccaagaagtgatgactcgtggcactgcctccagcccctcctatagattcatattgaatgatgggacaatgcttagcgcccacaccaagtgtaaactttgctaccctcaaagtccagacatgcaacctttcatcatgggaattcatatcatcgacagggagcacagtgggctttctcctcaagatgacactaattctggaatgtcaattccccgagtaaatccctcggtcaatcctagtatctctccagctcatggtgtggctcgttcatccacattgccaccatccaacagcaacatggtatccaccagaataaaccgccagcagagctcagaccttcatagcagcagtcatagtaattctagcaacagccaaggaagtttcggatgctcacccggaagtcagattgtagccaatgttgccttaaaccaaggacaggccagttcacagagcagtaatccctctttaaacctcaataattctcctatggaaggtacaggaatatccctagcacagttcatgtctccaaggagacaggttacttctggattggcaacaaggcccaggatgccaaacaattcctttcctcctaatatttcgacattaagctctcccgttggcatgacaagtagtgcctgtaataataataaccgatcttattcaaacatcccagtaacatctttacagggtatgaatgaaggacccaataactccgttggcttctctgccagttctccagtcctcaggcagatgagctcacagaattcacctagcagattaaatatacaaccagcaaaagctgagtccaaagataacaaagagattgcctcaattttaaatgaaatgattcaatctgacaacagctctagtgatggcaaacctctggattcagggcttctgcataacaatgacagactttcagatggagacagtaaatactctcaaaccagtcacaaactagtgcagcttttgacaacaactgccgaacagcagttacggcatgctgatatagacacaagctgcaaagatgtcctgtcttgcacaggcacttccaactctgcctctgctaactcttcaggaggttcttgtccctcttctcatagctcattgacagaacggcataaaattctacaccggctcttacaggagggtagcccctcagatatcaccactttgtctgtcgagcctgataaaaaggacagtgcatctacttctgtgtcagtgactggacaggtacaaggaaactccagtataaaactagaactggatgcttcaaagaaaaaagaatcaaaagaccatcagctcctacgctatcttttagataaagatgagaaagatttaagatcaactccaaacctgagcctggatgatgtaaaggtgaaagtggaaaagaaagaacagatggatccatgtaatacaaacccaaccccaatgaccaaacccactcctgaggaaataaaactggaggcccagagccagtttacagctgaccttgaccagtttgatcagttactgcccacgctggagaaggcagcacagttgccaggcttatgtgagacagacaggatggatggtgcggtcaccagtgtaaccatcaaatcggagatcctgccagcttcacttcagtccgccactgccagacccacttccaggctaaatagattacctgagctggaattggaagcaattgataaccaatttggacaaccaggaacaggcgatcagattccatggacaaataatacagtgacagctataaatcagagtaaatcagaagaccagtgtattagctcacaattagatgagcttctctgtccacccacaacagtagaagggagaaatgatgagaaggctcttcttgaacagctggtatccttccttagtggcaaagatgaaactgagctagctgaactagacagagctctgggaattgacaaacttgttcaggggggtggattagatgtattatcagagagatttccaccacaacaagcaacgccacctttgatcatggaagaaagacccaacctttattcccagccttactcttctccttctcctactgccaatctccctagccctttccaaggcatggtcaggcaaaaaccttcactggggacgatgcctgttcaagtaacacctccccgaggtgctttttcacctggcatgggcatgcagcccaggcaaactctaaacagacctccggctgcacctaaccagcttcgacttcaactacagcagcgattacagggacaacagcagttgatacaccaaaatcggcaagctatcttaaaccagtttgcagcaactgctcctgttggcatcaatatgagatcaggcatgcaacagcaaattacacctcagccacccctgaatgctcaaatgttggcacaacgtcagcgggaactgtacagtcaacagcaccgacagaggcagctaatacagcagcaaagagccatgcttatgaggcagcaaagctttgggaacaacctccctccctcatctggactaccagttcaaatggggaacccccgtcttcctcagggtgctccacagcaattcccctatccaccaaactatggtacaaatccaggaaccccacctgcttctaccagcccgttttcacaactagcagcaaatcctgaagcatccttggccaaccgcaacagcatggtgagcagaggcatgacaggaaacataggaggacagtttggcactggaatcaatcctcagatgcagcagaatgtcttccagtatccaggagcaggaatggttccccaaggtgaggccaactttgctccatctctaagccctgggagctccatggtgccgatgccaatccctcctcctcagagttctctgctccagcaaactccacctgcctccgggtatcagtcaccagacatgaaggcctggcagcaaggagcgataggaaacaacaatgtgttcagtcaagctgtccagaaccagcccacgcctgcacagccaggagtatacaacaacatgagcatcaccgtttccatggcaggtggaaatacgaatgttcagaacatgaacccaatgatggcccagatgcagatgagctctttgcagatgccaggaatgaacactgtgtgccctgagcagataaatgatcccgcactgagacacacaggcctctactgcaaccagctctcatccactgaccttctcaaaacagaagcagatggaacccaggacaagaagacagaagagttcttctctgtggtgactacagactagaggaatgctctacaggtgcaacaggttcaggtgtttgctgacgtccagtgtacagtgaatctggtaggcggggacccttacctgaaccagcctggtccactgggaactcaaaagcccacgtcaggaccacagaccccccaggcccagcagaagagcctccttcagcagctactgactgaataaccacttttaaaggaatgtgaaatttaaataatagacatacagagatatacaaatatattatatatttttctgagatttttgatatctcaatctgcagccattcttcaggtcgtagcatttggagcaaaaaaaaaaaaaaaaaaaaaaaaaaaggagtttgcttttgtcgggagattgaaagatgtttttgtttctttctttgtaaaggccttggatattgaaaaaataccaaggcagaacagttggacaatctatttcttgagccaaatttaattattcttatttttgtaatcagtcattggcttcttatctggatgaaggcttttggaggagaaccaaaacgacaagttccaagaagaagatgaagctccgcctccgccgcttagtcccaaccctgcccaggaagaagggcccgtggggctttgcctgtgcccgtccaccaaaggctgtcatgtgtctcgaaatcagcagccctccccatcccaatcccaggcagcttgtgtgtacaatcagcttctctagcaactctgtatctgttggcttcaagagaatattttgcctccacatatgtaccccttctcctttttttaaagatggatttaaaccaagatgcctccaggaaagaggacgaaatgagtatattcacagaggaatccaaaaaatacagtttgggggaaaatgcaataatttttgatgagatgggtgaaggacaagaagtgagttgtgtcaattattgtagatacaattttctgattaaatctggaaaaataaaaggcagcctgttttttctgcttttattgtattaacagctgaggtagctaaagttatttaaaataaaattaaatttatgatccaagtagcttatttttccctttaaatctcattgtaaatatatttgatttcttgtagaaattgatttccttctgtttaattttatgcttttattatactcttgatttttctaaatttgtgtgtgaaatataacattgattgaattgcagttacatttggttagtaatatttcattattttaataactgtgatgtcatgtatggatttactttggggttcaaatcaaaatgtcactgccagaaagagctgttccagctgatctagagcatactgccctagagtgtccctgggatcatctgaacagaagtgcacaggctacttgtacagagaaaaaattaatactcaaaggaaatcttcattttttagattgactttgggaatttgaattttcatcagtgcaaatataaatttctctatcctgctctgaggctaattggtaccatattttccctttgtgtcttgtgactctgccacatcccatctcatcctggcctctgagtcaagaacccagtgaactgactttctagttctagaagttccgctgcaaggccaggaaagcttgagaaaggtattgtggaagaagcaaaggtagacccccatcactcacctttgtctgcatccctgggcctgtgaatgatgacagcacctgacattctgcaccagctacctctgcctccatggcagagaaaaggccataagaacagtggaagaggagcatggactcagacttcaaggaagaagccatttccccaggtccttccttctgcatctcaccacccctagttacaaataactccattgaacagcatctattcagaaactatgccgaataaaaagattggtggaagggctcatgtggttagcaactatgaaacagaaataggacactcagttacaaacattatctcctttagtttttcagaaaatgcatccctgatttcattcatttccagcttgaaagccagccatattactctagtccctaccaaactgctctagaaggtcatttccattttgtttgtgatatttagacgcgcagacttcaggaagttcacctttaacttcagcattccagatgaagtttcctgactcagtgcttttgcataaggaactagaaaaaaaaagtaaggaaaattggagatgctaacatcctcccccatcccaactgcaccttaaaatatgcatgtcaccttcaaggttttataattgcactgtttgttttatgtatgtacagattaaaattattgctacatttgaggaaaataaaattgcttgcttctatgtaattcctgtcattccacaggaaattcacttttccagctactgaatagaatttgtttaacaacctcatgggttgcctcttcatttacagggaagaaatgaaatgtacatctgcagaaattgccaaagcccaaattaacgagtattataaaaggataataaagcatccctgaagcca

SEQ ID NO: 356152 - DNA, 5830 bp, Homo sapiens
tttttctatttcaagaagttattcataatataaagtagttccaaatgtaactgctgtgtttattacttgtttgcttttactatctagtaattgttatttgaaaatattcaagatgtatatatgattggggaaatacatctgttatagcagtcaatttactttatatattttagccagaattgttttctaaattttggtattttgtaatgtccactttttagatgtgaatttatatcactttctaaatctggttttatattttcgataaaaataaagatctcactaaatgtgtaagcatagatacttgatcagagaaggaaatatggtgatacaaatgtacactaactggattttctttgtgtaacagcacggaaaagaggcgcagggagcaagaaaataaatatttagaagaactagctgagttactgtctgccaacattagtgacattgacagcttgagtgtaaaaccagacaaatgcaagattttgaagaaaacagtcgatcagatacagctaatgaagagaatggaacaagagaaatcaacaactgatgacgatgtacagaaatcagacatctcatcaagtagtcaaggagtgatagaaaaggagacaggttacttctggattggcaacaaggcccaggatgccaaacaattcctttcctcctaatatttcgacattaagctctcccgttggcatgacaagtagtgcctgtaataataataaccgatcttattcaaacatcccagtaacatctttacagggtatgaatgaaggacccaataactccgttggcttctctgccagttctccagtcctcaggcagatgagctcacagaattcacctagcagattaaatatacaaccagcaaaagctgagtccaaagataacaaagagattgcctcaattttaaatgaaatgattcaatctgacaacagctctagtgatggcaaacctctggattcagggcttctgcataacaatgacagactttcagatggagacagtaaatactctcaaaccagtcacaaactagtgcagcttttgacaacaactgccgaacagcagttacggcatgctgatatagacacaagctgcaaagatgtcctgtcttgcacaggcacttccaactctgcctctgctaactcttcaggaggttcttgtccctcttctcatagctcattgacagaacggcataaaattctacaccggctcttacaggagggtagcccctcagatatcaccactttgtctgtcgagcctgataaaaaggacagtgcatctacttctgtgtcagtgactggacaggtacaaggaaactccagtataaaactagaactggatgcttcaaagaaaaaagaatcaaaagaccatcagctcctacgctatcttttagataaagatgagaaagatttaagatcaactccaaacctgagcctggatgatgtaaaggtgaaagtggaaaagaaagaacagatggatccatgtaatacaaacccaaccccaatgaccaaacccactcctgaggaaataaaactggaggcccagagccagtttacagctgaccttgaccagtttgatcagttactgcccacgctggagaaggcagcacagttgccaggcttatgtgagacagacaggatggatggtgcggtcaccagtgtaaccatcaaatcggagatcctgccagcttcacttcagtccgccactgccagacccacttccaggctaaatagattacctgagctggaattggaagcaattgataaccaatttggacaaccaggaacaggcgatcagattccatggacaaataatacagtgacagctataaatcagagtaaatcagaagaccagtgtattagctcacaattagatgagcttctctgtccacccacaacagtagaagggagaaatgatgagaaggctcttcttgaacagctggtatccttccttagtggcaaagatgaaactgagctagctgaactagacagagctctgggaattgacaaacttgttcaggggggtggattagatgtattatcagagagatttccaccacaacaagcaacgccacctttgatcatggaagaaagacccaacctttattcccagccttactcttctccttctcctactgccaatctccctagccctttccaaggcatggtcaggcaaaaaccttcactggggacgatgcctgttcaagtaacacctccccgaggtgctttttcacctggcatgggcatgcagcccaggcaaactctaaacagacctccggctgcacctaaccagcttcgacttcaactacagcagcgattacagggacaacagcagttgatacaccaaaatcggcaagctatcttaaaccagtttgcagcaactgctcctgttggcatcaatatgagatcaggcatgcaacagcaaattacacctcagccacccctgaatgctcaaatgttggcacaacgtcagcgggaactgtacagtcaacagcaccgacagaggcagctaatacagcagcaaagagccatgcttatgaggcagcaaagctttgggaacaacctccctccctcatctggactaccagttcaaatggggaacccccgtcttcctcagggtgctccacagcaattcccctatccaccaaactatggtacaaatccaggaaccccacctgcttctaccagcccgttttcacaactagcagcaaatcctgaagcatccttggccaaccgcaacagcatggtgagcagaggcatgacaggaaacataggaggacagtttggcactggaatcaatcctcagatgcagcagaatgtcttccagtatccaggagcaggaatggttccccaaggtgaggccaactttgctccatctctaagccctgggagctccatggtgccgatgccaatccctcctcctcagagttctctgctccagcaaactccacctgcctccgggtatcagtcaccagacatgaaggcctggcagcaaggagcgataggaaacaacaatgtgttcagtcaagctgtccagaaccagcccacgcctgcacagccaggagtatacaacaacatgagcatcaccgtttccatggcaggtggaaatacgaatgttcagaacatgaacccaatgatggcccagatgcagatgagctctttgcagatgccaggaatgaacactgtgtgccctgagcagataaatgatcccgcactgagacacacaggcctctactgcaaccagctctcatccactgaccttctcaaaacagaagcagatggaacccaggacaagaagacagaagagttcttctctgtggtgactacagactagaggaatgctctacaggtgcaacaggttcaggtgtttgctgacgtccagtgtacagtgaatctggtaggcggggacccttacctgaaccagcctggtccactgggaactcaaaagcccacgtcaggaccacagaccccccaggcccagcagaagagcctccttcagcagctactgactgaataaccacttttaaaggaatgtgaaatttaaataatagacatacagagatatacaaatatattatatatttttctgagatttttgatatctcaatctgcagccattcttcaggtcgtagcatttggagcaaaaaaaaaaaaaaaaaaaaaaaaaaaggagtttgcttttgtcgggagattgaaagatgtttttgtttctttctttgtaaaggccttggatattgaaaaaataccaaggcagaacagttggacaatctatttcttgagccaaatttaattattcttatttttgtaatcagtcattggcttcttatctggatgaaggcttttggaggagaaccaaaacgacaagttccaagaagaagatgaagctccgcctccgccgcttagtcccaaccctgcccaggaagaagggcccgtggggctttgcctgtgcccgtccaccaaaggctgtcatgtgtctcgaaatcagcagccctccccatcccaatcccaggcagcttgtgtgtacaatcagcttctctagcaactctgtatctgttggcttcaagagaatattttgcctccacatatgtaccccttctcctttttttaaagatggatttaaaccaagatgcctccaggaaagaggacgaaatgagtatattcacagaggaatccaaaaaatacagtttgggggaaaatgcaataatttttgatgagatgggtgaaggacaagaagtgagttgtgtcaattattgtagatacaattttctgattaaatctggaaaaataaaaggcagcctgttttttctgcttttattgtattaacagctgaggtagctaaagttatttaaaataaaattaaatttatgatccaagtagcttatttttccctttaaatctcattgtaaatatatttgatttcttgtagaaattgatttccttctgtttaattttatgcttttattatactcttgatttttctaaatttgtgtgtgaaatataacattgattgaattgcagttacatttggttagtaatatttcattattttaataactgtgatgtcatgtatggatttactttggggttcaaatcaaaatgtcactgccagaaagagctgttccagctgatctagagcatactgccctagagtgtccctgggatcatctgaacagaagtgcacaggctacttgtacagagaaaaaattaatactcaaaggaaatcttcattttttagattgactttgggaatttgaattttcatcagtgcaaatataaatttctctatcctgctctgaggctaattggtaccatattttccctttgtgtcttgtgactctgccacatcccatctcatcctggcctctgagtcaagaacccagtgaactgactttctagttctagaagttccgctgcaaggccaggaaagcttgagaaaggtattgtggaagaagcaaaggtagacccccatcactcacctttgtctgcatccctgggcctgtgaatgatgacagcacctgacattctgcaccagctacctctgcctccatggcagagaaaaggccataagaacagtggaagaggagcatggactcagacttcaaggaagaagccatttccccaggtccttccttctgcatctcaccacccctagttacaaataactccattgaacagcatctattcagaaactatgccgaataaaaagattggtggaagggctcatgtggttagcaactatgaaacagaaataggacactcagttacaaacattatctcctttagtttttcagaaaatgcatccctgatttcattcatttccagcttgaaagccagccatattactctagtccctaccaaactgctctagaaggtcatttccattttgtttgtgatatttagacgcgcagacttcaggaagttcacctttaacttcagcattccagatgaagtttcctgactcagtgcttttgcataaggaactagaaaaaaaaagtaaggaaaattggagatgctaacatcctcccccatcccaactgcaccttaaaatatgcatgtcaccttcaaggttttataattgcactgtttgttttatgtatgtacagattaaaattattgctacatttgaggaaaataaaattgcttgcttctatgtaattcctgtcattccacaggaaattcacttttccagctactgaatagaatttgtttaacaacctcatgggttgcctcttcatttacagggaagaaatgaaatgtacatctgcagaaattgccaaagcccaaattaacgagtattataaaaggataataaagcatccctgaagcca

SEQ ID NO: 356153 - DNA, 4329 bp, Homo sapiens
taagccaagcttgaatctactcaagggaaataaaactggaggcccagagccagtttacagctgaccttgaccagtttgatcagttactgcccacgctggagaaggcagcacagttgccaggcttatgtgagacagacaggatggatggtgcggtcaccagtgtaaccatcaaatcggagatcctgccagcttcacttcagtccgccactgccagacccacttccaggctaaatagattacctgagctggaattggaagcaattgataaccaatttggacaaccaggaacaggcgatcagattccatggacaaataatacagtgacagctataaatcagagtaaatcagaagaccagtgtattagctcacaattagatgagcttctctgtccacccacaacagtagaagggagaaatgatgagaaggctcttcttgaacagctggtatccttccttagtggcaaagatgaaactgagctagctgaactagacagagctctgggaattgacaaacttgttcaggggggtggattagatgtattatcagagagatttccaccacaacaagcaacgccacctttgatcatggaagaaagacccaacctttattcccagccttactcttctccttctcctactgccaatctccctagccctttccaaggcatggtcaggcaaaaaccttcactggggacgatgcctgttcaagtaacacctccccgaggtgctttttcacctggcatgggcatgcagcccaggcaaactctaaacagacctccggctgcacctaaccagcttcgacttcaactacagcagcgattacagggacaacagcagttgatacaccaaaatcggcaagctatcttaaaccagtttgcagcaactgctcctgttggcatcaatatgagatcaggcatgcaacagcaaattacacctcagccacccctgaatgctcaaatgttggcacaacgtcagcgggaactgtacagtcaacagcaccgacagaggcagctaatacagcagcaaagagccatgcttatgaggcagcaaagctttgggaacaacctccctccctcatctggactaccagttcaaatggggaacccccgtcttcctcagggtgctccacagcaattcccctatccaccaaactatggtacaaatccaggaaccccacctgcttctaccagcccgttttcacaactagcagcaaatcctgaagcatccttggccaaccgcaacagcatggtgagcagaggcatgacaggaaacataggaggacagtttggcactggaatcaatcctcagatgcagcagaatgtcttccagtatccaggagcaggaatggttccccaaggtgaggccaactttgctccatctctaagccctgggagctccatggtgccgatgccaatccctcctcctcagagttctctgctccagcaaactccacctgcctccgggtatcagtcaccagacatgaaggcctggcagcaaggagcgataggaaacaacaatgtgttcagtcaagctgtccagaaccagcccacgcctgcacagccaggagtatacaacaacatgagcatcaccgtttccatggcaggtggaaatacgaatgttcagaacatgaacccaatgatggcccagatgcagatgagctctttgcagatgccaggaatgaacactgtgtgccctgagcagataaatgatcccgcactgagacacacaggcctctactgcaaccagctctcatccactgaccttctcaaaacagaagcagatggaacccaggacaagaagacagaagagttcttctctgtggtgactacagactagaggaatgctctacaggtgcaacaggttcaggtgtttgctgacgtccagtgtacagtgaatctggtaggcggggacccttacctgaaccagcctggtccactgggaactcaaaagcccacgtcaggaccacagaccccccaggcccagcagaagagcctccttcagcagctactgactgaataaccacttttaaaggaatgtgaaatttaaataatagacatacagagatatacaaatatattatatatttttctgagatttttgatatctcaatctgcagccattcttcaggtcgtagcatttggagcaaaaaaaaaaaaaaaaaaaaaaaaaaaggagtttgcttttgtcgggagattgaaagatgtttttgtttctttctttgtaaaggccttggatattgaaaaaataccaaggcagaacagttggacaatctatttcttgagccaaatttaattattcttatttttgtaatcagtcattggcttcttatctggatgaaggcttttggaggagaaccaaaacgacaagttccaagaagaagatgaagctccgcctccgccgcttagtcccaaccctgcccaggaagaagggcccgtggggctttgcctgtgcccgtccaccaaaggctgtcatgtgtctcgaaatcagcagccctccccatcccaatcccaggcagcttgtgtgtacaatcagcttctctagcaactctgtatctgttggcttcaagagaatattttgcctccacatatgtaccccttctcctttttttaaagatggatttaaaccaagatgcctccaggaaagaggacgaaatgagtatattcacagaggaatccaaaaaatacagtttgggggaaaatgcaataatttttgatgagatgggtgaaggacaagaagtgagttgtgtcaattattgtagatacaattttctgattaaatctggaaaaataaaaggcagcctgttttttctgcttttattgtattaacagctgaggtagctaaagttatttaaaataaaattaaatttatgatccaagtagcttatttttccctttaaatctcattgtaaatatatttgatttcttgtagaaattgatttccttctgtttaattttatgcttttattatactcttgatttttctaaatttgtgtgtgaaatataacattgattgaattgcagttacatttggttagtaatatttcattattttaataactgtgatgtcatgtatggatttactttggggttcaaatcaaaatgtcactgccagaaagagctgttccagctgatctagagcatactgccctagagtgtccctgggatcatctgaacagaagtgcacaggctacttgtacagagaaaaaattaatactcaaaggaaatcttcattttttagattgactttgggaatttgaattttcatcagtgcaaatataaatttctctatcctgctctgaggctaattggtaccatattttccctttgtgtcttgtgactctgccacatcccatctcatcctggcctctgagtcaagaacccagtgaactgactttctagttctagaagttccgctgcaaggccaggaaagcttgagaaaggtattgtggaagaagcaaaggtagacccccatcactcacctttgtctgcatccctgggcctgtgaatgatgacagcacctgacattctgcaccagctacctctgcctccatggcagagaaaaggccataagaacagtggaagaggagcatggactcagacttcaaggaagaagccatttccccaggtccttccttctgcatctcaccacccctagttacaaataactccattgaacagcatctattcagaaactatgccgaataaaaagattggtggaagggctcatgtggttagcaactatgaaacagaaataggacactcagttacaaacattatctcctttagtttttcagaaaatgcatccctgatttcattcatttccagcttgaaagccagccatattactctagtccctaccaaactgctctagaaggtcatttccattttgtttgtgatatttagacgcgcagacttcaggaagttcacctttaacttcagcattccagatgaagtttcctgactcagtgcttttgcataaggaactagaaaaaaaaagtaaggaaaattggagatgctaacatcctcccccatcccaactgcaccttaaaatatgcatgtcaccttcaaggttttataattgcactgtttgttttatgtatgtacagattaaaattattgctacatttgaggaaaataaaattgcttgcttctatgtaattcctgtcattccacaggaaattcacttttccagctactgaatagaatttgtttaacaacctcatgggttgcctcttcatttacagggaagaaatgaaatgtacatctgcagaaattgccaaagcccaaattaacgagtattataaaaggataataaagcatccctgaagcca

SEQ ID NO: 356154 - DNA, 6882 bp, Homo sapiens
tttttctatttcaagaagttattcataatataaagtagttccaaatgtaactgctgtgtttattacttgtttgcttttactatctagtaattgttatttgaaaatattcaagatgtatatatgattggggaaatacatctgttatagcagtcaatttactttatatattttagccagaattgttttctaaattttggtattttgtaatgtccactttttagatgtgaatttatatcactttctaaatctggttttatattttcgataaaaataaagatctcactaaatgtgtaagcatagatacttgatcagagaaggaaatatggtgatacaaatgtacactaactggattttctttgtgtaacagcacggaaaagaggcgcagggagcaagaaaataaatatttagaagaactagctgagttactgtctgccaacattagtgacattgacagcttgagtgtaaaaccagacaaatgcaagattttgaagaaaacagtcgatcagatacagctaatgaagagaatggaacaagagaaatcaacaactgatgacgatgtacagaaatcagacatctcatcaagtagtcaaggagtgatagaaaaggaatccttgggacctcttcttttggaggctttggatggatttttctttgttgtgaactgtgaagggagaattgtatttgtgtcagagaatgtaaccagctacttaggttacaatcaggaggaattaatgaataccagcgtctacagcatactgcacgtgggggatcatgcagaatttgtgaagaatctgctaccaaaatcactagtaaatggagttccttggcctcaagaggcaacacgacgaaatagccatacctttaactgcaggatgctaattcaccctccagatgagccagggaccgagaaccaagaagcttgccagcgttatgaagtaatgcagtgtttcactgtgtcacagccaaaatcaattcaagaggatggagaagatttccagtcatgtctgatttgtattgcacggcgattacctcggcctccagctattacgggtgtagaatcctttatgaccaagcaagatactacaggtaaaatcatctctattgatactagttccctgagagctgctggcagaactggttgggaagatttagtgaggaagtgcatttatgcttttttccaacctcagggcagagaaccatcttatgccagacagctgttccaagaagtgatgactcgtggcactgcctccagcccctcctatagattcatattgaatgatgggacaatgcttagcgcccacaccaagtgtaaactttgctaccctcaaagtccagacatgcaacctttcatcatgggaattcatatcatcgacagggagcacagtgggctttctcctcaagatgacactaattctggaatgtcaattccccgagtaaatccctcggtcaatcctagtatctctccagctcatggtgtggctcgttcatccacattgccaccatccaacagcaacatggtatccaccagaataaaccgccagcagagctcagaccttcatagcagcagtcatagtaattctagcaacagccaaggaagtttcggatgctcacccggaagtcagattgtagccaatgttgccttaaaccaaggacaggccagttcacagagcagtaatccctctttaaacctcaataattctcctatggaaggtacaggaatatccctagcacagttcatgtctccaaggagacaggttacttctggattggcaacaaggcccaggatgccaaacaattcctttcctcctaatatttcgacattaagctctcccgttggcatgacaagtagtgcctgtaataataataaccgatcttattcaaacatcccagtaacatctttacagggtatgaatgaaggacccaataactccgttggcttctctgccagttctccagtcctcaggcagatgagctcacagaattcacctagcagattaaatatacaaccagcaaaagctgagtccaaagataacaaagagattgcctcaattttaaatgaaatgattcaatctgacaacagctctagtgatggcaaacctctggattcagggcttctgcataacaatgacagactttcagatggagacagtaaatactctcaaaccagtcacaaactagtgcagcttttgacaacaactgccgaacagcagttacggcatgctgatatagacacaagctgcaaagatgtcctgtcttgcacaggcacttccaactctgcctctgctaactcttcaggaggttcttgtccctcttctcatagctcattgacagaacggcataaaattctacaccggctcttacaggagggtagcccctcagatatcaccactttgtctgtcgagcctgataaaaaggacagtgcatctacttctgtgtcagtgactggacaggtacaaggaaactccagtataaaactagaactggatgcttcaaagaaaaaagaatcaaaagaccatcagctcctacgctatcttttagataaagatgagaaagatttaagatcaactccaaacctgagcctggatgatgtaaaggtgaaagtggaaaagaaagaacagatggatccatgtaatacaaacccaaccccaatgaccaaacccactcctgaggaaataaaactggaggcccagagccagtttacagctgaccttgaccagtttgatcagttactgcccacgctggagaaggcagcacagttgccaggcttatgtgagacagacaggatggatggtgcggtcaccagtgtaaccatcaaatcggagatcctgccagcttcacttcagtccgccactgccagacccacttccaggctaaatagattacctgagctggaattggaagcaattgataaccaatttggacaaccaggaacaggcgatcagattccatggacaaataatacagtgacagctataaatcagagtaaatcagaagaccagtgtattagctcacaattagatgagcttctctgtccacccacaacagtagaagggagaaatgatgagaaggctcttcttgaacagctggtatccttccttagtggcaaagatgaaactgagctagctgaactagacagagctctgggaattgacaaacttgttcaggggggtggattagatgtattatcagagagatttccaccacaacaagcaacgccacctttgatcatggaagaaagacccaacctttattcccagccttactcttctccttctcctactgccaatctccctagccctttccaaggcatggtcaggcaaaaaccttcactggggacgatgcctgttcaagtaacacctccccgaggtgctttttcacctggcatgggcatgcagcccaggcaaactctaaacagacctccggctgcacctaaccagcttcgacttcaactacagcagcgattacagggacaacagcagttgatacaccaaaatcggcaagctatcttaaaccagtttgcagcaactgctcctgttggcatcaatatgagatcaggcatgcaacagcaaattacacctcagccacccctgaatgctcaaatgttggcacaacgtcagcgggaactgtacagtcaacagcaccgacagaggcagctaatacagcagcaaagagccatgcttatgaggcagcaaagctttgggaacaacctccctccctcatctggactaccagttcaaatggggaacccccgtcttcctcagggtgctccacagcaattcccctatccaccaaactatggtacaaatccaggaaccccacctgcttctaccagcccgttttcacaactagcagcaaatcctgaagcatccttggccaaccgcaacagcatggtgagcagaggcatgacaggaaacataggaggacagtttggcactggaatcaatcctcagatgcagcagaatgtcttccagtatccaggagcaggaatggttccccaaggtgaggccaactttgctccatctctaagccctgggagctccatggtgccgatgccaatccctcctcctcagagttctctgctccagcaaactccacctgcctccgggtatcagtcaccagacatgaaggcctggcagcaaggagcgataggaaacaacaatgtgttcagtcaagctgtccagaaccagcccacgcctgcacagccaggagtatacaacaacatgagcatcaccgtttccatggcaggtggaaatacgaatgttcagaacatgaacccaatgatggcccagatgcagatgagctctttgcagatgccaggaatgaacactgtgtgccctgagcaggacaagaagacagaagagttcttctctgtggtgactacagactagaggaatgctctacaggtgcaacaggttcaggtgtttgctgacgtccagtgtacagtgaatctggtaggcggggacccttacctgaaccagcctggtccactgggaactcaaaagcccacgtcaggaccacagaccccccaggcccagcagaagagcctccttcagcagctactgactgaataaccacttttaaaggaatgtgaaatttaaataatagacatacagagatatacaaatatattatatatttttctgagatttttgatatctcaatctgcagccattcttcaggtcgtagcatttggagcaaaaaaaaaaaaaaaaaaaaaaaaaaaggagtttgcttttgtcgggagattgaaagatgtttttgtttctttctttgtaaaggccttggatattgaaaaaataccaaggcagaacagttggacaatctatttcttgagccaaatttaattattcttatttttgtaatcagtcattggcttcttatctggatgaaggcttttggaggagaaccaaaacgacaagttccaagaagaagatgaagctccgcctccgccgcttagtcccaaccctgcccaggaagaagggcccgtggggctttgcctgtgcccgtccaccaaaggctgtcatgtgtctcgaaatcagcagccctccccatcccaatcccaggcagcttgtgtgtacaatcagcttctctagcaactctgtatctgttggcttcaagagaatattttgcctccacatatgtaccccttctcctttttttaaagatggatttaaaccaagatgcctccaggaaagaggacgaaatgagtatattcacagaggaatccaaaaaatacagtttgggggaaaatgcaataatttttgatgagatgggtgaaggacaagaagtgagttgtgtcaattattgtagatacaattttctgattaaatctggaaaaataaaaggcagcctgttttttctgcttttattgtattaacagctgaggtagctaaagttatttaaaataaaattaaatttatgatccaagtagcttatttttccctttaaatctcattgtaaatatatttgatttcttgtagaaattgatttccttctgtttaattttatgcttttattatactcttgatttttctaaatttgtgtgtgaaatataacattgattgaattgcagttacatttggttagtaatatttcattattttaataactgtgatgtcatgtatggatttactttggggttcaaatcaaaatgtcactgccagaaagagctgttccagctgatctagagcatactgccctagagtgtccctgggatcatctgaacagaagtgcacaggctacttgtacagagaaaaaattaatactcaaaggaaatcttcattttttagattgactttgggaatttgaattttcatcagtgcaaatataaatttctctatcctgctctgaggctaattggtaccatattttccctttgtgtcttgtgactctgccacatcccatctcatcctggcctctgagtcaagaacccagtgaactgactttctagttctagaagttccgctgcaaggccaggaaagcttgagaaaggtattgtggaagaagcaaaggtagacccccatcactcacctttgtctgcatccctgggcctgtgaatgatgacagcacctgacattctgcaccagctacctctgcctccatggcagagaaaaggccataagaacagtggaagaggagcatggactcagacttcaaggaagaagccatttccccaggtccttccttctgcatctcaccacccctagttacaaataactccattgaacagcatctattcagaaactatgccgaataaaaagattggtggaagggctcatgtggttagcaactatgaaacagaaataggacactcagttacaaacattatctcctttagtttttcagaaaatgcatccctgatttcattcatttccagcttgaaagccagccatattactctagtccctaccaaactgctctagaaggtcatttccattttgtttgtgatatttagacgcgcagacttcaggaagttcacctttaacttcagcattccagatgaagtttcctgactcagtgcttttgcataaggaactagaaaaaaaaagtaaggaaaattggagatgctaacatcctcccccatcccaactgcaccttaaaatatgcatgtcaccttcaaggttttataattgcactgtttgttttatgtatgtacagattaaaattattgctacatttgaggaaaataaaattgcttgcttctatgtaattcctgtcattccacaggaaattcacttttccagctactgaatagaatttgtttaacaacctcatgggttgcctcttcatttacagggaagaaatgaaatgtacatctgcagaaattgccaaagcccaaattaacgagtattataaaaggataataaagcatccctgaagcca

SEQ ID NO: 356155 - DNA, 6825 bp, Homo sapiens
tttttctatttcaagaagttattcataatataaagtagttccaaatgtaactgctgtgtttattacttgtttgcttttactatctagtaattgttatttgaaaatattcaagatgtatatatgattggggaaatacatctgttatagcagtcaatttactttatatattttagccagaattgttttctaaattttggtattttgtaatgtccactttttagatgtgaatttatatcactttctaaatctggttttatattttcgataaaaataaagatctcactaaatgtgtaagcatagatacttgatcagagaaggaaatatggtgatacaaatgtacactaactggattttctttgtgtaacagcacggaaaagaggcgcagggagcaagaaaataaatatttagaagaactagctgagttactgtctgccaacattagtgacattgacagcttgagtgtaaaaccagacaaatgcaagattttgaagaaaacagtcgatcagatacagctaatgaagagaatggaacaagagaaatcaacaactgatgacgatgtacagaaatcagacatctcatcaagtagtcaaggagtgatagaaaaggaatccttgggacctcttcttttggaggctttggatggatttttctttgttgtgaactgtgaagggagaattgtatttgtgtcagagaatgtaaccagctacttaggttacaatcaggaggaattaatgaataccagcgtctacagcatactgcacgtgggggatcatgcagaatttgtgaagaatctgctaccaaaatcactagtaaatggagttccttggcctcaagaggcaacacgacgaaatagccatacctttaactgcaggatgctaattcaccctccagatgagccagggaccgagaaccaagaagcttgccagcgttatgaagtaatgcagtgtttcactgtgtcacagccaaaatcaattcaagaggatggagaagatttccagtcatgtctgatttgtattgcacggcgattacctcggcctccagctattacgggtgtagaatcctttatgaccaagcaagatactacaggtaaaatcatctctattgatactagttccctgagagctgctggcagaactggttgggaagatttagtgaggaagtgcatttatgcttttttccaacctcagggcagagaaccatcttatgccagacagctgttccaagaagtgatgactcgtggcactgcctccagcccctcctatagattcatattgaatgatgggacaatgcttagcgcccacaccaagtgtaaactttgctaccctcaaagtccagacatgcaacctttcatcatgggaattcatatcatcgacagggagcacagtgggctttctcctcaagatgacactaattctggaatgtcaattccccgagtaaatccctcggtcaatcctagtatctctccagctcatggtgtggctcgttcatccacattgccaccatccaacagcaacatggtatccaccagaataaaccgccagcagagctcagaccttcatagcagcagtcatagtaattctagcaacagccaaggaagtttcggatgctcacccggaagtcagattgtagccaatgttgccttaaaccaaggacaggccagttcacagagcagtaatccctctttaaacctcaataattctcctatggaaggtacaggaatatccctagcacagttcatgtctccaaggagacaggttacttctggattggcaacaaggcccaggatgccaaacaattcctttcctcctaatatttcgacattaagctctcccgttggcatgacaagtagtgcctgtaataataataaccgatcttattcaaacatcccagtaacatctttacagggtatgaatgaaggacccaataactccgttggcttctctgccagttctccagtcctcaggcagatgagctcacagaattcacctagcagattaaatatacaaccagcaaaagctgagtccaaagataacaaagagattgcctcaattttaaatgaaatgattcaatctgacaacagctctagtgatggcaaacctctggattcagggcttctgcataacaatgacagactttcagatggagacagtaaatactctcaaaccagtcacaaactagtgcagcttttgacaacaactgccgaacagcagttacggcatgctgatatagacacaagctgcaaagatgtcctgtcttgcacaggcacttccaactctgcctctgctaactcttcaggaggttcttgtccctcttctcatagctcattgacagaacggcataaaattctacaccggctcttacaggagggtagcccctcagatatcaccactttgtctgtcgagcctgataaaaaggacagtgcatctacttctgtgtcagtgactggacaggtacaaggaaactccagtataaaactagaactggatgcttcaaagaaaaaagaatcaaaagaccatcagctcctacgctatcttttagataaagatgagaaagatttaagatcaactccaaacctgagcctggatgatgtaaaggtgaaagtggaaaagaaagaacagatggatccatgtaatacaaacccaaccccaatgaccaaacccactcctgaggaaataaaactggaggcccagagccagtttacagctgaccttgaccagtttgatcagttactgcccacgctggagaaggcagcacagttgccaggcttatgtgagacagacaggatggatggtgcggtcaccagtgtaaccatcaaatcggagatcctgccagcttcacttcagtccgccactgccagacccacttccaggctaaatagattacctgagctggaattggaagcaattgataaccaatttggacaaccaggaacaggcgatcagattccatggacaaataatacagtgacagctataaatcagagtaaatcagaagaccagtgtattagctcacaattagatgagcttctctgtccacccacaacagtagaagggagaaatgatgagaaggctcttcttgaacagctggtatccttccttagtggcaaagatgaaactgagctagctgaactagacagagctctgggaattgacaaacttgttcaggggggtggattagatgtattatcagagagatttccaccacaacaagcaacgccacctttgatcatggaagaaagacccaacctttattcccagccttactcttctccttctcctactgccaatctccctagccctttccaaggcatggtcaggcaaaaaccttcactggggacgatgcctgttcaagtaacacctccccgaggtgctttttcacctggcatgggcatgcagcccaggcaaactctaaacagacctccggctgcacctaaccagcttcgacttcaactacagcagcgattacagggacaacagcagttgatacaccaaaatcggcaagctatcttaaaccagtttgcagcaactgctcctgttggcatcaatatgagatcaggcatgcaacagcaaattacacctcagccacccctgaatgctcaaatgttggcacaacgtcagcgggaactgtacagtcaacagcaccgacagaggcagctaatacagcagcaaagagccatgcttatgaggcagcaaagctttgggaacaacctccctccctcatctggactaccagttcaaatggggaacccccgtcttcctcagggtgctccacagcaattcccctatccaccaaactatggtacaaatccaggaaccccacctgcttctaccagcccgttttcacaactagcagcaaatcctgaagcatccttggccaaccgcaacagcatggtgagcagaggcatgacaggaaacataggaggacagtttggcactggaatcaatcctcagatgcagcagaatgtcttccagtatccaggagcaggaatggttccccaaggtgaggccaactttgctccatctctaagccctgggagctccatggtgccgatgccaatccctcctcctcagagttctctgctccagcaaactccacctgcctccgggtatcagtcaccagacatgaaggcctggcagcaaggagcgataggaaacaacaatgtgttcagtcaagctgtccagaaccagcccacgcctgcacagccaggagtatacaacaacatgagcatcaccgtttccatggcaggtggaaatacgaatgttcagaacatgaacccaatgatggcccagatgcagatgagctctttgcagatgccaggaatgaacactgtgtgccctgagcagcaggtgcaacaggttcaggtgtttgctgacgtccagtgtacagtgaatctggtaggcggggacccttacctgaaccagcctggtccactgggaactcaaaagcccacgtcaggaccacagaccccccaggcccagcagaagagcctccttcagcagctactgactgaataaccacttttaaaggaatgtgaaatttaaataatagacatacagagatatacaaatatattatatatttttctgagatttttgatatctcaatctgcagccattcttcaggtcgtagcatttggagcaaaaaaaaaaaaaaaaaaaaaaaaaaaggagtttgcttttgtcgggagattgaaagatgtttttgtttctttctttgtaaaggccttggatattgaaaaaataccaaggcagaacagttggacaatctatttcttgagccaaatttaattattcttatttttgtaatcagtcattggcttcttatctggatgaaggcttttggaggagaaccaaaacgacaagttccaagaagaagatgaagctccgcctccgccgcttagtcccaaccctgcccaggaagaagggcccgtggggctttgcctgtgcccgtccaccaaaggctgtcatgtgtctcgaaatcagcagccctccccatcccaatcccaggcagcttgtgtgtacaatcagcttctctagcaactctgtatctgttggcttcaagagaatattttgcctccacatatgtaccccttctcctttttttaaagatggatttaaaccaagatgcctccaggaaagaggacgaaatgagtatattcacagaggaatccaaaaaatacagtttgggggaaaatgcaataatttttgatgagatgggtgaaggacaagaagtgagttgtgtcaattattgtagatacaattttctgattaaatctggaaaaataaaaggcagcctgttttttctgcttttattgtattaacagctgaggtagctaaagttatttaaaataaaattaaatttatgatccaagtagcttatttttccctttaaatctcattgtaaatatatttgatttcttgtagaaattgatttccttctgtttaattttatgcttttattatactcttgatttttctaaatttgtgtgtgaaatataacattgattgaattgcagttacatttggttagtaatatttcattattttaataactgtgatgtcatgtatggatttactttggggttcaaatcaaaatgtcactgccagaaagagctgttccagctgatctagagcatactgccctagagtgtccctgggatcatctgaacagaagtgcacaggctacttgtacagagaaaaaattaatactcaaaggaaatcttcattttttagattgactttgggaatttgaattttcatcagtgcaaatataaatttctctatcctgctctgaggctaattggtaccatattttccctttgtgtcttgtgactctgccacatcccatctcatcctggcctctgagtcaagaacccagtgaactgactttctagttctagaagttccgctgcaaggccaggaaagcttgagaaaggtattgtggaagaagcaaaggtagacccccatcactcacctttgtctgcatccctgggcctgtgaatgatgacagcacctgacattctgcaccagctacctctgcctccatggcagagaaaaggccataagaacagtggaagaggagcatggactcagacttcaaggaagaagccatttccccaggtccttccttctgcatctcaccacccctagttacaaataactccattgaacagcatctattcagaaactatgccgaataaaaagattggtggaagggctcatgtggttagcaactatgaaacagaaataggacactcagttacaaacattatctcctttagtttttcagaaaatgcatccctgatttcattcatttccagcttgaaagccagccatattactctagtccctaccaaactgctctagaaggtcatttccattttgtttgtgatatttagacgcgcagacttcaggaagttcacctttaacttcagcattccagatgaagtttcctgactcagtgcttttgcataaggaactagaaaaaaaaagtaaggaaaattggagatgctaacatcctcccccatcccaactgcaccttaaaatatgcatgtcaccttcaaggttttataattgcactgtttgttttatgtatgtacagattaaaattattgctacatttgaggaaaataaaattgcttgcttctatgtaattcctgtcattccacaggaaattcacttttccagctactgaatagaatttgtttaacaacctcatgggttgcctcttcatttacagggaagaaatgaaatgtacatctgcagaaattgccaaagcccaaattaacgagtattataaaaggataataaagcatccctgaagcca

SEQ ID NO: 356156 - DNA, 3893 bp, Homo sapiens
aacatggcggccgcggagagcggctgaaatgcctgttcttcaggccgggcgagcgggagtctgacgcgatttgctgagctctgtcgggggtggattagatgtattatcagagagatttccaccacaacaagcaacgccacctttgatcatggaagaaagacccaacctttattcccagccttactcttctccttctcctactgccaatctccctagccctttccaaggcatggtcaggcaaaaaccttcactggggacgatgcctgttcaagtaacacctccccgaggtgctttttcacctggcatgggcatgcagcccaggcaaactctaaacagacctccggctgcacctaaccagcttcgacttcaactacagcagcgattacagggacaacagcagttgatacaccaaaatcggcaagctatcttaaaccagtttgcagcaactgctcctgttggcatcaatatgagatcaggcatgcaacagcaaattacacctcagccacccctgaatgctcaaatgttggcacaacgtcagcgggaactgtacagtcaacagcaccgacagaggcagctaatacagcagcaaagagccatgcttatgaggcagcaaagctttgggaacaacctccctccctcatctggactaccagttcaaatggggaacccccgtcttcctcagggtgctccacagcaattcccctatccaccaaactatggtacaaatccaggaaccccacctgcttctaccagcccgttttcacaactagcagcaaatcctgaagcatccttggccaaccgcaacagcatggtgagcagaggcatgacaggaaacataggaggacagtttggcactggaatcaatcctcagatgcagcagaatgtcttccagtatccaggagcaggaatggttccccaaggtgaggccaactttgctccatctctaagccctgggagctccatggtgccgatgccaatccctcctcctcagagttctctgctccagcaaactccacctgcctccgggtatcagtcaccagacatgaaggcctggcagcaaggagcgataggaaacaacaatgtgttcagtcaagctgtccagaaccagcccacgcctgcacagccaggagtatacaacaacatgagcatcaccgtttccatggcaggtggaaatacgaatgttcagaacatgaacccaatgatggcccagatgcagatgagctctttgcagatgccaggaatgaacactgtgtgccctgagcagataaatgatcccgcactgagacacacaggcctctactgcaaccagctctcatccactgaccttctcaaaacagaagcagatggaacccaggacaagaagacagaagagttcttctctgtggtgactacagactagaggaatgctctacaggtgcaacaggttcaggtgtttgctgacgtccagtgtacagtgaatctggtaggcggggacccttacctgaaccagcctggtccactgggaactcaaaagcccacgtcaggaccacagaccccccaggcccagcagaagagcctccttcagcagctactgactgaataaccacttttaaaggaatgtgaaatttaaataatagacatacagagatatacaaatatattatatatttttctgagatttttgatatctcaatctgcagccattcttcaggtcgtagcatttggagcaaaaaaaaaaaaaaaaaaaaaaaaaaaggagtttgcttttgtcgggagattgaaagatgtttttgtttctttctttgtaaaggccttggatattgaaaaaataccaaggcagaacagttggacaatctatttcttgagccaaatttaattattcttatttttgtaatcagtcattggcttcttatctggatgaaggcttttggaggagaaccaaaacgacaagttccaagaagaagatgaagctccgcctccgccgcttagtcccaaccctgcccaggaagaagggcccgtggggctttgcctgtgcccgtccaccaaaggctgtcatgtgtctcgaaatcagcagccctccccatcccaatcccaggcagcttgtgtgtacaatcagcttctctagcaactctgtatctgttggcttcaagagaatattttgcctccacatatgtaccccttctcctttttttaaagatggatttaaaccaagatgcctccaggaaagaggacgaaatgagtatattcacagaggaatccaaaaaatacagtttgggggaaaatgcaataatttttgatgagatgggtgaaggacaagaagtgagttgtgtcaattattgtagatacaattttctgattaaatctggaaaaataaaaggcagcctgttttttctgcttttattgtattaacagctgaggtagctaaagttatttaaaataaaattaaatttatgatccaagtagcttatttttccctttaaatctcattgtaaatatatttgatttcttgtagaaattgatttccttctgtttaattttatgcttttattatactcttgatttttctaaatttgtgtgtgaaatataacattgattgaattgcagttacatttggttagtaatatttcattattttaataactgtgatgtcatgtatggatttactttggggttcaaatcaaaatgtcactgccagaaagagctgttccagctgatctagagcatactgccctagagtgtccctgggatcatctgaacagaagtgcacaggctacttgtacagagaaaaaattaatactcaaaggaaatcttcattttttagattgactttgggaatttgaattttcatcagtgcaaatataaatttctctatcctgctctgaggctaattggtaccatattttccctttgtgtcttgtgactctgccacatcccatctcatcctggcctctgagtcaagaacccagtgaactgactttctagttctagaagttccgctgcaaggccaggaaagcttgagaaaggtattgtggaagaagcaaaggtagacccccatcactcacctttgtctgcatccctgggcctgtgaatgatgacagcacctgacattctgcaccagctacctctgcctccatggcagagaaaaggccataagaacagtggaagaggagcatggactcagacttcaaggaagaagccatttccccaggtccttccttctgcatctcaccacccctagttacaaataactccattgaacagcatctattcagaaactatgccgaataaaaagattggtggaagggctcatgtggttagcaactatgaaacagaaataggacactcagttacaaacattatctcctttagtttttcagaaaatgcatccctgatttcattcatttccagcttgaaagccagccatattactctagtccctaccaaactgctctagaaggtcatttccattttgtttgtgatatttagacgcgcagacttcaggaagttcacctttaacttcagcattccagatgaagtttcctgactcagtgcttttgcataaggaactagaaaaaaaaagtaaggaaaattggagatgctaacatcctcccccatcccaactgcaccttaaaatatgcatgtcaccttcaaggttttataattgcactgtttgttttatgtatgtacagattaaaattattgctacatttgaggaaaataaaattgcttgcttctatgtaattcctgtcattccacaggaaattcacttttccagctactgaatagaatttgtttaacaacctcatgggttgcctcttcatttacagggaagaaatgaaatgtacatctgcagaaattgccaaagcccaaattaacgagtattataaaaggataataaagcatccctgaagcca

SEQ ID NO: 356157 - DNA, 2847 bp, Homo sapiens
ctaatactggttgaaagccctttaatttttcagtgacatcataaagattttttatcctactgaaatcatccatagaatggttttaaaccagttttctaaatatcatgtattttttaaaacctaccactggatacccagactctgaaactgggcttctcccaatcttggcaacattagcaatgatactcactttcagtattgatggcaaccctataggaggcgtgaccattccaattttgattttatttttaaagtgtgaactttccagaaccctgagcaaaatgagtgcagcgattttctttttgtaggacaagaagacagaagagttcttctctgtggtgactacagactagaggaatgctctacaggtgcaacaggttcaggtgtttgctgacgtccagtgtacagtgaatctggtaggcggggacccttacctgaaccagcctggtccactgggaactcaaaagcccacgtcaggaccacagaccccccaggcccagcagaagagcctccttcagcagctactgactgaataaccacttttaaaggaatgtgaaatttaaataatagacatacagagatatacaaatatattatatatttttctgagatttttgatatctcaatctgcagccattcttcaggtcgtagcatttggagcaaaaaaaaaaaaaaaaaaaaaaaaaaaggagtttgcttttgtcgggagattgaaagatgtttttgtttctttctttgtaaaggccttggatattgaaaaaataccaaggcagaacagttggacaatctatttcttgagccaaatttaattattcttatttttgtaatcagtcattggcttcttatctggatgaaggcttttggaggagaaccaaaacgacaagttccaagaagaagatgaagctccgcctccgccgcttagtcccaaccctgcccaggaagaagggcccgtggggctttgcctgtgcccgtccaccaaaggctgtcatgtgtctcgaaatcagcagccctccccatcccaatcccaggcagcttgtgtgtacaatcagcttctctagcaactctgtatctgttggcttcaagagaatattttgcctccacatatgtaccccttctcctttttttaaagatggatttaaaccaagatgcctccaggaaagaggacgaaatgagtatattcacagaggaatccaaaaaatacagtttgggggaaaatgcaataatttttgatgagatgggtgaaggacaagaagtgagttgtgtcaattattgtagatacaattttctgattaaatctggaaaaataaaaggcagcctgttttttctgcttttattgtattaacagctgaggtagctaaagttatttaaaataaaattaaatttatgatccaagtagcttatttttccctttaaatctcattgtaaatatatttgatttcttgtagaaattgatttccttctgtttaattttatgcttttattatactcttgatttttctaaatttgtgtgtgaaatataacattgattgaattgcagttacatttggttagtaatatttcattattttaataactgtgatgtcatgtatggatttactttggggttcaaatcaaaatgtcactgccagaaagagctgttccagctgatctagagcatactgccctagagtgtccctgggatcatctgaacagaagtgcacaggctacttgtacagagaaaaaattaatactcaaaggaaatcttcattttttagattgactttgggaatttgaattttcatcagtgcaaatataaatttctctatcctgctctgaggctaattggtaccatattttccctttgtgtcttgtgactctgccacatcccatctcatcctggcctctgagtcaagaacccagtgaactgactttctagttctagaagttccgctgcaaggccaggaaagcttgagaaaggtattgtggaagaagcaaaggtagacccccatcactcacctttgtctgcatccctgggcctgtgaatgatgacagcacctgacattctgcaccagctacctctgcctccatggcagagaaaaggccataagaacagtggaagaggagcatggactcagacttcaaggaagaagccatttccccaggtccttccttctgcatctcaccacccctagttacaaataactccattgaacagcatctattcagaaactatgccgaataaaaagattggtggaagggctcatgtggttagcaactatgaaacagaaataggacactcagttacaaacattatctcctttagtttttcagaaaatgcatccctgatttcattcatttccagcttgaaagccagccatattactctagtccctaccaaactgctctagaaggtcatttccattttgtttgtgatatttagacgcgcagacttcaggaagttcacctttaacttcagcattccagatgaagtttcctgactcagtgcttttgcataaggaactagaaaaaaaaagtaaggaaaattggagatgctaacatcctcccccatcccaactgcaccttaaaatatgcatgtcaccttcaaggttttataattgcactgtttgttttatgtatgtacagattaaaattattgctacatttgaggaaaataaaattgcttgcttctatgtaattcctgtcattccacaggaaattcacttttccagctactgaatagaatttgtttaacaacctcatgggttgcctcttcatttacagggaagaaatgaaatgtacatctgcagaaattgccaaagcccaaattaacgagtattataaaaggataataaagcatccctgaagcca

SEQ ID NO: 356158 - DNA, 2932 bp, Homo sapiens
ctaatactggttgaaagccctttaatttttcagtgacatcataaagattttttatcctactgaaatcatccatagaatggttttaaaccagttttctaaatatcatgtattttttaaaacctaccactggatacccagactctgaaactgggcttctcccaatcttggcaacattagcaatgatactcactttcagtattgatggcaaccctataggaggcgtgaccattccaattttgattttatttttaaagtgtgaactttccagaaccctgagcaaaatgagtgcagcgattttctttttgtaggacaagaagacagaagagttcttctctgtggtgactacagactagaggaatgctctagtgagtttccacttcaagtagtacccactcataagccgggggggcagacccttctgtctaaacacatcttttatttgtgttccagcaggtgcaacaggttcaggtgtttgctgacgtccagtgtacagtgaatctggtaggcggggacccttacctgaaccagcctggtccactgggaactcaaaagcccacgtcaggaccacagaccccccaggcccagcagaagagcctccttcagcagctactgactgaataaccacttttaaaggaatgtgaaatttaaataatagacatacagagatatacaaatatattatatatttttctgagatttttgatatctcaatctgcagccattcttcaggtcgtagcatttggagcaaaaaaaaaaaaaaaaaaaaaaaaaaaggagtttgcttttgtcgggagattgaaagatgtttttgtttctttctttgtaaaggccttggatattgaaaaaataccaaggcagaacagttggacaatctatttcttgagccaaatttaattattcttatttttgtaatcagtcattggcttcttatctggatgaaggcttttggaggagaaccaaaacgacaagttccaagaagaagatgaagctccgcctccgccgcttagtcccaaccctgcccaggaagaagggcccgtggggctttgcctgtgcccgtccaccaaaggctgtcatgtgtctcgaaatcagcagccctccccatcccaatcccaggcagcttgtgtgtacaatcagcttctctagcaactctgtatctgttggcttcaagagaatattttgcctccacatatgtaccccttctcctttttttaaagatggatttaaaccaagatgcctccaggaaagaggacgaaatgagtatattcacagaggaatccaaaaaatacagtttgggggaaaatgcaataatttttgatgagatgggtgaaggacaagaagtgagttgtgtcaattattgtagatacaattttctgattaaatctggaaaaataaaaggcagcctgttttttctgcttttattgtattaacagctgaggtagctaaagttatttaaaataaaattaaatttatgatccaagtagcttatttttccctttaaatctcattgtaaatatatttgatttcttgtagaaattgatttccttctgtttaattttatgcttttattatactcttgatttttctaaatttgtgtgtgaaatataacattgattgaattgcagttacatttggttagtaatatttcattattttaataactgtgatgtcatgtatggatttactttggggttcaaatcaaaatgtcactgccagaaagagctgttccagctgatctagagcatactgccctagagtgtccctgggatcatctgaacagaagtgcacaggctacttgtacagagaaaaaattaatactcaaaggaaatcttcattttttagattgactttgggaatttgaattttcatcagtgcaaatataaatttctctatcctgctctgaggctaattggtaccatattttccctttgtgtcttgtgactctgccacatcccatctcatcctggcctctgagtcaagaacccagtgaactgactttctagttctagaagttccgctgcaaggccaggaaagcttgagaaaggtattgtggaagaagcaaaggtagacccccatcactcacctttgtctgcatccctgggcctgtgaatgatgacagcacctgacattctgcaccagctacctctgcctccatggcagagaaaaggccataagaacagtggaagaggagcatggactcagacttcaaggaagaagccatttccccaggtccttccttctgcatctcaccacccctagttacaaataactccattgaacagcatctattcagaaactatgccgaataaaaagattggtggaagggctcatgtggttagcaactatgaaacagaaataggacactcagttacaaacattatctcctttagtttttcagaaaatgcatccctgatttcattcatttccagcttgaaagccagccatattactctagtccctaccaaactgctctagaaggtcatttccattttgtttgtgatatttagacgcgcagacttcaggaagttcacctttaacttcagcattccagatgaagtttcctgactcagtgcttttgcataaggaactagaaaaaaaaagtaaggaaaattggagatgctaacatcctcccccatcccaactgcaccttaaaatatgcatgtcaccttcaaggttttataattgcactgtttgttttatgtatgtacagattaaaattattgctacatttgaggaaaataaaattgcttgcttctatgtaattcctgtcattccacaggaaattcacttttccagctactgaatagaatttgtttaacaacctcatgggttgcctcttcatttacagggaagaaatgaaatgtacatctgcagaaattgccaaagcccaaattaacgagtattataaaaggataataaagcatccctgaagcca

SEQ ID NO: 356159 - DNA, 805 bp, Homo sapiens
aacagcatctattcaatggagttatttgtaactaggggtggtgagatgcagaaggaaggacctggggaaatggcttcttccttgaagtctgagtccatgctcctcttccactgttcttatggcccctagttacaaataactccattgaacagcatctattcagaaactatgccgaataaaaagattggtggaagggctcatgtggttagcaactatgaaacagaaataggacactcagttacaaacattatctcctttagtttttcagaaaatgcatccctgatttcattcatttccagcttgaaagccagccatattactctagtccctaccaaactgctctagaaggtcatttccattttgtttgtgatatttagacgcgcagacttcaggaagttcacctttaacttcagcattccagatgaagtttcctgactcagtgcttttgcataaggaactagaaaaaaaaagtaaggaaaattggagatgctaacatcctcccccatcccaactgcaccttaaaatatgcatgtcaccttcaaggttttataattgcactgtttgttttatgtatgtacagattaaaattattgctacatttgaggaaaataaaattgcttgcttctatgtaattcctgtcattccacaggaaattcacttttccagctactgaatagaatttgtttaacaacctcatgggttgcctcttcatttacagggaagaaatgaaatgtacatctgcagaaattgccaaagcccaaattaacgagtattataaaaggataataaagcatccctgaagcca

SEQ ID NO: 356160 - DNA, 505 bp, Homo sapiens
aagttttaatttttaatttttgcctttgattatagtatttgaggggaagatcatacgtattttcttggaaatgttacagttttctaattggtagacatttagatttgctagggagataagtattctattgcctcaggataatgttagatctgaagaggtcagtctgtcttttaatctgagtatctaattaagcagatggcttaaagtacatcttttgtatcttcagagtttgtgctttttcaccatattcgcaagcacataatcaatttttcttcctcagtaaatggagttccttggcctcaagaggcaacacgacgaaatagccatacctttaactgcaggatgctaattcaccctccagatgagccagggaccgagaaccaagaagcttgccagcgttatgaagtaatgcagtgtttcactgtgtcacagccaaaatcaattcaagaggatggagaaggtaaagccaaacggtctttttaaagtgtttatttcttctgtgact

SEQ ID NO: 356161 - DNA, 7290 bp, Homo sapiens
gcggccgcctgcccggcgtggggagcgggcgccccgggccgccgccgagagggggagccggaagtcggcgcgggcgcccctcggccccgacgacgccgtgaccttggccggcccgctcacctctcggaatctcgcctgccgggaccgcgaaatgggggcgaccgcggcgtccctctccgtcggcgcagccctcgacggcgcttgggtttgaccccggcgcgcttgctcgccccttctcccgagaaggggtttcggagatctatccatactaatggaaatgtaactggaactgactctgatgataaaatcaaggaccatcaagcaagatcatgcagtaggcaactttgcttccaaaagaagttaccaacatttagaatttctacttattctgaggttccagttacagctatatcagagaatgagttaatctcctcagaaatcactaaatactactctgaggggcttagaaattaacaggttgtttatataattggccttaaatgaggtgagagtgaagagactagagccatctctggaaaacatcattatcccattccccgggaagctaccctctggaactcaagatttgaccatatctgttttgaggattcattatgaacaaagaagtctccccaggtgtgaagtttttcaacatgagtggcctcggggacagttcatccgaccctgctaacccagactcacataagaggaaaggatcgccatgtgacacactggcatcaagcacggaaaagaggcgcagggagcaagaaaataaatatttagaagaactagctgagttactgtctgccaacattagtgacattgacagcttgagtgtaaaaccagacaaatgcaagattttgaagaaaacagtcgatcagatacagctaatgaagagaatggaacaagagaaatcaacaactgatgacgatgtacagaaatcagacatctcatcaagtagtcaaggagtgatagaaaaggaatccttgggacctcttcttttggaggctttggatggatttttctttgttgtgaactgtgaagggagaattgtatttgtgtcagagaatgtaaccagctacttaggttacaatcaggaggaattaatgaataccagcgtctacagcatactgcacgtgggggatcatgcagaatttgtgaagaatctgctaccaaaatcactagtaaatggagttccttggcctcaagaggcaacacgacgaaatagccatacctttaactgcaggatgctaattcaccctccagatgagccagggaccgagaaccaagaagcttgccagcgttatgaagtaatgcagtgtttcactgtgtcacagccaaaatcaattcaagaggatggagaagatttccagtcatgtctgatttgtattgcacggcgattacctcggcctccagctattacgggtgtagaatcctttatgaccaagcaagatactacaggtaaaatcatctctattgatactagttccctgagagctgctggcagaactggttgggaagatttagtgaggaagtgcatttatgcttttttccaacctcagggcagagaaccatcttatgccagacagctgttccaagaagtgatgactcgtggcactgcctccagcccctcctatagattcatattgaatgatgggacaatgcttagcgcccacaccaagtgtaaactttgctaccctcaaagtccagacatgcaacctttcatcatgggaattcatatcatcgacagggagcacagtgggctttctcctcaagatgacactaattctggaatgtcaattccccgagtaaatccctcggtcaatcctagtatctctccagctcatggtgtggctcgttcatccacattgccaccatccaacagcaacatggtatccaccagaataaaccgccagcagagctcagaccttcatagcagcagtcatagtaattctagcaacagccaaggaagtttcggatgctcacccggaagtcagattgtagccaatgttgccttaaaccaaggacaggccagttcacagagcagtaatccctctttaaacctcaataattctcctatggaaggtacaggaatatccctagcacagttcatgtctccaaggagacaggttacttctggattggcaacaaggcccaggatgccaaacaattcctttcctcctaatatttcgacattaagctctcccgttggcatgacaagtagtgcctgtaataataataaccgatcttattcaaacatcccagtaacatctttacagggtatgaatgaaggacccaataactccgttggcttctctgccagttctccagtcctcaggcagatgagctcacagaattcacctagcagattaaatatacaaccagcaaaagctgagtccaaagataacaaagagattgcctcaattttaaatgaaatgattcaatctgacaacagctctagtgatggcaaacctctggattcagggcttctgcataacaatgacagactttcagatggagacagtaaatactctcaaaccagtcacaaactagtgcagcttttgacaacaactgccgaacagcagttacggcatgctgatatagacacaagctgcaaagatgtcctgtcttgcacaggcacttccaactctgcctctgctaactcttcaggaggttcttgtccctcttctcatagctcattgacagaacggcataaaattctacaccggctcttacaggagggtagcccctcagatatcaccactttgtctgtcgagcctgataaaaaggacagtgcatctacttctgtgtcagtgactggacaggtacaaggaaactccagtataaaactagaactggatgcttcaaagaaaaaagaatcaaaagaccatcagctcctacgctatcttttagataaagatgagaaagatttaagatcaactccaaacctgagcctggatgatgtaaaggtgaaagtggaaaagaaagaacagatggatccatgtaatacaaacccaaccccaatgaccaaacccactcctgaggaaataaaactggaggcccagagccagtttacagctgaccttgaccagtttgatcagttactgcccacgctggagaaggcagcacagttgccaggcttatgtgagacagacaggatggatggtgcggtcaccagtgtaaccatcaaatcggagatcctgccagcttcacttcagtccgccactgccagacccacttccaggctaaatagattacctgagctggaattggaagcaattgataaccaatttggacaaccaggaacaggcgatcagattccatggacaaataatacagtgacagctataaatcagagtaaatcagaagaccagtgtattagctcacaattagatgagcttctctgtccacccacaacagtagaagggagaaatgatgagaaggctcttcttgaacagctggtatccttccttagtggcaaagatgaaactgagctagctgaactagacagagctctgggaattgacaaacttgttcaggggggtggattagatgtattatcagagagatttccaccacaacaagcaacgccacctttgatcatggaagaaagacccaacctttattcccagccttactcttctccttctcctactgccaatctccctagccctttccaaggcatggtcaggcaaaaaccttcactggggacgatgcctgttcaagtaacacctccccgaggtgctttttcacctggcatgggcatgcagcccaggcaaactctaaacagacctccggctgcacctaaccagcttcgacttcaactacagcagcgattacagggacaacagcagttgatacaccaaaatcggcaagctatcttaaaccagtttgcagcaactgctcctgttggcatcaatatgagatcaggcatgcaacagcaaattacacctcagccacccctgaatgctcaaatgttggcacaacgtcagcgggaactgtacagtcaacagcaccgacagaggcagctaatacagcagcaaagagccatgcttatgaggcagcaaagctttgggaacaacctccctccctcatctggactaccagttcaaatggggaacccccgtcttcctcagggtgctccacagcaattcccctatccaccaaactatggtacaaatccaggaaccccacctgcttctaccagcccgttttcacaactagcagcaaatcctgaagcatccttggccaaccgcaacagcatggtgagcagaggcatgacaggaaacataggaggacagtttggcactggaatcaatcctcagatgcagcagaatgtcttccagtatccaggagcaggaatggttccccaaggtgaggccaactttgctccatctctaagccctgggagctccatggtgccgatgccaatccctcctcctcagagttctctgctccagcaaactccacctgcctccgggtatcagtcaccagacatgaaggcctggcagcaaggagcgataggaaacaacaatgtgttcagtcaagctgtccagaaccagcccacgcctgcacagccaggagtatacaacaacatgagcatcaccgtttccatggcaggtggaaatacgaatgttcagaacatgaacccaatgatggcccagatgcagatgagctctttgcagatgccaggaatgaacactgtgtgccctgagcagataaatgatcccgcactgagacacacaggcctctactgcaaccagctctcatccactgaccttctcaaaacagaagcagatggaacccagcaggtgcaacaggttcaggtgtttgctgacgtccagtgtacagtgaatctggtaggcggggacccttacctgaaccagcctggtccactgggaactcaaaagcccacgtcaggaccacagaccccccaggcccagcagaagagcctccttcagcagctactgactgaataaccacttttaaaggaatgtgaaatttaaataatagacatacagagatatacaaatatattatatatttttctgagatttttgatatctcaatctgcagccattcttcaggtcgtagcatttggagcaaaaaaaaaaaaaaaaaaaaaaaaaaaggagtttgcttttgtcgggagattgaaagatgtttttgtttctttctttgtaaaggccttggatattgaaaaaataccaaggcagaacagttggacaatctatttcttgagccaaatttaattattcttatttttgtaatcagtcattggcttcttatctggatgaaggcttttggaggagaaccaaaacgacaagttccaagaagaagatgaagctccgcctccgccgcttagtcccaaccctgcccaggaagaagggcccgtggggctttgcctgtgcccgtccaccaaaggctgtcatgtgtctcgaaatcagcagccctccccatcccaatcccaggcagcttgtgtgtacaatcagcttctctagcaactctgtatctgttggcttcaagagaatattttgcctccacatatgtaccccttctcctttttttaaagatggatttaaaccaagatgcctccaggaaagaggacgaaatgagtatattcacagaggaatccaaaaaatacagtttgggggaaaatgcaataatttttgatgagatgggtgaaggacaagaagtgagttgtgtcaattattgtagatacaattttctgattaaatctggaaaaataaaaggcagcctgttttttctgcttttattgtattaacagctgaggtagctaaagttatttaaaataaaattaaatttatgatccaagtagcttatttttccctttaaatctcattgtaaatatatttgatttcttgtagaaattgatttccttctgtttaattttatgcttttattatactcttgatttttctaaatttgtgtgtgaaatataacattgattgaattgcagttacatttggttagtaatatttcattattttaataactgtgatgtcatgtatggatttactttggggttcaaatcaaaatgtcactgccagaaagagctgttccagctgatctagagcatactgccctagagtgtccctgggatcatctgaacagaagtgcacaggctacttgtacagagaaaaaattaatactcaaaggaaatcttcattttttagattgactttgggaatttgaattttcatcagtgcaaatataaatttctctatcctgctctgaggctaattggtaccatattttccctttgtgtcttgtgactctgccacatcccatctcatcctggcctctgagtcaagaacccagtgaactgactttctagttctagaagttccgctgcaaggccaggaaagcttgagaaaggtattgtggaagaagcaaaggtagacccccatcactcacctttgtctgcatccctgggcctgtgaatgatgacagcacctgacattctgcaccagctacctctgcctccatggcagagaaaaggccataagaacagtggaagaggagcatggactcagacttcaaggaagaagccatttccccaggtccttccttctgcatctcaccacccctagttacaaataactccattgaacagcatctattcagaaactatgccgaataaaaagattggtggaagggctcatgtggttagcaactatgaaacagaaataggacactcagttacaaacattatctcctttagtttttcagaaaatgcatccctgatttcattcatttccagcttgaaagccagccatattactctagtccctaccaaactgctctagaaggtcatttccattttgtttgtgatatttagacgcgcagacttcaggaagttcacctttaacttcagcattccagatgaagtttcctgactcagtgcttttgcataaggaactagaaaaaaaaagtaaggaaaattggagatgctaacatcctcccccatcccaactgcaccttaaaatatgcatgtcaccttcaaggttttataattgcactgtttgttttatgtatgtacagattaaaattattgctacatttgaggaaaataaaattgcttgcttctatgtaattcctgtcattccacaggaaattcacttttccagctactgaatagaatttgtttaacaacctcatgggttgcctcttcatttacagggaagaaatgaaatgtacatctgcagaaattgccaaagcccaaattaacgagtattataaaaggataataaagcatccctgaagcca

SEQ ID NO: 356162 - DNA, 6958 bp, Homo sapiens
gcggccgcctgcccggcgtggggagcgggcgccccgggccgccgccgagagggggagccggaagtcggcgcgggcgcccctcggccccgacgacgccgtgaccttggccggcccgctcacctctcggaatctcgcctgccgggaccgcgaaatgggggcgaccgcggcgtccctctccgtcggcgcagccctcgacggcgcttgggtttgaccccggcgcgcttgctcgccccttctcccgagaaggggtttcggagatctatccatactaatggaaatgtaactggaactgactctgatgataaaatcaaggaccatcaagcaagatcatgcagtaggcaactttgcttccaaaagaagttaccaacatttagaatttctacttattctgaggttccagttacagctatatcagagaatgagttaatctcctcagaaatcactaaatactactctgaggggcttagaaattaacaggttgtttatataattggccttaaatgaggtgagagtgaagagactagagccatctctggaaaacatcattatcccattccccgggaagctaccctctggaactcaagatttgaccatatctgttttgaggattcattatgaacaaagaagtctccccaggtgtgaagtttttcaacatgagtggcctcggggacagttcatccgaccctgctaacccagactcacataagaggaaaggatcgccatgtgacacactggcatcaagcacggaaaagaggcgcagggagcaagaaaataaatatttagaagaactagctgagttactgtctgccaacattagtgacattgacagcttgagtgtaaaaccagacaaatgcaagattttgaagaaaacagtcgatcagatacagctaatgaagagaatggaacaagagaaatcaacaactgatgacgatgtacagaaatcagacatctcatcaagtagtcaaggagtgatagaaaaggaatccttgggacctcttcttttggaggctttggatggatttttctttgttgtgaactgtgaagggagaattgtatttgtgtcagagaatgtaaccagctacttaggttacaatcaggaggaattaatgaataccagcgtctacagcatactgcacgtgggggatcatgcagaatttgtgaagaatctgctaccaaaatcactagtaaatggagttccttggcctcaagaggcaacacgacgaaatagccatacctttaactgcaggatgctaattcaccctccagatgagccagggaccgagaaccaagaagcttgccagcgttatgaagtaatgcagtgtttcactgtgtcacagccaaaatcaattcaagaggatggagaagatttccagtcatgtctgatttgtattgcacggcgattacctcggcctccagctattacgggtgtagaatcctttatgaccaagcaagatactacaggtaaaatcatctctattgatactagttccctgagagctgctggcagaactggttgggaagatttagtgaggaagtgcatttatgcttttttccaacctcagggcagagaaccatcttatgccagacagctgttccaagaagtgatgactcgtggcactgcctccagcccctcctatagattcatattgaatgatgggacaatgcttagcgcccacaccaagtgtaaactttgctaccctcaaagtccagacatgcaacctttcatcatgggaattcatatcatcgacagggagcacagtgggctttctcctcaagatgacactaattctggaatgtcaattccccgagtaaatccctcggtcaatcctagtatctctccagctcatggtgtggctcgttcatccacattgccaccatccaacagcaacatggtatccaccagaataaaccgccagcagagctcagaccttcatagcagcagtcatagtaattctagcaacagccaaggaagtttcggatgctcacccggaagtcagattgtagccaatgttgccttaaaccaaggacaggccagttcacagagcagtaatccctctttaaacctcaataattctcctatggaaggtacaggaatatccctagcacagttcatgtctccaaggagacaggttacttctggattggcaacaaggcccaggatgccaaacaattcctttcctcctaatatttcgacattaagctctcccgttggcatgacaagtagtgcctgtaataataataaccgatcttattcaaacatcccagtaacatctttacagggtatgaatgaaggacccaataactccgttggcttctctgccagttctccagtcctcaggcagatgagctcacagaattcacctagcagattaaatatacaaccagcaaaagctgagtccaaagataacaaagagattgcctcaattttaaatgaaatgattcaatctgacaacagctctagtgatggcaaacctctggattcagggcttctgcataacaatgacagactttcagatggagacagtaaatactctcaaaccagtcacaaactagtgcagcttttgacaacaactgccgaacagcagttacggcatgctgatatagacacaagctgcaaagatgtcctgtcttgcacaggcacttccaactctgcctctgctaactcttcaggaggttcttgtccctcttctcatagctcattgacagaacggcataaaattctacaccggctcttacaggagggtagcccctcagatatcaccactttgtctgtcgagcctgataaaaaggacagtgcatctacttctgtgtcagtgactggacaggtacaaggaaactccagtataaaactagaactggatgcttcaaagaaaaaagaatcaaaagaccatcagctcctacgctatcttttagataaagatgagaaagatttaagatcaactccaaacctgagcctggatgatgtaaaggtgaaagtggaaaagaaagaacagatggatccatgtaatacaaacccaaccccaatgaccaaacccactcctgaggaaataaaactggaggcccagagccagtttacagctgaccttgaccagtttgatcagttactgcccacgctggagaaggcagcacagttgccaggcttatgtgagacagacaggatggatggtgcggtcaccagtgtaaccatcaaatcggagatcctgccagcttcacttcagtccgccactgccagacccacttccaggctaaatagattacctgagctggaattggaagcaattgataaccaatttggacaaccaggaacaggcgatcagattccatggacaaataatacagtgacagctataaatcagagtaaatcagaagaccagtgtattagctcacaattagatgagcttctctgtccacccacaacagtagaagggagaaatgatgagaaggctcttcttgaacagctggtatccttccttagtggcaaagatgaaactgagctagctgaactagacagagctctgggaattgacaaacttgttcaggggggtggattagatgtattatcagagagatttccaccacaacaagcaacgccacctttgatcatggaagaaagacccaacctttattcccagccttactcttctccttctcctactgccaatctccctagccctttccaaggcatggtcaggcaaaaaccttcactggggacgatgcctgttcaagtaacacctccccgaggtgctttttcacctggcatgggcatgcagcccaggcaaactctaaacagacctccggctgcacctaaccagcttcgacttcaactacagcagcgattacagggacaacagcagttgatacaccaaaatcggcaagctatcttaaaccagtttgcagcaactgctcctgttggcatcaatatgagatcaggcatgcaacagcaaattacacctcagccacccctgaatgctcaaatgttggcacaacgtcagcgggaactgtacagtcaacagcaccgacagaggcagctaatacagcagcaaagagccatgcttatgaggcagcaaagctttgggaacaacctccctccctcatctggactaccagttcaaatggggaacccccgtcttcctcagggtgctccacagcaattcccctatccaccaaactatggtacaaatccaggaaccccacctgcttctaccagcccgttttcacaactagcagcaaatcctgaagcatccttggccaaccgcaacagcatggtgagcagaggcatgacaggaaacataggaggacagtttggcactggaatcaatcctcagatgcagcagaatgtcttccagtatccaggagcaggaatggttccccaaggtgaggccaactttgctccatctctaagccctgggagctccatggtgccgatgccaatccctcctcctcagagttctctgctccagcaaactccacctgcctccgggtatcagtcaccagacatgaaggcctggcagcaaggagcgataggaaacaacaatgtgttcagtcaagctgtccagaaccagcccacgcctgcacagccaggagtatacaacaacatgagcatcaccgtttccatggcaggtggaaatacgaatgttcagaacatgaacccaatgatggcccagatgcagatgagctctttgcagatgccaggaatgaacactgtgtgccctgagcagataaatgatcccgcactgagacacacaggcctctactgcaaccagctctcatccactgaccttctcaaaacagaagcagatggaacccagcaggtgcaacaggttcaggtgtttgctgacgtccagtgtacagtgaatctggtaggcggggacccttacctgaaccagcctggtccactgggaactcaaaagcccacgtcaggaccacagaccccccaggcccagcagaagagcctccttcagcagctactgactgaataaccacttttaaaggaatgtgaaatttaaataatagacatacagagatatacaaatatattatatatttttctgagatttttgatatctcaatctgcagccattcttcaggtcgtagcatttggagcaaaaaaaaaaaaaaaaaaaaaaaaaaaggagtttgcttttgtcgggagattgaaagatgtttttgtttctttctttgtaaaggccttggatattgaaaaaataccaaggcagaacagttggacaatctatttcttgagccaaatttaattattcttatttttgtaatcagtcattggcttcttatctggatgaaggcttttggaggagaaccaaaacgacaagttccaagaagaagatgaagctccgcctccgccgcttagtcccaaccctgcccaggaagaagggcccgtggggctttgcctgtgcccgtccaccaaaggctgtcatgtgtctcgaaatcagcagccctccccatcccaatcccaggcagcttgtgtgtacaatcagcttctctagcaactctgtatctgttggcttcaagagaatattttgcctccacatatgtaccccttctcctttttttaaagatggatttaaaccaagatgcctccaggaaagaggacgaaatgagtatattcacagaggaatccaaaaaatacagtttgggggaaaatgcaataatttttgatgagatgggtgaaggacaagaagtgagttgtgtcaattattgtagatacaattttctgattaaatctggaaaaataaaaggcagcctgttttttctgcttttattgtattaacagctgaggtagctaaagttatttaaaataaaattaaatttatgatccaagtagcttatttttccctttaaatctcattgtaaatatatttgatttcttgtagaaattgatttccttctgtttaattttatgcttttattatactcttgatttttctaaatttgtgtgtgaaatataacattgattgaattgcagttacatttggttagtaatatttcattattttaataactgtgatgtcatgtatggatttactttggggttcaaatcaaaatgtcactgccagaaagagctgttccagctgatctagagcatactgccctagagtgtccctgggatcatctgaacagaagtgcacaggctacttgtacagagaaaaaattaatactcaaaggaaatcttcattttttagattgactttgggaatttgaattttcatcagtgcaaatataaatttctctatcctgctctgaggctaattggtaccatattttccctttgtgtcttgtgactctgccacatcccatctcatcctggcctctgagtcaagaacccagtgaactgactttctagttctagaagttccgctgcaaggccaggaaagcttgagaaaggtattgtggaagaagcaaaggtagacccccatcactcacctttgtctgcatccctgggcctgtgaatgatgacagcacctgacattctgcaccagctacctctgcctccatggcagagaaaaggccataagaacagtggaagaggagcatggactcagacttcaaggaagaagccatttccccaggtccttccttctgcatctcaccacccctagttacaaataactccattgaacagcatctattcagaaactatgccgaataaaaagattggtggaagggctcatgtggttagcaactatgaaacagaaataggacactcagttacaaacattatctcctttagtttttcagaaaatgcatccctgatttcattcatttccagcttgaaagccagccatattactctagtccctaccaaactgctctagaaggtcatttccattttgtttgtgatatttagacgcgcagacttcaggaagttcacctttaacttcagcattccagatgaagtttcctgactcaggtggtgtgggggatcgtatagagtagacttgcc

SEQ ID NO: 356163 - DNA, 6915 bp, Homo sapiens
tttttctatttcaagaagttattcataatataaagtagttccaaatgtaactgctgtgtttattacttgtttgcttttactatctagtaattgttatttgaaaatattcaagatgtatatatgattggggaaatacatctgttatagcagtcaatttactttatatattttagccagaattgttttctaaattttggtattttgtaatgtccactttttagatgtgaatttatatcactttctaaatctggttttatattttcgataaaaataaagatctcactaaatgtgtaagcatagatacttgatcagagaaggaaatatggtgatacaaatgtacactaactggattttctttgtgtaacagcacggaaaagaggcgcagggagcaagaaaataaatatttagaagaactagctgagttactgtctgccaacattagtgacattgacagcttgagtgtaaaaccagacaaatgcaagattttgaagaaaacagtcgatcagatacagctaatgaagagaatggaacaagagaaatcaacaactgatgacgatgtacagaaatcagacatctcatcaagtagtcaaggagtgatagaaaaggaatccttgggacctcttcttttggaggctttggatggatttttctttgttgtgaactgtgaagggagaattgtatttgtgtcagagaatgtaaccagctacttaggttacaatcaggaggaattaatgaataccagcgtctacagcatactgcacgtgggggatcatgcagaatttgtgaagaatctgctaccaaaatcactagtaaatggagttccttggcctcaagaggcaacacgacgaaatagccatacctttaactgcaggatgctaattcaccctccagatgagccagggaccgagaaccaagaagcttgccagcgttatgaagtaatgcagtgtttcactgtgtcacagccaaaatcaattcaagaggatggagaagatttccagtcatgtctgatttgtattgcacggcgattacctcggcctccagctattacgggtgtagaatcctttatgaccaagcaagatactacaggtaaaatcatctctattgatactagttccctgagagctgctggcagaactggttgggaagatttagtgaggaagtgcatttatgcttttttccaacctcagggcagagaaccatcttatgccagacagctgttccaagaagtgatgactcgtggcactgcctccagcccctcctatagattcatattgaatgatgggacaatgcttagcgcccacaccaagtgtaaactttgctaccctcaaagtccagacatgcaacctttcatcatgggaattcatatcatcgacagggagcacagtgggctttctcctcaagatgacactaattctggaatgtcaattccccgagtaaatccctcggtcaatcctagtatctctccagctcatggtgtggctcgttcatccacattgccaccatccaacagcaacatggtatccaccagaataaaccgccagcagagctcagaccttcatagcagcagtcatagtaattctagcaacagccaaggaagtttcggatgctcacccggaagtcagattgtagccaatgttgccttaaaccaaggacaggccagttcacagagcagtaatccctctttaaacctcaataattctcctatggaaggtacaggaatatccctagcacagttcatgtctccaaggagacaggttacttctggattggcaacaaggcccaggatgccaaacaattcctttcctcctaatatttcgacattaagctctcccgttggcatgacaagtagtgcctgtaataataataaccgatcttattcaaacatcccagtaacatctttacagggtatgaatgaaggacccaataactccgttggcttctctgccagttctccagtcctcaggcagatgagctcacagaattcacctagcagattaaatatacaaccagcaaaagctgagtccaaagataacaaagagattgcctcaattttaaatgaaatgattcaatctgacaacagctctagtgatggcaaacctctggattcagggcttctgcataacaatgacagactttcagatggagacagtaaatactctcaaaccagtcacaaactagtgcagcttttgacaacaactgccgaacagcagttacggcatgctgatatagacacaagctgcaaagatgtcctgtcttgcacaggcacttccaactctgcctctgctaactcttcaggaggttcttgtccctcttctcatagctcattgacagaacggcataaaattctacaccggctcttacaggagggtagcccctcagatatcaccactttgtctgtcgagcctgataaaaaggacagtgcatctacttctgtgtcagtgactggacaggtacaaggaaactccagtataaaactagaactggatgcttcaaagaaaaaagaatcaaaagaccatcagctcctacgctatcttttagataaagatgagaaagatttaagatcaactccaaacctgagcctggatgatgtaaaggtgaaagtggaaaagaaagaacagatggatccatgtaatacaaacccaaccccaatgaccaaacccactcctgaggaaataaaactggaggcccagagccagtttacagctgaccttgaccagtttgatcagttactgcccacgctggagaaggcagcacagttgccaggcttatgtgagacagacaggatggatggtgcggtcaccagtgtaaccatcaaatcggagatcctgccagcttcacttcagtccgccactgccagacccacttccaggctaaatagattacctgagctggaattggaagcaattgataaccaatttggacaaccaggaacaggcgatcagattccatggacaaataatacagtgacagctataaatcagagtaaatcagaagaccagtgtattagctcacaattagatgagcttctctgtccacccacaacagtagaagggagaaatgatgagaaggctcttcttgaacagctggtatccttccttagtggcaaagatgaaactgagctagctgaactagacagagctctgggaattgacaaacttgttcaggggggtggattagatgtattatcagagagatttccaccacaacaagcaacgccacctttgatcatggaagaaagacccaacctttattcccagccttactcttctccttctcctactgccaatctccctagccctttccaaggcatggtcaggcaaaaaccttcactggggacgatgcctgttcaagtaacacctccccgaggtgctttttcacctggcatgggcatgcagcccaggcaaactctaaacagacctccggctgcacctaaccagcttcgacttcaactacagcagcgattacagggacaacagcagttgatacaccaaaatcggcaagctatcttaaaccagtttgcagcaactgctcctgttggcatcaatatgagatcaggcatgcaacagcaaattacacctcagccacccctgaatgctcaaatgttggcacaacgtcagcgggaactgtacagtcaacagcaccgacagaggcagctaatacagcagcaaagagccatgcttatgaggcagcaaagctttgggaacaacctccctccctcatctggactaccagttcaaatggggaacccccgtcttcctcagggtgctccacagcaattcccctatccaccaaactatggtacaaatccaggaaccccacctgcttctaccagcccgttttcacaactagcagcaaatcctgaagcatccttggccaaccgcaacagcatggtgagcagaggcatgacaggaaacataggaggacagtttggcactggaatcaatcctcagatgcagcagaatgtcttccagtatccaggagcaggaatggttccccaaggtgaggccaactttgctccatctctaagccctgggagctccatggtgccgatgccaatccctcctcctcagagttctctgctccagcaaactccacctgcctccgggtatcagtcaccagacatgaaggcctggcagcaaggagcgataggaaacaacaatgtgttcagtcaagctgtccagaaccagcccacgcctgcacagccaggagtatacaacaacatgagcatcaccgtttccatggcaggtggaaatacgaatgttcagaacatgaacccaatgatggcccagatgcagatgagctctttgcagatgccaggaatgaacactgtgtgccctgagcagataaatgatcccgcactgagacacacaggcctctactgcaaccagctctcatccactgaccttctcaaaacagaagcagatggaacccagcaggtgcaacaggttcaggtgtttgctgacgtccagtgtacagtgaatctggtaggcggggacccttacctgaaccagcctggtccactgggaactcaaaagcccacgtcaggaccacagaccccccaggcccagcagaagagcctccttcagcagctactgactgaataaccacttttaaaggaatgtgaaatttaaataatagacatacagagatatacaaatatattatatatttttctgagatttttgatatctcaatctgcagccattcttcaggtcgtagcatttggagcaaaaaaaaaaaaaaaaaaaaaaaaaaaggagtttgcttttgtcgggagattgaaagatgtttttgtttctttctttgtaaaggccttggatattgaaaaaataccaaggcagaacagttggacaatctatttcttgagccaaatttaattattcttatttttgtaatcagtcattggcttcttatctggatgaaggcttttggaggagaaccaaaacgacaagttccaagaagaagatgaagctccgcctccgccgcttagtcccaaccctgcccaggaagaagggcccgtggggctttgcctgtgcccgtccaccaaaggctgtcatgtgtctcgaaatcagcagccctccccatcccaatcccaggcagcttgtgtgtacaatcagcttctctagcaactctgtatctgttggcttcaagagaatattttgcctccacatatgtaccccttctcctttttttaaagatggatttaaaccaagatgcctccaggaaagaggacgaaatgagtatattcacagaggaatccaaaaaatacagtttgggggaaaatgcaataatttttgatgagatgggtgaaggacaagaagtgagttgtgtcaattattgtagatacaattttctgattaaatctggaaaaataaaaggcagcctgttttttctgcttttattgtattaacagctgaggtagctaaagttatttaaaataaaattaaatttatgatccaagtagcttatttttccctttaaatctcattgtaaatatatttgatttcttgtagaaattgatttccttctgtttaattttatgcttttattatactcttgatttttctaaatttgtgtgtgaaatataacattgattgaattgcagttacatttggttagtaatatttcattattttaataactgtgatgtcatgtatggatttactttggggttcaaatcaaaatgtcactgccagaaagagctgttccagctgatctagagcatactgccctagagtgtccctgggatcatctgaacagaagtgcacaggctacttgtacagagaaaaaattaatactcaaaggaaatcttcattttttagattgactttgggaatttgaattttcatcagtgcaaatataaatttctctatcctgctctgaggctaattggtaccatattttccctttgtgtcttgtgactctgccacatcccatctcatcctggcctctgagtcaagaacccagtgaactgactttctagttctagaagttccgctgcaaggccaggaaagcttgagaaaggtattgtggaagaagcaaaggtagacccccatcactcacctttgtctgcatccctgggcctgtgaatgatgacagcacctgacattctgcaccagctacctctgcctccatggcagagaaaaggccataagaacagtggaagaggagcatggactcagacttcaaggaagaagccatttccccaggtccttccttctgcatctcaccacccctagttacaaataactccattgaacagcatctattcagaaactatgccgaataaaaagattggtggaagggctcatgtggttagcaactatgaaacagaaataggacactcagttacaaacattatctcctttagtttttcagaaaatgcatccctgatttcattcatttccagcttgaaagccagccatattactctagtccctaccaaactgctctagaaggtcatttccattttgtttgtgatatttagacgcgcagacttcaggaagttcacctttaacttcagcattccagatgaagtttcctgactcagtgcttttgcataaggaactagaaaaaaaaagtaaggaaaattggagatgctaacatcctcccccatcccaactgcaccttaaaatatgcatgtcaccttcaaggttttataattgcactgtttgttttatgtatgtacagattaaaattattgctacatttgaggaaaataaaattgcttgcttctatgtaattcctgtcattccacaggaaattcacttttccagctactgaatagaatttgtttaacaacctcatgggttgcctcttcatttacagggaagaaatgaaatgtacatctgcagaaattgccaaagcccaaattaacgagtattataaaaggataataaagcatccctgaagcca

SEQ ID NO: 356164 - DNA, 5591 bp, Homo sapiens
gcggccgcctgcccggcgtggggagcgggcgccccgggccgccgccgagagggggagccggaagtcggcgcgggcgcccctcggccccgacgacgccgtgaccttggccggcccgctcacctctcggaatctcgcctgccgggaccgcgaaatgggggcgaccgcggcgtccctctccgtcggcgcagccctcgacggcgcttgggtttgaccccggcgcgcttgctcgccccttctcccgagaaggggtttcggagatctatccatactaatggaaatgtaactggaactgactctgatgataaaatcaaggaccatcaagcaagatcatgcagtaggcaactttgcttccaaaagaagttaccaacatttagaatttctacttattctgaggttccagttacagctatatcagagaatgagttaatctcctcagaaatcactaaatactactctgaggggcttagaaattaacaggttgtttatataattggccttaaatgaggtgagagtgaagagactagagccatctctggaaaacatcattatcccattccccgggaagctaccctctggaactcaagatttgaccatatctgttttgaggattcattatgaacaaagaagtctccccaggtgtgaagtttttcaacatgagtggcctcggggacagttcatccgaccctgctaacccagactcacataagaggaaaggatcgccatgtgacacactggcatcaagcacggaaaagaggcgcagggagcaagaaaataaatatttagaagaactagctgagttactgtctgccaacattagtgacattgacagcttgagtgtaaaaccagacaaatgcaagattttgaagaaaacagtcgatcaggcacttccaactctgcctctgctaactcttcaggaggttcttgtccctcttctcatagctcattgacagaacggcataaaattctacaccggctcttacaggagggtagcccctcagatatcaccactttgtctgtcgagcctgataaaaaggacagtgcatctacttctgtgtcagtgactggacaggtacaaggaaactccagtataaaactagaactggatgcttcaaagaaaaaagaatcaaaagaccatcagctcctacgctatcttttagataaagatgagaaagatttaagatcaactccaaacctgagcctggatgatgtaaaggtgaaagtggaaaagaaagaacagatggatccatgtaatacaaacccaaccccaatgaccaaacccactcctgaggaaataaaactggaggcccagagccagtttacagctgaccttgaccagtttgatcagttactgcccacgctggagaaggcagcacagttgccaggcttatgtgagacagacaggatggatggtgcggtcaccagtgtaaccatcaaatcggagatcctgccagcttcacttcagtccgccactgccagacccacttccaggctaaatagattacctgagctggaattggaagcaattgataaccaatttggacaaccaggaacaggcgatcagattccatggacaaataatacagtgacagctataaatcagagtaaatcagaagaccagtgtattagctcacaattagatgagcttctctgtccacccacaacagtagaagggagaaatgatgagaaggctcttcttgaacagctggtatccttccttagtggcaaagatgaaactgagctagctgaactagacagagctctgggaattgacaaacttgttcaggggggtggattagatgtattatcagagagatttccaccacaacaagcaacgccacctttgatcatggaagaaagacccaacctttattcccagccttactcttctccttctcctactgccaatctccctagccctttccaaggcatggtcaggcaaaaaccttcactggggacgatgcctgttcaagtaacacctccccgaggtgctttttcacctggcatgggcatgcagcccaggcaaactctaaacagacctccggctgcacctaaccagcttcgacttcaactacagcagcgattacagggacaacagcagttgatacaccaaaatcggcaagctatcttaaaccagtttgcagcaactgctcctgttggcatcaatatgagatcaggcatgcaacagcaaattacacctcagccacccctgaatgctcaaatgttggcacaacgtcagcgggaactgtacagtcaacagcaccgacagaggcagctaatacagcagcaaagagccatgcttatgaggcagcaaagctttgggaacaacctccctccctcatctggactaccagttcaaatggggaacccccgtcttcctcagggtgctccacagcaattcccctatccaccaaactatggtacaaatccaggaaccccacctgcttctaccagcccgttttcacaactagcagcaaatcctgaagcatccttggccaaccgcaacagcatggtgagcagaggcatgacaggaaacataggaggacagtttggcactggaatcaatcctcagatgcagcagaatgtcttccagtatccaggagcaggaatggttccccaaggtgaggccaactttgctccatctctaagccctgggagctccatggtgccgatgccaatccctcctcctcagagttctctgctccagcaaactccacctgcctccgggtatcagtcaccagacatgaaggcctggcagcaaggagcgataggaaacaacaatgtgttcagtcaagctgtccagaaccagcccacgcctgcacagccaggagtatacaacaacatgagcatcaccgtttccatggcaggtggaaatacgaatgttcagaacatgaacccaatgatggcccagatgcagatgagctctttgcagatgccaggaatgaacactgtgtgccctgagcagataaatgatcccgcactgagacacacaggcctctactgcaaccagctctcatccactgaccttctcaaaacagaagcagatggaacccaggacaagaagacagaagagttcttctctgtggtgactacagactagaggaatgctctacaggtgcaacaggttcaggtgtttgctgacgtccagtgtacagtgaatctggtaggcggggacccttacctgaaccagcctggtccactgggaactcaaaagcccacgtcaggaccacagaccccccaggcccagcagaagagcctccttcagcagctactgactgaataaccacttttaaaggaatgtgaaatttaaataatagacatacagagatatacaaatatattatatatttttctgagatttttgatatctcaatctgcagccattcttcaggtcgtagcatttggagcaaaaaaaaaaaaaaaaaaaaaaaaaaaggagtttgcttttgtcgggagattgaaagatgtttttgtttctttctttgtaaaggccttggatattgaaaaaataccaaggcagaacagttggacaatctatttcttgagccaaatttaattattcttatttttgtaatcagtcattggcttcttatctggatgaaggcttttggaggagaaccaaaacgacaagttccaagaagaagatgaagctccgcctccgccgcttagtcccaaccctgcccaggaagaagggcccgtggggctttgcctgtgcccgtccaccaaaggctgtcatgtgtctcgaaatcagcagccctccccatcccaatcccaggcagcttgtgtgtacaatcagcttctctagcaactctgtatctgttggcttcaagagaatattttgcctccacatatgtaccccttctcctttttttaaagatggatttaaaccaagatgcctccaggaaagaggacgaaatgagtatattcacagaggaatccaaaaaatacagtttgggggaaaatgcaataatttttgatgagatgggtgaaggacaagaagtgagttgtgtcaattattgtagatacaattttctgattaaatctggaaaaataaaaggcagcctgttttttctgcttttattgtattaacagctgaggtagctaaagttatttaaaataaaattaaatttatgatccaagtagcttatttttccctttaaatctcattgtaaatatatttgatttcttgtagaaattgatttccttctgtttaattttatgcttttattatactcttgatttttctaaatttgtgtgtgaaatataacattgattgaattgcagttacatttggttagtaatatttcattattttaataactgtgatgtcatgtatggatttactttggggttcaaatcaaaatgtcactgccagaaagagctgttccagctgatctagagcatactgccctagagtgtccctgggatcatctgaacagaagtgcacaggctacttgtacagagaaaaaattaatactcaaaggaaatcttcattttttagattgactttgggaatttgaattttcatcagtgcaaatataaatttctctatcctgctctgaggctaattggtaccatattttccctttgtgtcttgtgactctgccacatcccatctcatcctggcctctgagtcaagaacccagtgaactgactttctagttctagaagttccgctgcaaggccaggaaagcttgagaaaggtattgtggaagaagcaaaggtagacccccatcactcacctttgtctgcatccctgggcctgtgaatgatgacagcacctgacattctgcaccagctacctctgcctccatggcagagaaaaggccataagaacagtggaagaggagcatggactcagacttcaaggaagaagccatttccccaggtccttccttctgcatctcaccacccctagttacaaataactccattgaacagcatctattcagaaactatgccgaataaaaagattggtggaagggctcatgtggttagcaactatgaaacagaaataggacactcagttacaaacattatctcctttagtttttcagaaaatgcatccctgatttcattcatttccagcttgaaagccagccatattactctagtccctaccaaactgctctagaaggtcatttccattttgtttgtgatatttagacgcgcagacttcaggaagttcacctttaacttcagcattccagatgaagtttcctgactcagtgcttttgcataaggaactagaaaaaaaaagtaaggaaaattggagatgctaacatcctcccccatcccaactgcaccttaaaatatgcatgtcaccttcaaggttttataattgcactgtttgttttatgtatgtacagattaaaattattgctacatttgaggaaaataaaattgcttgcttctatgtaattcctgtcattccacaggaaattcacttttccagctactgaatagaatttgtttaacaacctcatgggttgcctcttcatttacagggaagaaatgaaatgtacatctgcagaaattgccaaagcccaaattaacgagtattataaaaggataataaagcatccctgaagcca

SEQ ID NO: 356165 - DNA, 4300 bp, Homo sapiens
gcgcccgctccaacatcagaatggtaactgtgctgccttctccagcgtgggcagtaactgatcaagctggagaaggcagcacagttgccaggcttatgtgagacagacaggatggatggtgcggtcaccagtgtaaccatcaaatcggagatcctgccagcttcacttcagtccgccactgccagacccacttccaggctaaatagattacctgagctggaattggaagcaattgataaccaatttggacaaccaggaacaggcgatcagattccatggacaaataatacagtgacagctataaatcagagtaaatcagaagaccagtgtattagctcacaattagatgagcttctctgtccacccacaacagtagaagggagaaatgatgagaaggctcttcttgaacagctggtatccttccttagtggcaaagatgaaactgagctagctgaactagacagagctctgggaattgacaaacttgttcaggggggtggattagatgtattatcagagagatttccaccacaacaagcaacgccacctttgatcatggaagaaagacccaacctttattcccagccttactcttctccttctcctactgccaatctccctagccctttccaaggcatggtcaggcaaaaaccttcactggggacgatgcctgttcaagtaacacctccccgaggtgctttttcacctggcatgggcatgcagcccaggcaaactctaaacagacctccggctgcacctaaccagcttcgacttcaactacagcagcgattacagggacaacagcagttgatacaccaaaatcggcaagctatcttaaaccagtttgcagcaactgctcctgttggcatcaatatgagatcaggcatgcaacagcaaattacacctcagccacccctgaatgctcaaatgttggcacaacgtcagcgggaactgtacagtcaacagcaccgacagaggcagctaatacagcagcaaagagccatgcttatgaggcagcaaagctttgggaacaacctccctccctcatctggactaccagttcaaatggggaacccccgtcttcctcagggtgctccacagcaattcccctatccaccaaactatggtacaaatccaggaaccccacctgcttctaccagcccgttttcacaactagcagcaaatcctgaagcatccttggccaaccgcaacagcatggtgagcagaggcatgacaggaaacataggaggacagtttggcactggaatcaatcctcagatgcagcagaatgtcttccagtatccaggagcaggaatggttccccaaggtgaggccaactttgctccatctctaagccctgggagctccatggtgccgatgccaatccctcctcctcagagttctctgctccagcaaactccacctgcctccgggtatcagtcaccagacatgaaggcctggcagcaaggagcgataggaaacaacaatgtgttcagtcaagctgtccagaaccagcccacgcctgcacagccaggagtatacaacaacatgagcatcaccgtttccatggcaggtggaaatacgaatgttcagaacatgaacccaatgatggcccagatgcagatgagctctttgcagatgccaggaatgaacactgtgtgccctgagcagataaatgatcccgcactgagacacacaggcctctactgcaaccagctctcatccactgaccttctcaaaacagaagcagatggaacccaggacaagaagacagaagagttcttctctgtggtgactacagactagaggaatgctctacaggtgcaacaggttcaggtgtttgctgacgtccagtgtacagtgaatctggtaggcggggacccttacctgaaccagcctggtccactgggaactcaaaagcccacgtcaggaccacagaccccccaggcccagcagaagagcctccttcagcagctactgactgaataaccacttttaaaggaatgtgaaatttaaataatagacatacagagatatacaaatatattatatatttttctgagatttttgatatctcaatctgcagccattcttcaggtcgtagcatttggagcaaaaaaaaaaaaaaaaaaaaaaaaaaaggagtttgcttttgtcgggagattgaaagatgtttttgtttctttctttgtaaaggccttggatattgaaaaaataccaaggcagaacagttggacaatctatttcttgagccaaatttaattattcttatttttgtaatcagtcattggcttcttatctggatgaaggcttttggaggagaaccaaaacgacaagttccaagaagaagatgaagctccgcctccgccgcttagtcccaaccctgcccaggaagaagggcccgtggggctttgcctgtgcccgtccaccaaaggctgtcatgtgtctcgaaatcagcagccctccccatcccaatcccaggcagcttgtgtgtacaatcagcttctctagcaactctgtatctgttggcttcaagagaatattttgcctccacatatgtaccccttctcctttttttaaagatggatttaaaccaagatgcctccaggaaagaggacgaaatgagtatattcacagaggaatccaaaaaatacagtttgggggaaaatgcaataatttttgatgagatgggtgaaggacaagaagtgagttgtgtcaattattgtagatacaattttctgattaaatctggaaaaataaaaggcagcctgttttttctgcttttattgtattaacagctgaggtagctaaagttatttaaaataaaattaaatttatgatccaagtagcttatttttccctttaaatctcattgtaaatatatttgatttcttgtagaaattgatttccttctgtttaattttatgcttttattatactcttgatttttctaaatttgtgtgtgaaatataacattgattgaattgcagttacatttggttagtaatatttcattattttaataactgtgatgtcatgtatggatttactttggggttcaaatcaaaatgtcactgccagaaagagctgttccagctgatctagagcatactgccctagagtgtccctgggatcatctgaacagaagtgcacaggctacttgtacagagaaaaaattaatactcaaaggaaatcttcattttttagattgactttgggaatttgaattttcatcagtgcaaatataaatttctctatcctgctctgaggctaattggtaccatattttccctttgtgtcttgtgactctgccacatcccatctcatcctggcctctgagtcaagaacccagtgaactgactttctagttctagaagttccgctgcaaggccaggaaagcttgagaaaggtattgtggaagaagcaaaggtagacccccatcactcacctttgtctgcatccctgggcctgtgaatgatgacagcacctgacattctgcaccagctacctctgcctccatggcagagaaaaggccataagaacagtggaagaggagcatggactcagacttcaaggaagaagccatttccccaggtccttccttctgcatctcaccacccctagttacaaataactccattgaacagcatctattcagaaactatgccgaataaaaagattggtggaagggctcatgtggttagcaactatgaaacagaaataggacactcagttacaaacattatctcctttagtttttcagaaaatgcatccctgatttcattcatttccagcttgaaagccagccatattactctagtccctaccaaactgctctagaaggtcatttccattttgtttgtgatatttagacgcgcagacttcaggaagttcacctttaacttcagcattccagatgaagtttcctgactcagtgcttttgcataaggaactagaaaaaaaaagtaaggaaaattggagatgctaacatcctcccccatcccaactgcaccttaaaatatgcatgtcaccttcaaggttttataattgcactgtttgttttatgtatgtacagattaaaattattgctacatttgaggaaaataaaattgcttgcttctatgtaattcctgtcattccacaggaaattcacttttccagctactgaatagaatttgtttaacaacctcatgggttgcctcttcatttacagggaagaaatgaaatgtacatctgcagaaattgccaaagcccaaattaacgagtattataaaaggataataaagcatccctgaagcca

SEQ ID NO: 356166 - DNA, 6998 bp, Homo sapiens
tttttctatttcaagaagttattcataatataaagtagttccaaatgtaactgctgtgtttattacttgtttgcttttactatctagtaattgttatttgaaaatattcaagatgtatatatgattggggaaatacatctgttatagcagtcaatttactttatatattttagccagaattgttttctaaattttggtattttgtaatgtccactttttagatgtgaatttatatcactttctaaatctggttttatattttcgataaaaataaagatctcactaaatgtgtaagcatagatacttgatcagagaaggaaatatggtgatacaaatgtacactaactggattttctttgtgtaacagcacggaaaagaggcgcagggagcaagaaaataaatatttagaagaactagctgagttactgtctgccaacattagtgacattgacagcttgagtgtaaaaccagacaaatgcaagattttgaagaaaacagtcgatcagatacagctaatgaagagaatggaacaagagaaatcaacaactgatgacgatgtacagaaatcagacatctcatcaagtagtcaaggagtgatagaaaaggaatccttgggacctcttcttttggaggctttggatggatttttctttgttgtgaactgtgaagggagaattgtatttgtgtcagagaatgtaaccagctacttaggttacaatcaggaggaattaatgaataccagcgtctacagcatactgcacgtgggggatcatgcagaatttgtgaagaatctgctaccaaaatcactagtaaatggagttccttggcctcaagaggcaacacgacgaaatagccatacctttaactgcaggatgctaattcaccctccagatgagccagggaccgagaaccaagaagcttgccagcgttatgaagtaatgcagtgtttcactgtgtcacagccaaaatcaattcaagaggatggagaagatttccagtcatgtctgatttgtattgcacggcgattacctcggcctccagctattacgggtgtagaatcctttatgaccaagcaagatactacaggtaaaatcatctctattgatactagttccctgagagctgctggcagaactggttgggaagatttagtgaggaagtgcatttatgcttttttccaacctcagggcagagaaccatcttatgccagacagctgttccaagaagtgatgactcgtggcactgcctccagcccctcctatagattcatattgaatgatgggacaatgcttagcgcccacaccaagtgtaaactttgctaccctcaaagtccagacatgcaacctttcatcatgggaattcatatcatcgacagggagcacagtgggctttctcctcaagatgacactaattctggaatgtcaattccccgagtaaatccctcggtcaatcctagtatctctccagctcatggtgtggctcgttcatccacattgccaccatccaacagcaacatggtatccaccagaataaaccgccagcagagctcagaccttcatagcagcagtcatagtaattctagcaacagccaaggaagtttcggatgctcacccggaagtcagattgtagccaatgttgccttaaaccaaggacaggccagttcacagagcagtaatccctctttaaacctcaataattctcctatggaaggtacaggaatatccctagcacagttcatgtctccaaggagacaggttacttctggattggcaacaaggcccaggatgccaaacaattcctttcctcctaatatttcgacattaagctctcccgttggcatgacaagtagtgcctgtaataataataaccgatcttattcaaacatcccagtaacatctttacagggtatgaatgaaggacccaataactccgttggcttctctgccagttctccagtcctcaggcagatgagctcacagaattcacctagcagattaaatatacaaccagcaaaagctgagtccaaagataacaaagagattgcctcaattttaaatgaaatgattcaatctgacaacagctctagtgatggcaaacctctggattcagggcttctgcataacaatgacagactttcagatggagacagtaaatactctcaaaccagtcacaaactagtgcagcttttgacaacaactgccgaacagcagttacggcatgctgatatagacacaagctgcaaagatgtcctgtcttgcacaggcacttccaactctgcctctgctaactcttcaggaggttcttgtccctcttctcatagctcattgacagaacggcataaaattctacaccggctcttacaggagggtagcccctcagatatcaccactttgtctgtcgagcctgataaaaaggacagtgcatctacttctgtgtcagtgactggacaggtacaaggaaactccagtataaaactagaactggatgcttcaaagaaaaaagaatcaaaagaccatcagctcctacgctatcttttagataaagatgagaaagatttaagatcaactccaaacctgagcctggatgatgtaaaggtgaaagtggaaaagaaagaacagatggatccatgtaatacaaacccaaccccaatgaccaaacccactcctgaggaaataaaactggaggcccagagccagtttacagctgaccttgaccagtttgatcagttactgcccacgctggagaaggcagcacagttgccaggcttatgtgagacagacaggatggatggtgcggtcaccagtgtaaccatcaaatcggagatcctgccagcttcacttcagtccgccactgccagacccacttccaggctaaatagattacctgagctggaattggaagcaattgataaccaatttggacaaccaggaacaggcgatcagattccatggacaaataatacagtgacagctataaatcagagtaaatcagaagaccagtgtattagctcacaattagatgagcttctctgtccacccacaacagtagaagggagaaatgatgagaaggctcttcttgaacagctggtatccttccttagtggcaaagatgaaactgagctagctgaactagacagagctctgggaattgacaaacttgttcaggggggtggattagatgtattatcagagagatttccaccacaacaagcaacgccacctttgatcatggaagaaagacccaacctttattcccagccttactcttctccttctcctactgccaatctccctagccctttccaaggcatggtcaggcaaaaaccttcactggggacgatgcctgttcaagtaacacctccccgaggtgctttttcacctggcatgggcatgcagcccaggcaaactctaaacagacctccggctgcacctaaccagcttcgacttcaactacagcagcgattacagggacaacagcagttgatacaccaaaatcggcaagctatcttaaaccagtttgcagcaactgctcctgttggcatcaatatgagatcaggcatgcaacagcaaattacacctcagccacccctgaatgctcaaatgttggcacaacgtcagcgggaactgtacagtcaacagcaccgacagaggcagctaatacagcagcaaagagccatgcttatgaggcagcaaagctttgggaacaacctccctccctcatctggactaccagttcaaatggggaacccccgtcttcctcagggtgctccacagcaattcccctatccaccaaactatggtacaaatccaggaaccccacctgcttctaccagcccgttttcacaactagcagcaaatcctgaagcatccttggccaaccgcaacagcatggtgagcagaggcatgacaggaaacataggaggacagtttggcactggaatcaatcctcagatgcagcagaatgtcttccagtatccaggagcaggaatggttccccaaggtgaggccaactttgctccatctctaagccctgggagctccatggtgccgatgccaatccctcctcctcagagttctctgctccagcaaactccacctgcctccgggtatcagtcaccagacatgaaggcctggcagcaaggagcgataggaaacaacaatgtgttcagtcaagctgtccagaaccagcccacgcctgcacagccaggagtatacaacaacatgagcatcaccgtttccatggcaggtggaaatacgaatgttcagaacatgaacccaatgatggcccagatgcagatgagctctttgcagatgccaggaatgaacactgtgtgccctgagcagataaatgatcccgcactgagacacacaggcctctactgcaaccagctctcatccactgaccttctcaaaacagaagcagatggaacccaggacaagaagacagaagagttcttctctgtggtgactacagactagaggaatgctctagtgagtttccacttcaagtagtacccactcataagccgggggggcagacccttctgtctaaacacatcttttatttgtgttccagcaggtgcaacaggttcaggtgtttgctgacgtccagtgtacagtgaatctggtaggcggggacccttacctgaaccagcctggtccactgggaactcaaaagcccacgtcaggaccacagaccccccaggcccagcagaagagcctccttcagcagctactgactgaataaccacttttaaaggaatgtgaaatttaaataatagacatacagagatatacaaatatattatatatttttctgagatttttgatatctcaatctgcagccattcttcaggtcgtagcatttggagcaaaaaaaaaaaaaaaaaataaaggccttggatattgaaaaaataccaaggcagaacagttggacaatctatttcttgagccaaatttaattattcttatttttgtaatcagtcattggcttcttatctggatgaaggcttttggaggagaaccaaaacgacaagttccaagaagaagatgaagctccgcctccgccgcttagtcccaaccctgcccaggaagaagggcccgtggggctttgcctgtgcccgtccaccaaaggctgtcatgtgtctcgaaatcagcagccctccccatcccaatcccaggcagcttgtgtgtacaatcagcttctctagcaactctgtatctgttggcttcaagagaatattttgcctccacatatgtaccccttctcctttttttaaagatggatttaaaccaagatgcctccaggaaagaggacgaaatgagtatattcacagaggaatccaaaaaatacagtttgggggaaaatgcaataatttttgatgagatgggtgaaggacaagaagtgagttgtgtcaattattgtagatacaattttctgattaaatctggaaaaataaaaggcagcctgttttttctgcttttattgtattaacagctgaggtagctaaagttatttaaaataaaattaaatttatgatccaagtagcttatttttccctttaaatctcattgtaaatatatttgatttcttgtagaaattgatttccttctgtttaattttatgcttttattatactcttgatttttctaaatttgtgtgtgaaatataacattgattgaattgcagttacatttggttagtaatatttcattattttaataactgtgatgtcatgtatggatttactttggggttcaaatcaaaatgtcactgccagaaagagctgttccagctgatctagagcatactgccctagagtgtccctgggatcatctgaacagaagtgcacaggctacttgtacagagaaaaaattaatactcaaaggaaatcttcattttttagattgactttgggaatttgaattttcatcagtgcaaatataaatttctctatcctgctctgaggctaattggtaccatattttccctttgtgtcttgtgactctgccacatcccatctcatcctggcctctgagtcaagaacccagtgaactgactttctagttctagaagttccgctgcaaggccaggaaagcttgagaaaggtattgtggaagaagcaaaggtagacccccatcactcacctttgtctgcatccctgggcctgtgaatgatgacagcacctgacattctgcaccagctacctctgcctccatggcagagaaaaggccataagaacagtggaagaggagcatggactcagacttcaaggaagaagccatttccccaggtccttccttctgcatctcaccacccctagttacaaataactccattgaacagcatctattcagaaactatgccgaataaaaagattggtggaagggctcatgtggttagcaactatgaaacagaaataggacactcagttacaaacattatctcctttagtttttcagaaaatgcatccctgatttcattcatttccagcttgaaagccagccatattactctagtccctaccaaactgctctagaaggtcatttccattttgtttgtgatatttagacgcgcagacttcaggaagttcacctttaacttcagcattccagatgaagtttcctgactcagtgcttttgcataaggaactagaaaaaaaaagtaaggaaaattggagatgctaacatcctcccccatcccaactgcaccttaaaatatgcatgtcaccttcaaggttttataattgcactgtttgttttatgtatgtacagattaaaattattgctacatttgaggaaaataaaattgcttgcttctatgtaattcctgtcattccacaggaaattcacttttccagctactgaatagaatttgtttaacaacctcatgggttgcctcttcatttacagggaagaaatgaaatgtacatctgcagaaattgccaaagcccaaattaacgagtattataaaaggataataaagcatccctgaagcca

SEQ ID NO: 356167 - DNA, 3249 bp, Homo sapiens
tttttctatttcaagaagttattcataatataaagtagttccaaatgtaactgctgtgtttattacttgtttgcttttactatctagtaattgttatttgaaaatattcaagatgtatatatgattggggaaatacatctgttatagcagtcaatttactttatatattttagccagaattgttttctaaattttggtattttgtaatgtccactttttagatgtgaatttatatcactttctaaatctggttttatattttcgataaaaataaagatctcactaaatgtgtaagcatagatacttgatcagagaaggaaatatggtgatacaaatgtacactaactggattttctttgtgtaacagcacggaaaagaggcgcagggagcaagaaaataaatatttagaagaactagctgagttactgtctgccaacattagtgacattgacagcttgagtgtaaaaccagacaaatgcaagattttgaagaaaacagtcgatcagatacagctaatgaagagaatggaacaagagaaatcaacaactgatgacgatgtacagaaatcagacatctcatcaagtagtcaaggagtgatagaaaaggaatccttgggacctcttcttttggaggctttggatggatttttctttgttgtgaactgtgaagggagaattgtatttgtgtcagagaatgtaaccagctacttaggttacaatcaggaggaattaatgaataccagcgtctacagcatactgcacgtgggggatcatgcagaatttgtgaagaatctgctaccaaaatcactagtaaatggagttccttggcctcaagaggcaacacgacgaaatagccatacctttaactgcaggatgctaattcaccctccagatgagccagggaccgagaaccaagaagcttgccagcgttatgaagtaatgcagtgtttcactgtgtcacagccaaaatcaattcaagaggatggagaagatttccagtcatgtctgatttgtattgcacggcgattacctcggcctccagctattacgggtgtagaatcctttatgaccaagcaagatactacaggtaaaatcatctctattgatactagttccctgagagctgctggcagaactggttgggaagatttagtgaggaagtgcatttatgcttttttccaacctcagggcagagaaccatcttatgccagacagctgttccaagaagtgatgactcgtggcactgcctccagcccctcctatagattcatattgaatgatgggacaatgcttagcgcccacaccaagtgtaaactttgctaccctcaaagtccagacatgcaacctttcatcatgggaattcatatcatcgacagggagcacagtgggctttctcctcaagatgacactaattctggaatgtcaattccccgagtaaatccctcggtcaatcctagtatctctccagctcatggtgtggctcgttcatccacattgccaccatccaacagcaacatggtatccaccagaataaaccgccagcagagctcagaccttcatagcagcagtcatagtaattctagcaacagccaaggaagtttcggatgctcacccggaagtcagattgtagccaatgttgccttaaaccaaggacaggccagttcacagagcagtaatccctctttaaacctcaataattctcctatggaaggtacaggaatatccctagcacagttcatgtctccaaggagacaggttacttctggattggcaacaaggcccaggatgccaaacaattcctttcctcctaatatttcgacattaagctctcccgttggcatgacaagtagtgcctgtaataataataaccgatcttattcaaacatcccagtaacatctttacagggtatgaatgaaggacccaataactccgttggcttctctgccagttctccagtcctcaggcagatgagctcacagaattcacctagcagattaaatatacaaccagcaaaagctgagtccaaagataacaaagagattgcctcaattttaaatgaaatgattcaatctgacaacagctctagtgatggcaaacctctggattcagggcttctgcataacaatgacagactttcagatggagacagtaaatactctcaaaccagtcacaaactagtgcagcttttgacaacaactgccgaacagcagttacggcatgctgatatagacacaagctgcaaagatgtcctgtcttgcacaggcacttccaactctgcctctgctaactcttcaggaggttcttgtccctcttctcatagctcattgacagaacggcataaaattctacaccggctcttacaggagggtagcccctcagatatcaccactttgtctgtcgagcctgataaaaaggacagtgcatctacttctgtgtcagtgactggacaggtacaaggaaactccagtataaaactagaactggatgcttcaaagaaaaaagaatcaaaagaccatcagctcctacgctatcttttagataaagatgagaaagatttaagatcaactccaaacctgagcctggatgatgtaaaggtgaaagtggaaaagaaagaacagatggatccatgtaatacaaacccaaccccaatgaccaaacccactcctgaggaaataaaactggaggcccagagccagtttacagctgaccttgaccagtttgatcagttactgcccacgctggagaaggcagcacagttgccaggcttatgtgagacagacaggatggatggtgcggtcaccagtgtaaccatcaaatcggagatcctgccagcttcacttcagtccgccactgccagacccacttccaggctaaatagtatgttctggggacaacacctcattttaaacgtttagtgataatgtggattagcattttgtctctcaccagtattacacagatcctttgcttaagagtgaaatatctttttattaatgccactataaataataaaacagttatatttaggcatgtgaacatcattcatcatgtgtattttaaattatgacctctatccttttgtaattaatgttaaggtgagcaattgatgttaaggagaacaattttgtcgtctcacccaaaacaccccataacaggactttcagaaatacagtattgggtcagattgtttccagatatcttccttgaaaactaatcctgtgagttgcagaaataaaagattctgtacta

SEQ ID NO: 356168 - DNA, 484 bp, Homo sapiens
gctttgattctctgctggataagaagatcacctctgtggcaccagctgccggcaaagctgcttgtcgatgtccccacagaagctgcacagaggaaacgacttggcaagtggctgcaagaccagcagaatccctggttgcccagtgtctcctgccatgcatgttttactctaagcaggctgccttccgcaacaaccacgtggagtggcccctgaatgacacctggagtgaaaacttcatggaaagcaacgtccaccctcccttcttctctcattgcttctttctatttgacgtggccttaaggaagctcacgttatcccataacagaaggcagtggtgatggtaggggtgagggtagggatacgcatgagaatcaatatttgtaaatgaaacagcgttgtcctcttagtattctcagtaatagaatccgcctgttcacccgagctcctacgcaaatataggatcatctgagcgtggtttctctgt

SEQ ID NO: 356169 - DNA, 554 bp, Homo sapiens
aggtgcagttcccacttccgcctctttcttccctttcctgttaggcgagagctgcgaaaggcgagagctgcgaagggccaggtgtcgggcgctgtttctcgttttcatcatatagacaaaacagccctgctgcaaagatggtcaacgtacctaaaacccgaagaaccttctgtaagaagtgtggcaagcatcagcctcacaaagtgacacagtataagaagggcaaggattctttgtatgcccagggaaggaggcgctatgatcggaagcagagtggctatggtgggcagacaaagccaattttccggaagaaggctaagaccacaaagaagattgtgctaaggctggaatgtgttgagcctaactgcagatccaagaggatgctggccattaagagatgcaagcattttgaactgggaggagataagaagagaaagggccaagtgatccagttctaaactttgggatatttttcttcaattttgaagagaaaatggtgaagccatagaaaagttacccgagggaaaataaatacagtgatattcttacgcaaa

SEQ ID NO: 356170 - DNA, 546 bp, Homo sapiens
aaactagttagtacgaggctgggtgtgaattcggccgcgagagctgcgaaaggcgagagctgcgaagggccaggtgtcgggcgctgtttctcgttttcatcatatagacaaaacagccctgctgcaaagatggtcaacgtacctaaaacccgaagaaccttctgtaagaagtgtggcaagcatcagcctcacaaagtgacacagtataagaagggcaaggattctttgtatgcccagggaaggaggcgctatgatcggaagcagagtggctatggtgggcagacaaagccaattttccggaagaaggctaagaccacaaagaagattgtgctaaggctggaatgtgttgagcctaactgcagatccaagaggatgctggccattaagagatgcaagcattttgaactgggaggagataagaagagaaagggccaagtgatccagttctaaactttgggatatttttcttcaattttgaagagaaaatggtgaagccatagaaaagttacccgagggaaaataaatacagtgatattcttacgcaaa

SEQ ID NO: 356171 - DNA, 590 bp, Homo sapiens
aggtgcagttcccacttccgcctctttcttccctttcctgttaggcgagagctgcgaaaggcgagagctgcgaagggccaggtgtcgggcgctgtttctcgttttcatcatatagacaaaacagccctgctgcaaagatggtcaacgtacctaaaacccgaagaaccttctgtaagaagtgtggcaagcatcagcctcacaaagtgacacagtataagaagggcaaggattctttgtatgcccagggaaggaggcgctatgatcggaagcagagtggctatggtgggcagacaaagccaattttccggaagaaggctaagaccacaaagaagattgtgctaaggctggaatgtgttgagcctaactgcagatccaagaggatgctggccattaagagatgcaagcattttgaactgggaggagataagaagagaaagggccaagtgatccagttctaaactttgggatatttttcttcaattttgaagagaaaatggtgaagccatagaaaagttacccgagggaaaataaatacagtgatattcttacgcaaaaaaaaaacagacaacaactaaacactaccacaaaaa

SEQ ID NO: 356172 - DNA, 500 bp, Homo sapiens
gactagttctagatcgcgagcggccaggtgtcgggcgctgtttctcgttttcatcatatagacaaaacagccctgctgcaaagatggtcaacgtacctaaaacccgaagaaccttctgtaagaagtgtggcaagcatcagcctcacaaagtgacacagtataagaagggcaaggattctttgtatgcccagggaaggaggcgctatgatcggaagcagagtggctatggtgggcagacaaagccaattttccggaagaaggctaagaccacaaagaagattgtgctaaggctggaatgtgttgagcctaactgcagatccaagaggatgctggccattaagagatgcaagcattttgaactgggaggagataagaagagaaagggccaagtgatccagttctaaactttgggatatttttcttcaattttgaagagaaaatggtgaagccatagaaaagttacccgagggaaaataaatacagtgatattcttacgcaaa

SEQ ID NO: 356173 - DNA, 672 bp, Homo sapiens
aggtgcagttcccacttccgcctctttcttccctttcctgttaggcgagagctgcgaaaggcgagagctgcgaagggccaggtgtcgggcgctgtttctcgttttcatcatatagacaaaacagccctgctgcaaagatggtcaacgtacctaaaacccgaagaaccttctgtaagaagtgtggcaagcatcagcctcacaaagtgacacagtataagaagggcaaggattctttgtatgcccagggaaggaggcgctatgatcggaagcagagtggctatggtgggcagacaaagccaattttccggaagaaggctaagaccacaaagaagattgtgctaaggctggaatgtgttgagcctaactgcagatccaagaggatgctggccattaagagatgcaagcattttgaactgggaggagataagaagagaaagggccaagtgatccagttctaaactttgggatatttttcttcaattttgaagagaaaatggtgaagccatagaaaagttacccgagggaaaataaatacagtgatattcttacgcaaaaaatatattattttttttattatttatatattaatttttaatttataattattttttttttttatttttttattaataattattttaatatatttttttattaatttatttccttttc

SEQ ID NO: 356174 - DNA, 813 bp, Homo sapiens
  misc_feature (557)..(557): n is a, c, g, or t
aggtgcagttcccacttccgcctctttcttccctttcctgttaggcgagagctgcgaaaggcgagagctgcgaagggccaggtgtcgggcgctgtttctcgttttcatcatatagacaaaacagccctgctgcaaagatggtcaacgtacctaaaacccgaagaaccttctgtaagaagtgtggcaagcatcagcctcacaaagtgacacagtataagaagggcaaggattctttgtatgcccagggaaggaggcgctatgatcggaagcagagtggctatggtgggcagacaaagccaattttccggaagaaggctaagaccacaaagaagattgtgctaaggctggaatgtgttgagcctaactgcagatccaagaggatgctggccattaagagatgcaagcattttgaactgggaggagataagaagagaaagggccaagtgatccagttctaaactttgggatatttttcttcaattttgaagagaaaatggtgaagccatagaaaagttacccgagggaaaataaatacagtgatattcttacgcaaaaangaaaagcaccactcatgtacattacacctatttcttccgcgcgtcctcctatgcacataaaaccttggcatcaccaccggtttggcctcgagcccacagtaggtacgtgaaacctgcgccatcgttggccaagaagacctggggcaaagacaagggggggattccaccgattagaaaccgcggggcaaccggttttggacaaccagaggagtccgggcatacggtccttacggagcaagagctgaacggcgcggag

SEQ ID NO: 356175 - DNA, 1193 bp, Homo sapiens
aggtgcagttcccacttccgcctctttcttccctttcctgttaggcgagagctgcgaaaggcgagagctgcgaagggccaggtgtcgggcgctgtttctcgttttcatcatatagacaaaacagccctgctgcaaagatggtcaacgtacctaaaacccgaagaaccttctgtaagaagtgtggcaagcatcagcctcacaaagtgacacagtataagaagggcaaggattctttgtatgcccagggaaggaggcgctatgatcggaagcagagtggctatggtgggcagacaaagccaattttccggaagaaggctaagaccacaaagaagattgtgctaaggctggaatgtgttgagcctaactgcagatccaagaggatgctggccattaagagatgcaagcattttgaactgggaggagataagaagagaaagggccaagtgatccagttctaaactttgggatatttttcttcaattttgaagagaaaatggtgaagccatagaaaagttacccgagggaaaataaatacagtgatattcttacgcaaaaaaacaaaaaaacaacgaacaaacaacacaacctgttgtggcgccggcatcggagcactcggaaaaacggtccaagaacacaccacgtagggagcagggcccacaagagggacaggctaaccacgggggcaaaagagcggaacccaaaggaacccagggggcgagaaaaccgagggcatggggaatctcagacccacaataaaccaaaacgaccaggggggggaacacacaagaaggcgttctggaaaaacaacaccacaaaagagggactccgaggagggaaacaccagaggggaaaccataaccacagggcaagtacaaagaggagaacagacaaaaaataacaaaaatagaaaccccacaaacacgatggagacacacaaacagaacacgaagaaaaacaacacaccaaccaccgaacaaagcagaagcacaaggagaggaaaggacaggaggaaacaacagaatgacacgaagagaacgagaacgaaacagcacgaacaaagagcaacccaagagaaacgaccgagacaaacacggggcgaggaagacaacaggccacgccgaacagagaagagagcagaccccaaccaacgacgcgacgagaggaaacaagaacgagaaacaagacgacgcgga

SEQ ID NO: 356176 - DNA, 758 bp, Homo sapiens
  misc_feature (637)..(637): n is a, c, g, or t
  misc_feature (691)..(691): n is a, c, g, or t
  misc_feature (712)..(712): n is a, c, g, or t
aggtgcagttcccacttccgcctctttcttccctttcctgttaggcgagagctgcgaaaggcgagagctgcgaagggccaggtgtcgggcgctgtttctcgttttcatcatatagacaaaacagccctgctgcaaagatggtcaacgtacctaaaacccgaagaaccttctgtaagaagtgtggcaagcatcagcctcacaaagtgacacagtataagaagggcaaggattctttgtatgcccagggaaggaggcgctatgatcggaagcagagtggctatggtgggcagacaaagccaattttccggaagaaggctaagaccacaaagaagattgtgctaaggctggaatgtgttgagcctaactgcagatccaagaggatgctggccattaagagatgcaagcattttgaactgggaggagataagaagagaaagggccaagtgatccagttctaaactttgggatatttttcttcaattttgaagagaaaatggtgaagccatagaaaagttacccgagggaaaataaatacagtgatattcttacgcaaactcgtgccgaatttcgcacgagggcatggcgttcacgcttctctgagtaccgagcgtacaggtcaattatcaaagactacttncaccgtggcgccaagtggacaacagctcctaaagccacaatggctgatgagctntataaccaagattattccatncactctgtagaagacagacacaaattggttgtcaaggaactgggag

SEQ ID NO: 356177 - DNA, 647 bp, Homo sapiens
  misc_feature (619)..(619): n is a, c, g, or t
  misc_feature (628)..(628): n is a, c, g, or t
  misc_feature (634)..(634): n is a, c, g, or t
aggtgcagttcccacttccgcctctttcttccctttcctgttaggcgagagctgcgaaaggcgagagctgcgaagggccaggtgtcgggcgctgtttctcgttttcatcatatagacaaaacagccctgctgcaaagatggtcaacgtacctaaaacccgaagaaccttctgtaagaagtgtggcaagcatcagcctcacaaagtgacacagtataagaagggcaaggattctttgtatgcccagggaaggaggcgctatgatcggaagcagagtggctatggtgggcagacaaagccaattttccggaagaaggctaagaccacaaagaagattgtgctaaggctggaatgtgttgagcctaactgcagatccaagaggatgctggccattaagagatgcaagcattttgaactgggaggagataagaagagaaagggccaagtgatccagttctaaactttgggatatttttcttcaattttgaagagaaaatggtgaagccatagaaaagttacccgagggaaaataaatacagtgatattcttacgcaaaaaaaaaaaaaaaagaaaaaaaaaaaaactttgttgggggcgcttgggccctggaaaaggtttttnaaacccttncggttngggcgcggggccc

SEQ ID NO: 356178 - DNA, 593 bp, Homo sapiens
  misc_feature (565)..(565): n is a, c, g, or t
  misc_feature (574)..(574): n is a, c, g, or t
  misc_feature (580)..(580): n is a, c, g, or t
gactagttctagatcgcgagcggccaggtgtcgggcgctgtttctcgttttcatcatatagacaaaacagccctgctgcaaagatggtcaacgtacctaaaacccgaagaaccttctgtaagaagtgtggcaagcatcagcctcacaaagtgacacagtataagaagggcaaggattctttgtatgcccagggaaggaggcgctatgatcggaagcagagtggctatggtgggcagacaaagccaattttccggaagaaggctaagaccacaaagaagattgtgctaaggctggaatgtgttgagcctaactgcagatccaagaggatgctggccattaagagatgcaagcattttgaactgggaggagataagaagagaaagggccaagtgatccagttctaaactttgggatatttttcttcaattttgaagagaaaatggtgaagccatagaaaagttacccgagggaaaataaatacagtgatattcttacgcaaaaaaaaaaaaaaaagaaaaaaaaaaaaactttgttgggggcgcttgggccctggaaaaggtttttnaaacccttncggttngggcgcggggccc

SEQ ID NO: 356179 - DNA, 488 bp, Homo sapiens
aaactagttagtacgaggctgggtgtgaattcggccgcgagagctgcgaaaggcgagagctgcgaagggccaggtgtcgggcgctgtttctcgttttcatcatatagacaaaacagccctgctgcaaagatggtcaacgtacctaaaacccgaagaaccttctgtaagaagtgtggcaagcatcagcctcacaaagtgacacagtataagaagggcaaggattctttgtatgcccagggaaggaggcgctatgatcggaagcagagtggctatggtgggcagacaaagccaattttccggaagaaggctaagaccacaaagaagattgtgctaaggctggaatgtgttgagcctaactgcagatccaagaggatgctggccattaagagatgcaagcattttgaactgggaggagataagaagagaaagggccaagtgatccagttctaaactttgggaaaataaatacagtgatattcttacgcaaa

SEQ ID NO: 356180 - DNA, 192 bp, Homo sapiens
gtaagctaagaacgaggctgtagcggctccaataggagcctcccttgctcagaatcctgggtaggactaggccttcttaggaaagggaaggcgagacctatggccctcgccggccttagttcgagagcaggcttctcccttcaggaaaaaggtctcaggcatggcggctatagaatcgcggggcgcgccggc

SEQ ID NO: 356181 - DNA, 896 bp, Homo sapiens
tgctgagcactcgcccacctgtccactagcgggtctctatgtctggagctcttagagataagacatagaggtgtctggttctgagaaaaggaagtttgctaagtgagagacacaactgactcaactgactcagaaaactgattatattcctggtccctgaacgatcctatagagacatccagtccctgactccacctgcctccaggtgcccagaacagcccatcgtggggacttcaccctcagcaagtggacgccgtttgtcctgccagggcaggatggagatggatggggacccgtataacctgcctgcccaggggcaaggcaatatcatcattactaagtatgagcagggacaccgagctggggcagcagtggacttggggcatgagcaggttgatgtcagaaaatacaccaataacctcgggattgtgcatgagatggagctgccccgcgtcagtgccctggaggtgaagcaaagacgcaaggaaagtaaacgtaccaacaagtggcaaaagatgcttgcagactggacaaaatataggagcaccaagaagctgtctcaaagagtatacaaagtcattcccctggcggtacggggccgggcgtggtcacttttgctagatattgacagaatcaagtcccagaacccaggcaaatataaggtaagtccctcccacactcagctaggagtacaaacaagctagactgtatcaggagcccaggactccagctggagggaacgttgagcctgggttgggagtgggggctgtggtcagacgcacatcctgggcatagatggtaactcaggcaccacaggtgcgctgggctctgctgaccctccctggtgtcagaaacaaggtaaaaaggagctttctgcagaaggaaaccttccttcc

SEQ ID NO: 356182 - DNA, 4247 bp, Homo sapiens
  misc_feature (2722)..(2722): n is a, c, g, or t
gctggccaaagaagttcgtcccctttgtgaggcccgggatgggaggtgcccggttcccccagggacagcttcaagcggtagggacagacatctgaggacccagcctcagggatgctgtccccgggcttccaggctccagcgccgtaggactgaggcagactccacggtgagaaagagacccgatctaacccaggcctttcatcagagcccaggagggaaggcaggaagtgggaccacgaggcccggggggcttctaactcgtctggccagggagatctgaattggggtgaagagcagaatctccagaacaaggaggaggtggtgatcatggagacagatttggctgaaatgcctgagaaaggagctctgtcttcccaggattctccccatttccaagagaagagcacagaagagggagaagtggctgctctgcgcctcacggccagatcccaggaaacagtgacattcaaggatgtggccatggactttacaccagaggagtgggggaagctggatcctgcacaaagggatgtgatgctggagaactataggaacctagtctcactttggcttccagtttccaaacctgagagctacaacttggagaatggaaaagaaccattgaagcttgagagaaaagcccccaaaagcagctattcagaactgcctttttgttgagcacagaaaacgaaggaaatttgcatttccaatgtctttcagacatggagactagaccacagagcaaggattcaacttcagtgcaagatttttccaaagcagaatcatgcaaagttgcaataatagacagactgacacggaatagtgtctatgactctaacttggaagcagcccttgaatgtgaaaattggttagagaatcagcaaggaaatcaggagagacatttgagagaaatgttcactcacatgaattcactctctgaggaaacagaccataagcatgatgtatactggaaaagcttcaatcagaaatctgtccttatcactgaagacagagttcccaaaggatcttatgccttccatacacttgaaaaaagcttgaaacaaaaatcaaacttaatgaaaaagcagagaacttataaagagaaaaaacctcataaatgtaatgattgtggtgaactcttcacctaccattcagtgcttattcgacaccagagagtccatactggagagaaaccctatacctgcaatgaatgtgggaaatcttttagccacagagctaatttaactaaacaccagagaactcatactagaattctctttgaatgcagtgaatgcaagaaaaccttcacagaaagctcatcccttgcaacacatcagagaattcacgttggagagagaccttatgaatgcaatgaatgtgggaaaggttttaatcgaagtacacatcttgtgcagcatcagttgattcatactggagtgaagccttatgaatgtaatgaatgtgataaagcttttattcattcatcagcactcattaaacatcaaagaactcatactggagagaaaccttataaatgtcaagaatgtgggaaagcctttagccattgctcatccctaactaagcatcagagagttcatactggagaaaagccatatgaatgcagtgaatgtggaaaaacttttagtcagagcacacatcttgttcaacatcagagaattcacactggagagaaaccctatgagtgtaatgaatgtgggaaaaccttcagccggagctccaattttgctaaacatcaaagaattcatattggaaagaaaccgtacaaatgtagcgagtgtggaaaagccttcattcattcatcagctctcattcaacatcagagaactcataccggagagaaaccctttagatgtaatgagtgtgggaaaagctttaagtgcagttcatctctcatcagacatcaaagagttcacactgaagagcaaccctgaaaaattactgaatgtgaagaaatgtaagttggttttatcactgtattaaatacttgagtgtttaggtggaaggcgcatccataatatgcatgtgaggaccaattctgtatgcatctaatttcatttgcgtaatacatagttttgagccataagcaggttctttatgtccgttaatttgataattatgaaatctagccagcgatttcaaaattttaatctccaacgtcccaaatagctatctgtggaaattcaagaagtccctgagagtaggtagcagtacgaacattgtgaaatccagttttcccctctcttgtttatgtcagagctttgttgtaagcctctcactttgtaaggaaattcttattgggtaggttaggctgagggcttacatccttatcatcaggaagacacaatgttgttatttattactccttgagatctagatacacatatggtataattcatctagagtgtaatttcttttatattagccttaaaaaccaaaaatgctgggttcaaagtccttagaattcccttcctccctcaacaagctgctgtctatgttgatgaccataactgggatgtataatatttacagacaactctaagttacgttcacatggattatgtacatcattgattttttttttttttttttttttgagacagagtcttgctctgttgcccgggctggagtgcagtggcgcgatctcggctcactgcaacctccacctcccaggttcatgccattctcttgtctcagcctcccnagtagctgggactacaggcacctgccagtacgcctggctaattttttttgtatttttagtagagatggggtttcaccatgttagccaggatggtcttgatctcctgacctcgtgatctgcctgcctcggcctcccaaagtgctgggattacaggcatgagccaccatgcctggcatcattattgatttatgtcattgttatccctctaccgcagagaccttctttcactttccatttccctgggagttcacgtgaagtagtgaatgggtcaaaatcttaacagtggttgttgatcaagtccctcctttcttatccttggcactgaataaatctttggttttccataatcaaagggtgagggagacttcttttgtctacattattcagctttctgtaagctatgctgtgtccatttgagaaaaagccccagggatattgaaggtctgagaagttgggtggttcagtgtgttattatatttagggtcccagtaaagaagaactgaagcaactgtgagacaccagggcatacttccctgtatgagtggaaaacaaggcacggaaaatagctcacaggatagtcctcaactgacttgcttgaggataagcagcttcccttcgtgaagaagttgccatttctctggccttcatatttatctactttttgttattgttgtctgtatcggttcaatctcacactgctataaagaaatgcctgagactgggtaacttataaagaaaaaaggtttaattggctcatggttccatgggctgtacaggaagtatgactggggaggtctcagggagcttttactcatggcaaaaggcaaagccagagcaggtatcttcacagggctagagcaagaggaaaagagagaggggaggtgctacacactttttatgcaaccaaatctcatgagaactctatcacgagacagcagtagggggacagtgctaaatcattcatgagaaactacctgcgtggtccagtcaccttgcaccaggccccacctcccacattggggattacaattaaacatgagatttgggtggggatacagatctaaactgtatcattactcaaaaaaaaaaaaaaaaagaaagaaaagaaaaaaaaaaaagggggggggggtaaaaattttcccgggggggccaattaaagggttacccggttttttggaaaagggggccctaaaaggagggggtttaaaaaagagggaggggcgggttaaaagggggggggggacaccccgccgtggggacttctgggggaggaaacctgacttgcggcgggcgcgactgcggccgcactcaccgaggattaagattcggggaataaaacttcggggtgagggcaaccccacgcatagcgcggcggaatggctcggatgtattgaaaatgacgggggcgagcaaataaaaacaggagcaagaagaactaaaacaaacaagatcgacagaaatgcaccactgggcacacatcactgaaacgaggcaaaaacgagcaacaagaaatgtaagcacaaca

SEQ ID NO: 356183 - DNA, 2353 bp, Homo sapiens
gctggccaaagaagttcgtcccctttgtgaggcccgggatgggaggctccagcgccgtaggactgaggcagactccacggtgagaaagagacccgatctaacccaggcctttcatcagagcccaggagggaaggcaggaagtgggaccacgaggcccggggggcttctaactcgtctggccagggagatctgaattggggtgaagagcagaatctccagaacaaggaggaggtggtgatcatggagacagatttggctgaaatgcctgagaaaggagctctgtcttcccaggattctccccatttccaagagaagagcacagaagagggagaagtggctgctctgcgcctcacggccagatcccaggtgagtgagtgctgattattggaattacaccttgtttcttagagtacagatgcactcccttctttgtgatgtggagtttctttatccactaaagcccatctgcagagctgagttctaaatctaagagactagtcaggagactaatggactcagaagaaaatgttttctacttataacactggatggatttcttccctatttagtgtttattgtccctcaacagataggtaagcagcatttccctttcttagcctcctatgctcatttctgtgcttggtaatgtgagaaactattttaaatataatgtggtacatacctcttaaaacttgtttctctagaggaaacagcatgtatgtgaccttaagtggcaatctaagaaagcacttaaatgctgaagtgattgtaaaaataataaatactcacatagttcaaagaaatactggaaaaggaaagcctatgaaggcgtaatttaaagagttacagttagaatccagccctctgagatgatgaaagctaaggtatgatcatgtctgcaacttacttttatattgttggcccctctctcccaaaaggtaaatatgacaaatattacgaatgtttgtgctgggattacaggcatgagccaccatgcctggcatcattattgatttatgtcattgttatccctctaccgcagagaccttctttcactttccatttccctgggagttcacgtgaagtagtgaatgggtcaaaatcttaacagtggttgttgatcaagtccctcctttcttatccttggcactgaataaatctttggttttccataatcaaagggtgagggagacttcttttgtctacattattcagctttctgtaagctatgctgtgtccatttgagaaaaagccccagggatattgaaggtctgagaagttgggtggttcagtgtgttattatatttagggtcccagtaaagaagaactgaagcaactgtgagacaccagggcatacttccctgtatgagtggaaaacaaggcacggaaaatagctcacaggatagtcctcaactgacttgcttgaggataagcagcttcccttcgtgaagaagttgccatttctctggccttcatatttatctactttttgttattgttgtctgtatcggttcaatctcacactgctataaagaaatgcctgagactgggtaacttataaagaaaaaaggtttaattggctcatggttccatgggctgtacaggaagtatgactggggaggtctcagggagcttttactcatggcaaaaggcaaagccagagcaggtatcttcacagggctagagcaagaggaaaagagagaggggaggtgctacacactttttatgcaaccaaatctcatgagaactctatcacgagacagcagtagggggacagtgctaaatcattcatgagaaactacctgcgtggtccagtcaccttgcaccaggccccacctcccacattggggattacaattaaacatgagatttgggtggggatacagatctaaactgtatcattactcaaaaaaaaaaaaaaaaagaaagaaaagaaaaaaaaaaaagggggggggggtaaaaattttcccgggggggccaattaaagggttacccggttttttggaaaagggggccctaaaaggagggggtttaaaaaagagggaggggcgggttaaaagggggggggggacaccccgccgtggggacttctgggggaggaaacctgacttgcggcgggcgcgactgcggccgcactcaccgaggattaagattcggggaataaaacttcggggtgagggcaaccccacgcatagcgcggcggaatggctcggatgtattgaaaatgacgggggcgagcaaataaaaacaggagcaagaagaactaaaacaaacaagatcgacagaaatgcaccactgggcacacatcactgaaacgaggcaaaaacgagcaacaagaaatgtaagcacaaca

SEQ ID NO: 356184 - DNA, 854 bp, Homo sapiens
gctggccaaagaagttcgtcccctttgtgaggcccgggatgggaggtgcccggttcccccagggacagcttcaagcggtagggacagacatctgaggacccagcctcagggatgctgtccccgggcttccaggctccagcgccgtaggactgaggcagactccacggtgagaaagagacccgatctaacccaggcctttcatcagagcccaggagggaaggcaggaagtgggaccacgaggcccggggggcttctaactcgtctggccagggagatctgaattggggtgaagagcagaatctccagaacaaggaggaggtggtgatcatggagacagatttggctgaaatgcctgagaaaggagctctgtcttcccaggattctccccatttccaagagaagagcacagaagagggagaagtggctgctctgcgcctcacggccagatcccaggaaacagtgacattcaaggatgtggccatggactttacaccagaggagtgggggaagctggatcctgcacaaagggatgtgatgctggagaactataggaacctagtctcactttggcttccagtttccaaacctgagagctacaacttggagaatggaaaagaaccattgaagcttgagagaaaagcccccaaaagcagctattcaggtgagccagatagatgggagtcttcataaatgatagcccagcaggacaatgaagaaatacttttcagtgcttaagaaagtgcctgtgtgcccttatttttaaatttttttaaaattctaaagcatttaaaatatatacagaagtccagaaaataaaataacattcatgtatccatcactgagattagacacgt

SEQ ID NO: 356185 - DNA, 1908 bp, Homo sapiens
  misc_feature (892)..(892): n is a, c, g, or t
  misc_feature (975)..(975): n is a, c, g, or t
tgctgagcactcgcccacctgtccactagcgggtctctatgtctggagctcttagagataagacatagaggtgtctggttctgagaaaaggaagtttgctaagtgagagacacaactgactcaactgactcagaaaactgattatattcctggtccctgaacgatcctatagagacatccagtccctgactccacctgcctccaggtgcccagaacagcccatcgtggggacttcaccctcagcaagtggacgccgtttgtcctgccagggcaggatggagatggatggggacccgtataacctgcctgcccaggggcaaggcaatatcatcattactaagtatgagcagggacaccgagctggggcagcagtggacttggggcatgagcaggttgatgtcagaaaatacaccaataacctcgggattgtgcatgagatggagctgccccgcgtcagtgccctggaggtgaagcaaagacgcaaggaaagtaaacgtaccaacaagtggcaaaagatgcttgcagactggacaaaatataggagcaccaagaagctgtctcaaagagtatacaaagtcattcccctggcggtacggggccgggcgtggtcacttttgctagatattgacagaatcaagtcccagaacccaggcaaatataaggtcatgaaggagaagggcaagaggtcctccagaatcatccactgcatccagctagatgtcagccacaccctgcagaaacacatgatgttcatacaaagattcggagtcaagcagcaggaattatgtgacatcctcgtggcctattctgcatataaccctgaggtgggctaccacagggacctgagccgcatcactgccatcctcctcctgtgtctgccagaggaagatgntttctgggcgcttacccagttgctcgctggtgagaggcactccctgtggtattctacagcccaaatactgcctggctcgagangctcctatcgcaccaggagcaggtgctgcacaagtccttcccaaagatcatgagacacctgggcaaggaagggctgtgcattgagggttccatgctgacgaggctcctccggtgtttccttgatgggaaatccttcgggctcaccctgagactgtgggatgtgttcatcttggagggcgcgcgggtactgacagccatggtgcatgcatcattcaaaatacacaggaagcacctcatgaagctttcctggagcactgtctgggagtttcaggagcgactctctcagagctgggccctggaggacaacgcggtcctcaggaaccttcaaacctctatgaaggaactcacaaaaaaacactgggacctgccacccccagggagcttgctacaaaatgcacattgctataccatagcctggggcttgcaatccaaggctggcaaggattcctgcacgtcaagggcctcaggtgactttcatgcacacccaagtcagaaggctctcctgaatcctggatgtcaccttcctgcccaaaaaaggaggaacgagggtcaaccagcagcagaccagtcacaaaaagagatgaaatgtgagtgcatggccttcctgacacccagacaaaactttgggcacaaagccaggctgcagctctggccactgacttggaccagggatgcccccatgcaggccggtgtgccctggctgctcttgacaccctctggctcctgacaccctctcttcggctgcctgcgttaggaagggagaacctgccagttttcagaagaaaatgtagctttattataacataggaaagactgcaagttattacgggaggaggaggaggcctgaaacagctcctgaaaatgagagggaaaaggaaggtgtaaatatgttggtaataaaatctccaaccacaaaatagtcatgggaatgtt

SEQ ID NO: 356186 - DNA, 2762 bp, Homo sapiens
  misc_feature (1746)..(1746): n is a, c, g, or t
  misc_feature (1829)..(1829): n is a, c, g, or t
tgctgagcactcgcccacctgtccactagcgggtctctatgtctggagctcttagagataagacatagaggtgtctggttctgagaaaaggaagtttgctaagtgagagacacaactgactcaactgactcagaaactctgtggcgatgggtgctgtccccaaatgtagccattccacaggaaaacaaagtcccctcctgtattgacagctgggaattgtggtgtccaccgtcctcgacctgcgacggggtctccatgagcacagaggctgctctggagtcaatagatcatcttttccccaaaccaaactgcttggctggcgttgttcctgaagcggcttcactggccagaagacatccagtccctgactccacctgcctccaggtgcccagaacagcccatcgtggggacttcaccctcagcaagtggacgccgtttgtcctgccagggcaggatggagatggatggggacccgtataacctgcctgcccaggggcaaggcaatatcatcattactaagtatgagcagggacaccgagctggggcagcagtggacttggggcatgagcaggttgatgtcagaaaatacaccaataacctcgggattgtgcatgagatggagctgccccgcgtcagtgccctggaggtgaaggtaagagcctgtgcctgctgcgtgggaggctgcttcagggactgggaatcgggtggtcggtaaggcagagggggtggcctgtgggcctgtgtggtggtgagtgggccacggctgtcactgggaggggtggcctttcctgctggactctgttcccatgaggacttgaccaaaacccaaaccaagaactgcagtcctggctcagagtccactgcctgtttgaaccaagaccccagctgaaggctggacctgaccaaaacttggggcatttatggcctgaggatggcatgtcatggcatcaccattccagactaccagctccagttccttcagagggtctcagcccctggggcctgccctttcctggcttcttcaagttgggtcccttcagggccccaaagccctggacccagcatccacgggccactgtcagacgcctggcagctccgctaactccatcatggctcatttgacagcaaagacgcaaggaaagtaaacgtaccaacaagtggcaaaagatgcttgcagactggacaaaatataggagcaccaagaaggtaacatggggaggaagtggcccgcgtgactgctctctgcagagccaggagacaggcacccatggttgtgacctggcaccgtctgcctctcagtgggtgggtggtaccccatccttgccataggactgcaggcctgttcgccagctttgctctgcggggtcgccccatgtcctttctcactggagtgttcttctgtctgtagctgtctcaaagagtatacaaagtcattcccctggcggtacggggccgggcgtggtcacttttgctagatattgacagaatcaagtcccagaacccaggcaaatataaggtcatgaaggagaagggcaagaggtcctccagaatcatccactgcatccagctagatgtcagccacaccctgcagaaacacatgatgttcatacaaagattcggagtcaagcagcaggaattatgtgacatcctcgtggcctattctgcatataaccctgaggtgggctaccacagggacctgagccgcatcactgccatcctcctcctgtgtctgccagaggaagatgntttctgggcgcttacccagttgctcgctggtgagaggcactccctgtggtattctacagcccaaatactgcctggctcgagangctcctatcgcaccaggagcaggtgctgcacaagtccttcccaaagatcatgagacacctgggcaaggaagggctgtgcattgagggttccatgctgacgaggctcctccggtgtttccttgatgggaaatccttcgggctcaccctgagactgtgggatgtgttcatcttggagggcgcgcgggtactgacagccatggtgcatgcatcattcaaaatacacaggaagcacctcatgaagctttcctggagcactgtctgggagtttcaggagcgactctctcagagctgggccctggaggacaacgcggtcctcaggaaccttcaaacctctatgaaggaactcacaaaaaaacactgggacctgccacccccagggagcttgctacaaaatgcacattgctataccatagcctggggcttgcaatccaaggctggcaaggattcctgcacgtcaagggcctcaggtgactttcatgcacacccaagtcagaaggctctcctgaatcctggatgtcaccttcctgcccaaaaaaggaggaacgagggtcaaccagcagcagaccagtcacaaaaagagatgaaatgtgagtgcatggccttcctgacacccagacaaaactttgggcacaaagccaggctgcagctctggccactgacttggaccagggatgcccccatgcaggccggtgtgccctggctgctcttgacaccctctggctcctgacaccctctcttcggctgcctgcgttaggaagggagaacctgccagttttcagaagaaaatgtagctttattataacataggaaagactgcaagttattacgggaggaggaggaggcctgaaacagctcctgaaaatgagagggaaaaggaaggtgtaaatatgttggtaataaaatctccaaccacaaaatagtcatgggaatgtt

SEQ ID NO: 356187 - DNA, 566 bp, Homo sapiens
gctggccaaagaagttcgtcccctttgtgaggcccgggatgggaggtgcccggttcccccagggacagcttcaagcggtagggacagacatctgaggacccagcctcagggatgctgtccccgggcttccaggctccagcgccgtaggactgaggcagactccacgctctgtcttcccaggattctccccatttccaagagaagagcacagaagagggagaagtggctgctctgcgcctcacggccagatcccaggaaacagtgacattcaaggatgtggccatggactttacaccagaggagtgggggaagctggatcctgcacaaagggatgtgatgctggagaactataggaacctagtctcactttggcttccagtttccaaacctgagagctacaacttggagaatggaaaagaaccattgaagcttgagagaaaagcccccaaaagcagctattcagattcttaatccatttggaattgcttcttacttctctgagtgtatcttcttagccttcttttttgaacaattaaatattctaattactcaaaatttgattttaa

SEQ ID NO: 356188 - DNA, 526 bp, Homo sapiens
gctggccaaagaagttcgtcccctttgtgaggcccgggatgggaggtgcccggttcccccagggacagcttcaagcggtagggacagacatctgaggacccagcctcagggatgctgtccccgggcttccaggctccagcgccgtaggactgaggcagactccacggtgagaaagagacccgatctaacccaggcctttcatcagagcccaggagggaaggcaggaagtgggaccacgaggcccggggggcttctaactcgtctggccagggagatctgaattggggtgaagagcagaatctccagaacaaggaggaggtggtgatcatggaggtgagccagatagatgggagtcttcataaatgatagcccagcaggacaatgaagaaatacttttcagtgcttaagaaagtgcctgtgtgcccttatttttaaatttttttaaaattctaaagcatttaaaatatatacagaagtccagaaaataaaataacattcatgtatccatcactgagattagacacgt

SEQ ID NO: 356189 - DNA, 3971 bp, Homo sapiens
  misc_feature (2955)..(2955): n is a, c, g, or t
  misc_feature (3038)..(3038): n is a, c, g, or t
gctggccaaagaagttcgtcccctttgtgaggcccgggatgggagctctgtcttcccaggattctccccatttccaagagaagagcacagaagagggagaagtggctgctctgcgcctcacggccagatcccaggaaacagtgacattcaaggatgtggccatggactttacaccagaggagtgggggaagctggatcctgcacaaagggatgtgatgctggagaactataggaacctagtctcactttggcttccagtttccaaacctgagagctacaacttggagaatggaaaagaaccattgaagcttgagagaaaagcccccaaaagcagctattcagacatggagactagaccacagagcaaggattcaacttcagtgcaagatttttccaaagcagaatcatgcaaagttgcaataatagacagactgacacggaatagtgtctatgactctaacttggaagcagcccttgaatgtgaaaattggttagagaatcagcaaggaaatcaggagagacatttgagagaaatgttcactcacatgaattcactctctgaggaaacagaccataagcatgatgtatactggaaaagcttcaatcagaaatctgtccttatcactgaagacagagttcccaaaggatcttatgccttccatacacttgaaaaaagcttgaaacaaaaatcaaacttaatgaaaaagcagagaacttataaagagaaaaaacctcataaatgtaatgattgtggtgaactcttcacctaccattcagtgcttattcgacaccagagagtccatactggagagaaaccctatacctgcaatgaatgtgggaaatcttttagccacagagctaatttaactaaacaccagagaactcatactagaattctctttgaatgcagtgaatgcaagaaaaccttcacagaaagctcatcccttgcaacacatcagagaattcacgttggagagagaccttatgaatgcaatgaatgtgggaaaggttttaatcgaagtacacatcttgtgcagcatcagttgattcatactggagtgaagccttatgaatgtaatgaatgtgataaagcttttattcattcatcagcactcattaaacatcaaagaactcatactggagagaaaccttataaatgtcaagaatgtgggaaagcctttagccattgctcatccctaactaagcatcagagagttcatactggagaaaagccatatgaatgcagtgaatgtggaaaaacttttagtcagagcacacatcttgttcaacatcagagaattcacactggagagaaaccctatgagtgtaatgaatgtgggaaaaccttcagccggagctccaattttgctaaacatcaaagaattcatattggaaagaaaccgtacaaatgtagcgagtgtggaaaagccttcattcattcatcagctctcattcaacatcagagaactcataccggagagaaaccctttagatgtaatgagtgtgggaaaagctttaagtgcagttcatctctcatcagacatcaaagagttcacactgaagagcaaccctgaaaaattactgaatgtgaagaaataaaactgattatattcctggtccctgaacgatcctatagagacatccagtccctgactccacctgcctccaggtgcccagaacagcccatcgtggggacttcaccctcagcaagtggacgccgtttgtcctgccagggcagggacaccgagctggggcagcagtggacttggggcatgagcaggttgatgtcagaaaatacaccaataacctcgggattgtgcatgagatggagctgccccgcgtcagtgccctggaggtgaaggtaagagcctgtgcctgctgcgtgggaggctgcttcagggactgggaatcgggtggtcggtaaggcagagggggtggcctgtgggcctgtgtggtggtgagtgggccacggctgtcactgggaggggtggcctttcctgctggactctgttcccatgaggacttgaccaaaacccaaaccaagaactgcagtcctggctcagagtccactgcctgtttgaaccaagaccccagctgaaggctggacctgaccaaaacttggggcatttatggcctgaggatggcatgtcatggcatcaccattccagactaccagctccagttccttcagagggtctcagcccctggggcctgccctttcctggcttcttcaagttgggtcccttcagggccccaaagccctggacccagcatccacgggccactgtcagacgcctggcagctccgctaactccatcatggctcatttgacagcaaagacgcaaggaaagtaaacgtaccaacaagtggcaaaagatgcttgcagactggacaaaatataggagcaccaagaaggtaacatggggaggaagtggcccgcgtgactgctctctgcagagccaggagacaggcacccatggttgtgacctggcaccgtctgcctctcagtgggtgggtggtaccccatccttgccataggactgcaggcctgttcgccagctttgctctgcggggtcgccccatgtcctttctcactggagtgttcttctgtctgtagctgtctcaaagagtatacaaagtcattcccctggcggtacggggccgggcgtggtcacttttgctagatattgacagaatcaagtcccagaacccaggcaaatataaggtcatgaaggagaagggcaagaggtcctccagaatcatccactgcatccagctagatgtcagccacaccctgcagaaacacatgatgttcatacaaagattcggagtcaagcagcaggaattatgtgacatcctcgtggcctattctgcatataaccctgaggtgggctaccacagggacctgagccgcatcactgccatcctcctcctgtgtctgccagaggaagatgntttctgggcgcttacccagttgctcgctggtgagaggcactccctgtggtattctacagcccaaatactgcctggctcgagangctcctatcgcaccaggagcaggtgctgcacaagtccttcccaaagatcatgagacacctgggcaaggaagggctgtgcattgagggttccatgctgacgaggctcctccggtgtttccttgatgggaaatccttcgggctcaccctgagactgtgggatgtgttcatcttggagggcgcgcgggtactgacagccatggtgcatgcatcattcaaaatacacaggaagcacctcatgaagctttcctggagcactgtctgggagtttcaggagcgactctctcagagctgggccctggaggacaacgcggtcctcaggaaccttcaaacctctatgaaggaactcacaaaaaaacactgggacctgccacccccagggagcttgctacaaaatgcacattgctataccatagcctggggcttgcaatccaaggctggcaaggattcctgcacgtcaagggcctcaggtgactttcatgcacacccaagtcagaaggctctcctgaatcctggatgtcaccttcctgcccaaaaaaggaggaacgagggtcaaccagcagcagaccagtcacaaaaagagatgaaatgtgagtgcatggccttcctgacacccagacaaaactttgggcacaaagccaggctgcagctctggccactgacttggaccagggatgcccccatgcaggccggtgtgccctggctgctcttgacaccctctggctcctgacaccctctcttcggctgcctgcgttaggaagggagaacctgccagttttcagaagaaaatgtagctttattataacataggaaagactgcaagttattacgggaggaggaggaggcctgaaacagctcctgaaaatgagagggaaaaggaaggtgtaaatatgttggtaataaaatctccaaccacaaaatagtcatgggaatgtt

SEQ ID NO: 356190 - DNA, 4176 bp, Homo sapiens
  misc_feature (2651)..(2651): n is a, c, g, or t
aaactcctgatgccccagcgtcacctcttccaggtgcccggttcccccagggacagcttcaagcggtagggacagacatctgaggacccagcctcagggatgctgtccccgggcttccaggctccagcgccgtaggactgaggcagactccacggtgagaaagagacccgatctaacccaggcctttcatcagagcccaggagggaaggcaggaagtgggaccacgaggcccggggggcttctaactcgtctggccagggagatctgaattggggtgaagagcagaatctccagaacaaggaggaggtggtgatcatggagacagatttggctgaaatgcctgagaaaggagctctgtcttcccaggattctccccatttccaagagaagagcacagaagagggagaagtggctgctctgcgcctcacggccagatcccaggaaacagtgacattcaaggatgtggccatggactttacaccagaggagtgggggaagctggatcctgcacaaagggatgtgatgctggagaactataggaacctagtctcactttggcttccagtttccaaacctgagagctacaacttggagaatggaaaagaaccattgaagcttgagagaaaagcccccaaaagcagctattcagacatggagactagaccacagagcaaggattcaacttcagtgcaagatttttccaaagcagaatcatgcaaagttgcaataatagacagactgacacggaatagtgtctatgactctaacttggaagcagcccttgaatgtgaaaattggttagagaatcagcaaggaaatcaggagagacatttgagagaaatgttcactcacatgaattcactctctgaggaaacagaccataagcatgatgtatactggaaaagcttcaatcagaaatctgtccttatcactgaagacagagttcccaaaggatcttatgccttccatacacttgaaaaaagcttgaaacaaaaatcaaacttaatgaaaaagcagagaacttataaagagaaaaaacctcataaatgtaatgattgtggtgaactcttcacctaccattcagtgcttattcgacaccagagagtccatactggagagaaaccctatacctgcaatgaatgtgggaaatcttttagccacagagctaatttaactaaacaccagagaactcatactagaattctctttgaatgcagtgaatgcaagaaaaccttcacagaaagctcatcccttgcaacacatcagagaattcacgttggagagagaccttatgaatgcaatgaatgtgggaaaggttttaatcgaagtacacatcttgtgcagcatcagttgattcatactggagtgaagccttatgaatgtaatgaatgtgataaagcttttattcattcatcagcactcattaaacatcaaagaactcatactggagagaaaccttataaatgtcaagaatgtgggaaagcctttagccattgctcatccctaactaagcatcagagagttcatactggagaaaagccatatgaatgcagtgaatgtggaaaaacttttagtcagagcacacatcttgttcaacatcagagaattcacactggagagaaaccctatgagtgtaatgaatgtgggaaaaccttcagccggagctccaattttgctaaacatcaaagaattcatattggaaagaaaccgtacaaatgtagcgagtgtggaaaagccttcattcattcatcagctctcattcaacatcagagaactcataccggagagaaaccctttagatgtaatgagtgtgggaaaagctttaagtgcagttcatctctcatcagacatcaaagagttcacactgaagagcaaccctgaaaaattactgaatgtgaagaaatgtaagttggttttatcactgtattaaatacttgagtgtttaggtggaaggcgcatccataatatgcatgtgaggaccaattctgtatgcatctaatttcatttgcgtaatacatagttttgagccataagcaggttctttatgtccgttaatttgataattatgaaatctagccagcgatttcaaaattttaatctccaacgtcccaaatagctatctgtggaaattcaagaagtccctgagagtaggtagcagtacgaacattgtgaaatccagttttcccctctcttgtttatgtcagagctttgttgtaagcctctcactttgtaaggaaattcttattgggtaggttaggctgagggcttacatccttatcatcaggaagacacaatgttgttatttattactccttgagatctagatacacatatggtataattcatctagagtgtaatttcttttatattagccttaaaaaccaaaaatgctgggttcaaagtccttagaattcccttcctccctcaacaagctgctgtctatgttgatgaccataactgggatgtataatatttacagacaactctaagttacgttcacatggattatgtacatcattgattttttttttttttttttttttgagacagagtcttgctctgttgcccgggctggagtgcagtggcgcgatctcggctcactgcaacctccacctcccaggttcatgccattctcttgtctcagcctcccnagtagctgggactacaggcacctgccagtacgcctggctaattttttttgtatttttagtagagatggggtttcaccatgttagccaggatggtcttgatctcctgacctcgtgatctgcctgcctcggcctcccaaagtgctgggattacaggcatgagccaccatgcctggcatcattattgatttatgtcattgttatccctctaccgcagagaccttctttcactttccatttccctgggagttcacgtgaagtagtgaatgggtcaaaatcttaacagtggttgttgatcaagtccctcctttcttatccttggcactgaataaatctttggttttccataatcaaagggtgagggagacttcttttgtctacattattcagctttctgtaagctatgctgtgtccatttgagaaaaagccccagggatattgaaggtctgagaagttgggtggttcagtgtgttattatatttagggtcccagtaaagaagaactgaagcaactgtgagacaccagggcatacttccctgtatgagtggaaaacaaggcacggaaaatagctcacaggatagtcctcaactgacttgcttgaggataagcagcttcccttcgtgaagaagttgccatttctctggccttcatatttatctactttttgttattgttgtctgtatcggttcaatctcacactgctataaagaaatgcctgagactgggtaacttataaagaaaaaaggtttaattggctcatggttccatgggctgtacaggaagtatgactggggaggtctcagggagcttttactcatggcaaaaggcaaagccagagcaggtatcttcacagggctagagcaagaggaaaagagagaggggaggtgctacacactttttatgcaaccaaatctcatgagaactctatcacgagacagcagtagggggacagtgctaaatcattcatgagaaactacctgcgtggtccagtcaccttgcaccaggccccacctcccacattggggattacaattaaacatgagatttgggtggggatacagatctaaactgtatcattactcaaaaaaaaaaaaaaaaagaaagaaaagaaaaaaaaaaaagggggggggggtaaaaattttcccgggggggccaattaaagggttacccggttttttggaaaagggggccctaaaaggagggggtttaaaaaagagggaggggcgggttaaaagggggggggggacaccccgccgtggggacttctgggggaggaaacctgacttgcggcgggcgcgactgcggccgcactcaccgaggattaagattcggggaataaaacttcggggtgagggcaaccccacgcatagcgcggcggaatggctcggatgtattgaaaatgacgggggcgagcaaataaaaacaggagcaagaagaactaaaacaaacaagatcgacagaaatgcaccactgggcacacatcactgaaacgaggcaaaaacgagcaacaagaaatgtaagcacaaca

SEQ ID NO: 356191 - DNA, 3658 bp, Homo sapiens
  misc_feature (2651)..(2651): n is a, c, g, or t
aaactcctgatgccccagcgtcacctcttccaggtgcccggttcccccagggacagcttcaagcggtagggacagacatctgaggacccagcctcagggatgctgtccccgggcttccaggctccagcgccgtaggactgaggcagactccacggtgagaaagagacccgatctaacccaggcctttcatcagagcccaggagggaaggcaggaagtgggaccacgaggcccggggggcttctaactcgtctggccagggagatctgaattggggtgaagagcagaatctccagaacaaggaggaggtggtgatcatggagacagatttggctgaaatgcctgagaaaggagctctgtcttcccaggattctccccatttccaagagaagagcacagaagagggagaagtggctgctctgcgcctcacggccagatcccaggaaacagtgacattcaaggatgtggccatggactttacaccagaggagtgggggaagctggatcctgcacaaagggatgtgatgctggagaactataggaacctagtctcactttggcttccagtttccaaacctgagagctacaacttggagaatggaaaagaaccattgaagcttgagagaaaagcccccaaaagcagctattcagacatggagactagaccacagagcaaggattcaacttcagtgcaagatttttccaaagcagaatcatgcaaagttgcaataatagacagactgacacggaatagtgtctatgactctaacttggaagcagcccttgaatgtgaaaattggttagagaatcagcaaggaaatcaggagagacatttgagagaaatgttcactcacatgaattcactctctgaggaaacagaccataagcatgatgtatactggaaaagcttcaatcagaaatctgtccttatcactgaagacagagttcccaaaggatcttatgccttccatacacttgaaaaaagcttgaaacaaaaatcaaacttaatgaaaaagcagagaacttataaagagaaaaaacctcataaatgtaatgattgtggtgaactcttcacctaccattcagtgcttattcgacaccagagagtccatactggagagaaaccctatacctgcaatgaatgtgggaaatcttttagccacagagctaatttaactaaacaccagagaactcatactagaattctctttgaatgcagtgaatgcaagaaaaccttcacagaaagctcatcccttgcaacacatcagagaattcacgttggagagagaccttatgaatgcaatgaatgtgggaaaggttttaatcgaagtacacatcttgtgcagcatcagttgattcatactggagtgaagccttatgaatgtaatgaatgtgataaagcttttattcattcatcagcactcattaaacatcaaagaactcatactggagagaaaccttataaatgtcaagaatgtgggaaagcctttagccattgctcatccctaactaagcatcagagagttcatactggagaaaagccatatgaatgcagtgaatgtggaaaaacttttagtcagagcacacatcttgttcaacatcagagaattcacactggagagaaaccctatgagtgtaatgaatgtgggaaaaccttcagccggagctccaattttgctaaacatcaaagaattcatattggaaagaaaccgtacaaatgtagcgagtgtggaaaagccttcattcattcatcagctctcattcaacatcagagaactcataccggagagaaaccctttagatgtaatgagtgtgggaaaagctttaagtgcagttcatctctcatcagacatcaaagagttcacactgaagagcaaccctgaaaaattactgaatgtgaagaaatgtaagttggttttatcactgtattaaatacttgagtgtttaggtggaaggcgcatccataatatgcatgtgaggaccaattctgtatgcatctaatttcatttgcgtaatacatagttttgagccataagcaggttctttatgtccgttaatttgataattatgaaatctagccagcgatttcaaaattttaatctccaacgtcccaaatagctatctgtggaaattcaagaagtccctgagagtaggtagcagtacgaacattgtgaaatccagttttcccctctcttgtttatgtcagagctttgttgtaagcctctcactttgtaaggaaattcttattgggtaggttaggctgagggcttacatccttatcatcaggaagacacaatgttgttatttattactccttgagatctagatacacatatggtataattcatctagagtgtaatttcttttatattagccttaaaaaccaaaaatgctgggttcaaagtccttagaattcccttcctccctcaacaagctgctgtctatgttgatgaccataactgggatgtataatatttacagacaactctaagttacgttcacatggattatgtacatcattgattttttttttttttttttttttgagacagagtcttgctctgttgcccgggctggagtgcagtggcgcgatctcggctcactgcaacctccacctcccaggttcatgccattctcttgtctcagcctcccnagtagctgggactacaggcacctgccagtacgcctggctaattttttttgtatttttagtagagatggggtttcaccatgttagccaggatggtcttgatctcctgacctcgtgatctgcctgcctcggcctcccaaagtgctgggattacaggcatgagccaccatgcctggcatcattattgatttatgtcattgttatccctctaccgcagagaccttctttcactttccatttccctgggagttcacgtgaagtagtgaatgggtcaaaatcttaacagtggttgttgatcaagtccctcctttcttatccttggcactgaataaatctttggttttccataatcaaagggtgagggagacttcttttgtctacattattcagctttctgtaagctatgctgtgtccatttgagaaaaagccccagggatattgaaggtctgagaagttgggtggttcagtgtgttattatatttagggtcccagtaaagaagaactgaagcaactgtgagacaccagggcatacttccctgtatgagtggaaaacaaggcacggaaaatagctcacaggatagtcctcaactgacttgcttgaggataagcagcttcccttcgtgaagaagttgccatttctctggccttcatatttatctactttttgttattgttgtctgtatcggttcaatctcacactgctataaagaaatgcctgagactgggtaacttataaagaaaaaaggtttaattggctcatggttccatgggctgtacaggaagtatgactggggaggtctcagggagcttttactcatggcaaaaggcaaagccagagcaggtatcttcacagggctagagcaagaggaaaagagagaggggaggtgctacacactttttatgcaaccaaatctcatgagaactctatcacgagacagcagtagggggacagtgctaaatcattcatgagaaactacctgccctgcgaaactatgagggtaccgagctcg

SEQ ID NO: 356192 - DNA, 3076 bp, Homo sapiens
gctggccaaagaagttcgtcccctttgtgaggcccgggatgggaggtgcccggttcccccagggacagcttcaagcggtagggacagacatctgaggacccagcctcagggatgctgtccccgggcttccaggctccagcgccgtaggactgaggcagactccacggtgagaaagagacccgatctaacccaggcctttcatcagagcccaggagggaaggcaggaagtgggaccacgaggcccggggggcttctaactcgtctggccagggagatctgaattggggtgaagagcagaatctccagaacaaggaggaggtggtgatcatggagacagatttggctgaaatgcctgagaaaggagctctgtcttcccaggattctccccatttccaagagaagagcacagaagagggagaagtggctgctctgcgcctcacggccagatcccaggaaacagtgacattcaaggatgtggccatggactttacaccagaggagtgggggaagctggatcctgcacaaagggatgtgatgctggagaactataggaacctagtctcactttggcttccagtttccaaacctgagagctacaacttggagaatggaaaagaaccattgaagcttgagagaaaagcccccaaaagcagctattcagacatggagactagaccacagagcaaggattcaacttcagtgcaagatttttccaaagcagaatcatgcaaagttgcaataatagacagactgacacggaatagtgtctatgactctaacttggaagcagcccttgaatgtgaaaattggttagagaatcagcaaggaaatcaggagagacatttgagagaaatgttcactcacatgaattcactctctgaggaaacagaccataagcatgatgtatactggaaaagcttcaatcagaaatctgtccttatcactgaagacagagttcccaaaggatcttatgccttccatacacttgaaaaaagcttgaaacaaaaatcaaacttaatgaaaaagcagagaacttataaagagaaaaaacctcataaatgtaatgattgtggtgaactcttcacctaccattcagtgcttattcgacaccagagagtccatactggagagaaaccctatacctgcaatgaatgtgggaaatcttttagccacagagctaatttaactaaacaccagagaactcatactagaattctctttgaatgcagtgaatgcaagaaaaccttcacagaaagctcatcccttgcaacacatcagagaattcacgttggagagagaccttatgaatgcaatgaatgtgggaaaggttttaatcgaagtacacatcttgtgcagcatcagttgattcatactggagtgaagccttatgaatgtaatgaatgtgataaagcttttattcattcatcagcactcattaaacatcaaagaactcatactggagagaaaccttataaatgtcaagaatgtgggaaagcctttagccattgctcatccctaactaagcatcagagagttcatactggagaaaagccatatgaatgcagtgaatgtggaaaaacttttagtcagagcacacatcttgttcaacatcagagaattcacactggagagaaaccctatgagtgtaatgaatgtgggaaaaccttcagccggagctccaattttgctaaacatcaaagaattcatattggaaagaaaccgtacaaatgtagcgagtgtggaaaagccttcattcattcatcagctctcattcaacatcagagaactcataccggagagaaaccctttagatgtaatgagtgtgggaaaagctttaagtgcagttcatctctcatcagacatcaaagagttcacactgaagagcaaccctgaaaaattactgaatgtgaagaaataaaactgattatattcctggtccctgaacgatcctatagagacatccagtccctgactccacctgcctccaggtgcccagaacagcccatcgtggggacttcaccctcagcaagtggacgccgtttgtcctgccagggcagggacaccgagctggggcagcagtggacttggggcatgagcaggttgatgtcagaaaatacaccaataacctcgggattgtgcatgagatggagctgccccgcgtcagtgccctggaggtgaaggtaagagcctgtgcctgctgcgtgggaggctgcttcagggactgggaatcgggtggtcggtaaggcagagggggtggcctgtgggcctgtgtggtggtgagtgggccacggctgtcactgggaggggtggcctttcctgctggactctgttcccatgaggacttgaccaaaacccaaaccaagaactgcagtcctggctcagagtccactgcctgtttgaaccaagaccccagctgaaggctggacctgaccaaaacttggggcatttatggcctgaggatggcatgtcatggcatcaccattccagactaccagctccagttccttcagagggtctcagcccctggggcctgccctttcctggcttcttcaagttgggtcccttcagggccccaaagccctggacccagcatccacgggccactgtcagacgcctggcagctccgctaactccatcatggctcatttgacagcaaagacgcaaggaaagtaaacgtaccaacaagtggcaaaagatgcttgcagactggacaaaatataggagcaccaagaagctgtctcaaagagtatacaaagtcattcccctggcggtacggggccgggcgtggtcacttttgctagatattgacagaatcaagtcccagaacccaggcaaatataaggtaagtccctcccacactcagctaggagtacaaacaagctagactgtatcaggagcccaggactccagctggagggaacgttgagcctgggttgggagtgggggctgtggtcagacgcacatcctgggcatagatggtaactcaggcaccacaggtgcgctgggctctgctgaccctccctggtgtcagaaacaaggtaaaaaggagctttctgcagaaggaaaccttccttcc

SEQ ID NO: 356193 - DNA, 2583 bp, Homo sapiens
  misc_feature (1567)..(1567): n is a, c, g, or t
  misc_feature (1650)..(1650): n is a, c, g, or t
tgctgagcactcgcccacctgtccactagcgggtctctatgtctggagctcttagagataagacatagaggtgtctggttctgagaaaaggaagtttgctaagtgagagacacaactgactcaactgactcagaaaactgattatattcctggtccctgaacgatcctatagagacatccagtccctgactccacctgcctccaggtgcccagaacagcccatcgtggggacttcaccctcagcaagtggacgccgtttgtcctgccagggcaggatggagatggatggggacccgtataacctgcctgcccaggggcaaggcaatatcatcattactaagtatgagcagggacaccgagctggggcagcagtggacttggggcatgagcaggttgatgtcagaaaatacaccaataacctcgggattgtgcatgagatggagctgccccgcgtcagtgccctggaggtgaaggtaagagcctgtgcctgctgcgtgggaggctgcttcagggactgggaatcgggtggtcggtaaggcagagggggtggcctgtgggcctgtgtggtggtgagtgggccacggctgtcactgggaggggtggcctttcctgctggactctgttcccatgaggacttgaccaaaacccaaaccaagaactgcagtcctggctcagagtccactgcctgtttgaaccaagaccccagctgaaggctggacctgaccaaaacttggggcatttatggcctgaggatggcatgtcatggcatcaccattccagactaccagctccagttccttcagagggtctcagcccctggggcctgccctttcctggcttcttcaagttgggtcccttcagggccccaaagccctggacccagcatccacgggccactgtcagacgcctggcagctccgctaactccatcatggctcatttgacagcaaagacgcaaggaaagtaaacgtaccaacaagtggcaaaagatgcttgcagactggacaaaatataggagcaccaagaaggtaacatggggaggaagtggcccgcgtgactgctctctgcagagccaggagacaggcacccatggttgtgacctggcaccgtctgcctctcagtgggtgggtggtaccccatccttgccataggactgcaggcctgttcgccagctttgctctgcggggtcgccccatgtcctttctcactggagtgttcttctgtctgtagctgtctcaaagagtatacaaagtcattcccctggcggtacggggccgggcgtggtcacttttgctagatattgacagaatcaagtcccagaacccaggcaaatataaggtcatgaaggagaagggcaagaggtcctccagaatcatccactgcatccagctagatgtcagccacaccctgcagaaacacatgatgttcatacaaagattcggagtcaagcagcaggaattatgtgacatcctcgtggcctattctgcatataaccctgaggtgggctaccacagggacctgagccgcatcactgccatcctcctcctgtgtctgccagaggaagatgntttctgggcgcttacccagttgctcgctggtgagaggcactccctgtggtattctacagcccaaatactgcctggctcgagangctcctatcgcaccaggagcaggtgctgcacaagtccttcccaaagatcatgagacacctgggcaaggaagggctgtgcattgagggttccatgctgacgaggctcctccggtgtttccttgatgggaaatccttcgggctcaccctgagactgtgggatgtgttcatcttggagggcgcgcgggtactgacagccatggtgcatgcatcattcaaaatacacaggaagcacctcatgaagctttcctggagcactgtctgggagtttcaggagcgactctctcagagctgggccctggaggacaacgcggtcctcaggaaccttcaaacctctatgaaggaactcacaaaaaaacactgggacctgccacccccagggagcttgctacaaaatgcacattgctataccatagcctggggcttgcaatccaaggctggcaaggattcctgcacgtcaagggcctcaggtgactttcatgcacacccaagtcagaaggctctcctgaatcctggatgtcaccttcctgcccaaaaaaggaggaacgagggtcaaccagcagcagaccagtcacaaaaagagatgaaatgtgagtgcatggccttcctgacacccagacaaaactttgggcacaaagccaggctgcagctctggccactgacttggaccagggatgcccccatgcaggccggtgtgccctggctgctcttgacaccctctggctcctgacaccctctcttcggctgcctgcgttaggaagggagaacctgccagttttcagaagaaaatgtagctttattataacataggaaagactgcaagttattacgggaggaggaggaggcctgaaacagctcctgaaaatgagagggaaaaggaaggtgtaaatatgttggtaataaaatctccaaccacaaaatagtcatgggaatgtt

SEQ ID NO: 356194 - DNA, 463 bp, Homo sapiens
gaagccaccatgcctggcacatttatgatttttaagctttctaaaaacttttgtagaattctgtttataaactatattagtccattctcaagctgctatgaagaaatacccaagactgggtaatttataaggaaaaagaggtttaatggactcacagttccacatagctggggaggcctcaataatggcagaaggcaaaggaggagcaaaggcacatcttacatagtggcagcaggcaagagagcatgtgtaggggaattgccctttataaaaccatcagatctcatgagacttagtcactatcatgagaacagcacaggaaaacccgcccccatcattcagttacctcccaccggttcccctcccatgacatgaggggattatgggagctataattcaagataagatttgggtggagacagagccaaaccatatcactatatgttactcaaaagctcagtag

SEQ ID NO: 356195 - DNA, 1514 bp, Homo sapiens
ctggccctggcccgccgaggcccggacagccccgcaggccatgaccgcaaccctcgggtcccgaggcgccgctccaggcgggagcgccaactcccacggcccttccgacccccgcgtcccattgttccgaatctcactcacctcggaggatgccggcgcaggcctggctggggcgctcgccgcgagctcccggcagcccagaaagctaggtcggtgtcggcaggatccgcgaaggcgtacccggcgacttctccgcctaccctccgaagcgggagcaggcgggggcgcttcaccctcctcgcgagacagcggagaccccagcggcggctgcgacccctgtgacgcaaagggctcatcaccaatggcagctcggaagcagggcagagagcgagacccaccccccagctcccgcgcatcaaaacacaacacccgccttcctcacgcatgcgcagcagatggacgccggcctcgggggcggggctcagcgcaccggcccaaatgcggcccctcccccgccgctccagaccccggaggagggcagcgcgaccctccccatcttgttactggtactcagccactggggacactgactgaatgttcgcccctaacttacccggaaaacacgagaactagttcgatgtcgtttcaaccttaccaaactctgcggaaacttaggaaattatctttagtgtctagataggggaattgttagatggacttgaagtctctcacctcctgttgtacgcctcccggaagcaacaccaggagtccaacgggatcccaaaccagagcccaaccagtatcctataaagtcttcagagagggatcccctccaggctggggagaaacaggacaacctaacaaaacagggcctggactcctccctaaacagaccacgtttttctccgctcttccccttcccactccctgaaatctagactaaaactcttttaagataactgcgaggtataaagaacgtctagagcctaagcggcccgttgccagattctactcctcaggcctcaaatgtgagcgccccaaacattctagagctgaacctggcgggcaaggcccccgatcacgtgataccgccccccaactccgggcggaagaggccagcgacagcgctgcacgaagcgagtgggcgggcgctcgtgcccggctaaaagatggctgctggcgcctggcagccaccgcctgggaggttactgtaaggcccgcagctcccgccagctcccgcggactgctgccgcctccttaccatgaagccagtaagtcgtcgcacgctggactggatttattcagtgttgctgcttgccatcgttttaatctcctggggctgcatcatctatgcttcgatggtgtctgcaagacgacagctaaggaagaaatacccagacaaaatctttgggacgaatgaaaatttgtaactcttctggatttaattatctgaaaatacagttctttccctcatgcttatgtagatataaaaataaaattcataatgcaaagtt

SEQ ID NO: 356196 - DNA, 1927 bp, Homo sapiens
ctggccctggcccgccgaggcccggacagccccgcaggccatgaccgcaaccctcgggtcccgaggcgccgctccaggcgggagcgccaactcccacggcccttccgacccccgcgtcccattgttccgaatctcactcacctcggaggatgccggcgcaggcctggctggggcgctcgccgcgagctcccggcagcccagaaagctaggtcggtgtcggcaggatccgcgaaggcgtacccggcgacttctccgcctaccctccgaagcgggagcaggcgggggcgcttcaccctcctcgcgagacagcggagaccccagcggcggctgcgacccctgtgacgcaaagggctcatcaccaatggcagctcggaagcagggcagagagcgagacccaccccccagctcccgcgcatcaaaacacaacacccgccttcctcacgcatgcgcagcagatggacgccggcctcgggggcggggctcagcgcaccggcccaaatgcggcccctcccccgccgctccagaccccggaggagggcagcgcgaccctccccatcttgttactggtactcagccactggggacactgactgaatgttcgcccctaacttacccggaaaacacgagaactagttcgatgtcgtttcaaccttaccaaactctgcggaaacttaggaaattatctttagtgtctagataggggaattgttagatggacttgaagtctctcacctcctgttgtacgcctcccggaagcaacaccaggagtccaacgggatcccaaaccagagcccaaccagtatcctataaagtcttcagagagggatcccctccaggctggggagaaacaggacaacctaacaaaacagggcctggactcctccctaaacagaccacgtttttctccgctcttccccttcccactccctgaaatctagactaaaactcttttaagataactgcgaggtataaagaacgtctagagcctaagcggcccgttgccagattctactcctcaggcctcaaatgtgagcgccccaaacattctagagctgaacctggcgggcaaggcccccgatcacgtgataccgccccccaactccgggcggaagaggccagcgacagcgctgcacgaagcgagtgggcgggcgctcgtgcccggctaaaagatggctgctggcgcctggcagccaccgcctgggaggttactgtaaggcccgcagctcccgccagctcccgcggactgctgccgcctccttaccatgaagccagtaagtcgtcgcacgctggactggatttattcagtggttccaggtccagaagaggagcctgctctccctgttactgtaggggttgatggagtatcttgacaagcagccgtccatgtcgaagggaccctggcaggagaactagccttccggtgtgcagagacggctgccacccttggctcctctgttgtatagctgccgtcgtactgcacagactggagcttctggcacatggagcggaggacccgcaggaattcctcctgagcctctgcacccaccatggaggagcaggagctcacctctctcaggtaactccggatccggctttcacagctgtatctcagatagccagacttattccaaaatcgggactccaagccttcaaaccacagcgggtcctcagcccgggtgtcggctgcgacgttctggctgacgttgtacaggaggtcggccagcagtctctgcctctgtgggggcctgctcatcacacagtagctgccgggcggcctggatgagccacgcgtgcggctggcgaaaagcactgaggaagcacccgatgtcactcacatagccctgccaggcctggcgtgaggtgagcagcaccagctcggcatcgtcgaggacgcttcggtcagctccatgccatcctcgtacgaggg

SEQ ID NO: 356197 - DNA, 488 bp, Homo sapiens
caaacacttgttgcttgactgatacattatggcgggcgggcaaggcccccgatcacgtgataccgccccccaactccgggcggaagaggccagcgacagcgctgcacgaagcgagtgggcgggcgctcgtgcccggctaaaagatggctgctggcgcctggcagccaccgcctgggaggttactgtaaggcccgcagctcccgccagctcccgcggactgctgccgcctccttaccatgaagccagtaagtcgtcgcacgctggactggatttattcagtgttgctgcttgccatcgttttaatctcctggggctgcatcatctatgcttcgatggtgtctgcaagacgacagctaaggaagaaatacccagacaaaatctttgggacgaatgaaaatttgtaactcttctggatttaattatctgaaaatacagttctttccctcatgcttatgtagatataaaaataaaattcataatgcaaagtt

SEQ ID NO: 356198 - DNA, 1835 bp, Homo sapiens
ctggccctggcccgccgaggcccggacagccccgcaggccatgaccgcaaccctcgggtcccgaggcgccgctccaggcgggagcgccaactcccacggcccttccgacccccgcgtcccattgttccgaatctcactcacctcggaggatgccggcgcaggcctggctggggcgctcgccgcgagctcccggcagcccagaaagctaggtcggtgtcggcaggatccgcgaaggcgtacccggcgacttctccgcctaccctccgaagcgggagcaggcgggggcgcttcaccctcctcgcgagacagcggagaccccagcggcggctgcgacccctgtgacgcaaagggctcatcaccaatggcagctcggaagcagggcagagagcgagacccaccccccagctcccgcgcatcaaaacacaacacccgccttcctcacgcatgcgcagcagatggacgccggcctcgggggcggggctcagcgcaccggcccaaatgcggcccctcccccgccgctccagaccccggaggagggcagcgcgaccctccccatcttgttactggtactcagccactggggacactgactgaatgttcgcccctaacttacccggaaaacacgagaactagttcgatgtcgtttcaaccttaccaaactctgcggaaacttaggaaattatctttagtgtctagataggggaattgttagatggacttgaagtctctcacctcctgttgtacgcctcccggaagcaacaccaggagtccaacgggatcccaaaccagagcccaaccagtatcctataaagtcttcagagagggatcccctccaggctggggagaaacaggacaacctaacaaaacagggcctggactcctccctaaacagaccacgtttttctccgctcttccccttcccactccctgaaatctagactaaaactcttttaagataactgcgaggtataaagaacgtctagagcctaagcggcccgttgccagattctactcctcaggcctcaaatgtgagcgccccaaacattctagagctgaacctggcgggcaaggcccccgatcacgtgataccgccccccaactccgggcggaagaggccagcgacagcgctgcacgaagcgagtgggcgggcgctcgtgcccggctaaaagatggctgctggcgcctggcagccaccgcctgggaggttactgtaaggcccgcagctcccgccagctcccgcggactgctgccgcctccttaccatgaagccagtaagtcgtcgcacgctggactggatttattcagtggtaagtcccggggatcgcgggcccccaccgtgtcgactcactgggcccgcaggcggaaaggccctatttcttcagcacccagaaactccaaaatccattcctgaattaagcatttcactccctcacctcgactccgcctcttcctggaggatacgatcttccgcttcttacgtaagggctgctgggtgtacccgccactggaaccccatttattcgactttgttactttaattcccaccttagcaatggcaacggtaacctgacgggggcgaggggaaatatcaggtagatttcacacctcctttgcgatttttggtttagttgctgcttgccatcgttttaatctcctggggctgcatcatctatgcttcgatggtgtctgcaagacgacagctaaggaagaaatacccagacaaaatctttgggacgaatgaaaatttgtaactcttctggatttaattatctgaaaatacagttctttccctcatgcttatgtagatataaaaataaaattcataatgcaaagtt

SEQ ID NO: 356199 - DNA, 1840 bp, Homo sapiens
gaatcttagctgattgcattatgaactgtcaaactgtgaagatgacccatatgtaaacagttataacagctacagattattgctagtagcattctatacaattccatattaatgttcttaggagctaatatttgataaaggggaaagctagttaaaaactaattaatttgtcaaatgtagcattcttattatgagtgtaatatctcatggagatttaaatatgaacgaaaggacttatccttctgctttttaaaagccccagcattactagatagtgtttttcttgaaggccaaagctgtaaaatgacaaagttggtgattttcagcagcactcacctgagctgtgagcgcctgcacctgttcggtagaacccactagaatcacttctctgtaggataagtgatgcctttgaatccagcagcataaaaatctgttctttttagtcatcaagtttttgtttccaggatatttctagcattgcaaaaaaaaatttcttcaccaaacactaattcctaaacacccatccaaaccacaaaaattctcttgttagtaggcgagagtgctaggacttcctgtgttcacctcccatgcacccagcattgtcttttatgcatgagatattccattagattttcctagagtggccaggacacccttcatagtaagttatatctcttaactggattctatagttttatcctcgagcaacttggaaaagctaagacatcctccacccacactggtatctacgcgcctggaagctgcaccttctctcattgctgtgctctgctttaaggaaaacctgatatgacagaatcaagactattaaaagataaatgaggggaaatcttcatttaagaaagttgccttgctccccaagagtgcctttaattgctattcccctaggcatctgggtgcatatcattaatgaaatcattaacctttgtctctggtccttcctttctaaaaacagcagattatagaaggtggtctggcaaagggattttcaaagggcaaaagtctcatcatcatctttccactcaaaatcctattattctacatttcactttgcaggggtcctagggacaggattgcagggacaggggacatgggaggaagacagaaaaattcaaaaccagcagatgccactacctggcaatgaattgaaaattaggggaaagcatctttggcgtgaccttttattaagacaacagaaatttagaacattttacatgcttctttgttaaatggtgaagcaagggaatgaaagtatttatttttagagctcatagttaactccatcaagacatggctacccacccctccagttatgaacttgtattacagctccacttggtgacttcctttctgtgtatcaggagcagagcagaggacaacttgtagaagacatgaccattaagagacatcaacttcgcaacaaatataagacaaggatacaaggattcctatgtgatgcagctaggtttttatatccttctaacaaatggtgagcaggagacttttttggaaataattagttgtgaaattccatttttctgacagccccttaaatttgaagttatttcatttgtagttaaggttatcacatccctgccaattttactagattttttcagagacaagcattcagcatggcattagtaatgatggtttaaactaggtgcagaactgtcccatgaagagaagaatgatatcagtatttaaataataaaagaagagacaatgtatggtttatagtgattcattttaagattgctgtattttgattttgtggtttaaaataaatgcattaaggatcttttaagttactacaaaaaac

SEQ ID NO: 356200 - DNA, 3031 bp, Homo sapiens
ggacctgccgggacccttgcccgccgcgcacccgcagtcaccgccgagcgggcggccgggccgggacccgcgagtgtgcaccggcggccgggctggcgccgagcccagagcggaccagcagcagctcaagcgctgcggccgccgcctccccgctgaccccgcgatctgaggctgtcagagatgactctggttctgtccatgaatagattctgcgagcccattgtctcggaaggagctgctgaaattgctgggtaccaaacactatgggaggctgacagctacggaggcccaagccccccagggccagcacaagctcctttgcagggagaccggggagctggtcccccactggcaggatcacattacaggggaatttcaaatcctataacaacatccaagatcacatactttaagaggaagtatgtggaagaagaggattttcacccaccactcagcagctgtagccataaaaccatctcaatttttgaggaacgagcccacatcctttatatgtccttagaaaagctaaagtttatcgatgatcctgaagtgtacctccgaagatctgtccttataaacaatttgatgaaaaggatccatggagaaattatcatgcagaataactggtgcttccctgcctgctctttcaatggcacctctgcccaagagtggtttatggctcaagactgcccttaccgaaaacgaccacggatggccaaagaggaatgtgaaaagtttcatgcctgctgcttttaccaagaatgtggtggccactacctaaatttacccctttctgtcaatgctaatgttggaagtgcctccactgctgcctcctctccctccgcctcttcttcctcctcatcttcctcttcctctccccctttgcctttaccgagttgttcccgccaggtggattttgatgtaggtagtgcatctatttacaagagtgatggccagatacctgccaatgaaatctttgtcactaatgtcagatcacttggtgttcaggaaaaggccaaattaaatgatgagaaagcaaatgatgacaccaacagagatggtggccccctcagccacgaacctgtgggaaatgaccttgcttttgagtgcaaaggccaattttatgattattttgagaccggatataatgaaagaaacaatgtaaatgaatcttggaaaaagtccttacggaaaaaggaggcttcaccaccaagtaacaaactgtgctgcagcaaaggaagtaaaatatgagccatcttctcaccgaactttgaagcatgcacagcatgatcagttagctctcgtaaattttattttgaatggattttgtagttttgtacaacagataaaattatgccatgaacatgccatgtcgttttaatgcctggagagcagattgcgtaaaacatctgtatagcaggcatcagcgagcttcttataaatgtggtgatttttaccaaggaaacgattgacttaatgcttaaaagtatatcatagttttcttacggaaaagatcagtagatgagattgggggacaatgtgcccttgcaatatttccattgccccccaaggagcctgtcactagctaagaaatttctacatgtttgccagttaattagggagttatttggtaagcaaatcaatataaccagcaaagatacctgcttcttctatatgatacaatattttttttaaataaaagactaaagacagggagctagatgaaatggcttaatggtgctgttaagtatttgtacctaacagtcttgtgtgacagatgaaaataggatgtaacataatgaaacacacctgtctaggggcggcaatcaacagtcttacacagagagggtattccctgcaagtttctggcttgcctgtgatgggtgatgaggcttttagagaggtgttatacagggcgatttttggtgccttacttttatcttaatttttgccaatgtgaaaattaaggataaatcagagttacagcagggatttaacaaacaggacaaaaaaaaaaaaaaaaaaaaaccacagggtggatcaatatggtttggaaactgttaactttgaactattgtgttcagcttttgattcgacatctctattctttatttttgatgcccaattgcttttggattcgccgttttttcaatagggatggaggaaatgagagagagagctgttagaaagcagcacgggctgctcgagcttttctatggcaactgtgtgttgctggggttggggttttctgggttttgggttgttttgttttgttttcttgtccaatgaagttcacgaaccagtggcatgcattatacttttctctgttttgcatcatttcacttgtttagattataaaagcatgtgggtttttatatatgaactttgctgttgattaagaagcacaatgttaataaatgatgtggtgatcaataaggtttatcttaaagaatgtaaagactttaggtttttgaaagttattttggagaaatgggacttaatctataatagttactatgtatttggtctacattttccaaataatatctttaacttgtacatttgaaaagtgttcagagtggccctcctaccatccttccttccactccagccaactcttcctgctaaactgtattccagtttccaagtttactaattgacttgggcctgttcaaataatacttcacagaaaccaaatgccaaacggaggaaataagtaagccctcccagtttctccaagataaagctttttttattattgctattaatattaaatataggtctcattcatacagtgtatgagtaggatcatttggacaattgtccacaaagaccaatttttaaaacattttcttgtgttatagttaaatagtctagtaatgttttgtcctttattttcaatatttgataaacatttgatgttcaaaacttagctaatagatgcttgtatatgaatgtgttgtaataaagtgaggttttcttgatatatatttattaagatgataaaaattcattaagttttttaaatttt

SEQ ID NO: 356201 - DNA, 1661 bp, Homo sapiens
gaatcttagctgattgcattatgaactgtcaaactgtgaagatgacccatatgtaaacagttataacagctacagattattgctagtagcattctatacaattccatattaatgttcttaggagctaatatttgataaaggggaaagctagttaaaaactaattaatttgtcaaatgtagcattcttattatgagtgtaatatctcatggagatttaaatatgaacgaaaggacttatccttctgctttttaaaagccccagcattactagatagtgtttttcttgaaggccaaagctgtaaaatgacaaagttggtgattttcagcagcactcacctgagctgtgagcgcctgcacctgttcggtagaacccactagaatcacttctctgtaggataagtgatgcctttgaatccagcagcataaaaatctgttctttttagtcatcaagtttttgtttccaggatatttctagcattgcaaaaaaaaatttcttcaccaaacactaattcctaaacacccatccaaaccacaaaaattctcttgttagtaggcgagagtgctaggacttcctgtgttcacctcccatgcacccagcattgtcttttatgcatgagatattccattagattttcctagagtggccaggacacccttcatagtaagttatatctcttaactggattctatagttttatcctcgagcaacttggaaaagctaagacatcctccacccacactggtatctacgcgcctggaagctgcaccttctctcattgctgtgctctgctttaaggaaaacctgatatgacagaatcaagactattaaaagataaatgaggggaaatcttcatttaagaaagttgccttgctccccaagagtgcctttaattgctattcccctaggcatctgggtgcatatcattaatgaaatcattaacctttgtctctggtccttcctttctaaaaacagcagattatagaaggtggtctggcaaagggattttcaaagggcaaaagtctcatcatcatctttccactcaaaatcctattattctacatttcactttgcaggggtcctagggacaggattgcagggacaggggacatgggaggaagacagaaaaattcaaaaccagcagatgccactacctggcaatgaattgaaaattaggggaaagcatctttggcgtgaccttttattaaagcagaggacaacttgtagaagacatgaccattaagagacatcaacttcgcaacaaatataagacaaggatacaaggattcctatgtgatgcagctaggtttttatatccttctaacaaatggtgagcaggagacttttttggaaataattagttgtgaaattccatttttctgacagccccttaaatttgaagttatttcatttgtagttaaggttatcacatccctgccaattttactagattttttcagagacaagcattcagcatggcattagtaatgatggtttaaactaggtgcagaactgtcccatgaagagaagaatgatatcagtatttaaataataaaagaagagacaatgtatggtttatagtgattcattttaagattgctgtattttgattttgtggtttaaaataaatgcattaaggatcttttaagttactacaaaaaac

SEQ ID NO: 356202 - DNA, 299 bp, Homo sapiens
  misc_feature (112)..(112): n is a, c, g, or t
  misc_feature (115)..(117): n is a, c, g, or t
  misc_feature (120)..(124): n is a, c, g, or t
  misc_feature (127)..(127): n is a, c, g, or t
  misc_feature (131)..(131): n is a, c, g, or t
  misc_feature (137)..(137): n is a, c, g, or t
  misc_feature (144)..(144): n is a, c, g, or t
  misc_feature (156)..(156): n is a, c, g, or t
ttcggcacgaggagaagaatgatatcagtatttaaataataaaatgaatcactataaaccatacattgtctcttcttttattatttaaatactgatatcattcttctcttcntgnnncannnnngcncctngtttanaccatcnttactaatgccntgctgagaagaatgatatcagtatttaaataataaaagaagagacaatgtatggtttatagtgattcattttaagattgctgtattttgattttgtggtttaaaataaatgcattaaggatcttttaagttactacaaaaaac

SEQ ID NO: 356203 - DNA, 1868 bp, Homo sapiens
gaatcttagctgattgcattatgaactgtcaaactgtgaagatgacccatatgtaaacagttataacagctacagattattgctagtagcattctatacaattccatattaatgttcttaggagctaatatttgataaaggggaaagctagttaaaaactaattaatttgtcaaatgtagcattcttattatgagtgtaatatctcatggagatttaaatatgaacgaaaggacttatccttctgctttttaaaagccccagcattactagatagtgtttttcttgaaggccaaagctgtaaaatgacaaagttggtgattttcagcagcactcacctgagctgtgagcgcctgcacctgttcggtagaacccactagaatcacttctctgtaggataagtgatgcctttgaatccagcagcataaaaatctgttctttttagtcatcaagtttttgtttccaggatatttctagcattgcaaaaaaaaatttcttcaccaaacactaattcctaaacacccatccaaaccacaaaaattctcttgttagtaggcgagagtgctaggacttcctgtgttcacctcccatgcacccagcattgtcttttatgcatgagatattccattagattttcctagagtggccaggacacccttcatagtaagttatatctcttaactggattctatagttttatcctcgagcaacttggaaaagctaagacatcctccacccacactggtatctacgcgcctggaagctgcaccttctctcattgctgtgctctgctttaaggaaaacctgatatgacagaatcaagactattaaaagataaatgaggggaaatcttcatttaagaaagttgccttgctccccaagagtgcctttaattgctattcccctaggcatctgggtgcatatcattaatgaaatcattaacctttgtctctggtccttcctttctaaaaacagcagattatagaaggtggtctggcaaagggattttcaaagggcaaaagtctcatcatcatctttccactcaaaatcctattattctacatttcactttgcaggggtcctagggacaggattgcagggacaggggacatgggaggaagacagaaaaattcaaaaccagcagatgccactacctggcaatgaattgaaaattaggggaaagcatctttggcgtgaccttttattaagacaacagaaatttagaacattttacatgcttctttgttaaatggtgaagcaagggaatgaaagtatttatttttagagctcatagttaactccatcaagacatggctacccacccctccagttatgaacttgtattacagctccacttggtgacttcctttctgtgtatcaggagcagagcagaggacaacttgtagaagacatgaccattaagagacatcaacttcgcaacaaatataagacaaggatacaaggattcctatgtgatgcagctaggtttttatatccttctaacaaatgtatctgtgacaggctgaagaacgatgactaaacgaagggaatttacacaagctagtctggtggtgtttgcaaaccatcgccatgagcttcatcttctttggtaaacaatccgctggtgggctgtctatggttggtttcttttctttgttgttgatccaatttgttaactttgaaaatgcaaactacttattcacagtgtggaaacacctgcttttgaccacaatgaaactgatagaatgtatggcgatgtattagttgtttctcatgaaatttcttatatttctcaaccccatttctatgactcttctcttgatttaaaaatatgaaaatcgaataaaatcttgtggggaggacctacata

SEQ ID NO: 356204 - DNA, 926 bp, Homo sapiens
ggacctgccgggacccttgcccgccgcgcacccgcagtcaccgccgagcgggcggccgggccgggacccgcgagtgtgcaccggcggccgggctggcgccgagcccagagcggaccagcagcagctcaagcgctgcggccgccgcctccccgctgaccccgcgatctgaggctgtcagagatgactctggttctgtccatgaatagattctgcgagcccattgtctcggaaggagctgctgaaattgctgggtaccaaacactatgggaggctgacagctacggaggcccaagccccccagggccagcacaagctcctttgcagggagaccggggagctggtcccccactggcaggatcacattacaggggaatttcaaatcctataacaacatccaagatcacatactttaagaggaagtatgtggaagaagaggattttcacccaccactcagcagctgtagccataaaagcagaggacaacttgtagaagacatgaccattaagagacatcaacttcgcaacaaatataagacaaggatacaaggattcctatgtgatgcagctaggtttttatatccttctaacaaatggtgagcaggagacttttttggaaataattagttgtgaaattccatttttctgacagccccttaaatttgaagttatttcatttgtagttaaggttatcacatccctgccaattttactagattttttcagagacaagcattcagcatggcattagtaatgatggtttaaactaggtgcagaactgtcccatgaagagaagaatgatatcagtatttaaataataaaagaagagacaatgtatggtttatagtgattcattttaagattgctgtattttgattttgtggtttaaaataaatgcattaaggatcttttaagttactacaaaaaac

SEQ ID NO: 356205 - DNA, 876 bp, Homo sapiens
ggacctgccgggacccttgcccgccgcgcacccgcagtcaccgccgagcgggcggccgggccgggacccgcgagtgtgcaccggcggccgggctggcgccgagcccagagcggaccagcagcagctcaagcgctgcggccgccgcctccccgctgaccccgcgatctgaggctgtcagagatgactctggttctgtccatgaatagattctgcgagcccattgtctcggaaggagctgctgaaattgctgggtaccaaacactatgggaggctgacagctacggaggcccaagccccccagggccagcacaagctcctttgcagggagaccggggagctggtcccccactggcagctccacttggtgacttcctttctgtgtatcaggagcagagcagaggacaacttgtagaagacatgaccattaagagacatcaacttcgcaacaaatataagacaaggatacaaggattcctatgtgatgcagctaggtttttatatccttctaacaaatgtatctgtgacaggctgaagaacgatgactaaacgaagggaatttacacaagctagtctggtggtgtttgcaaaccatcgccatgagcttcatcttctttggtaaacaatccgctggtgggctgtctatggttggtttcttttctttgttgttgatccaatttgttaactttgaaaatgcaaactacttattcacagtgtggaaacacctgcttttgaccacaatgaaactgatagaatgtatggcgatgtattagttgtttctcatgaaatttcttatatttctcaaccccatttctatgactcttctcttgatttaaaaatatgaaaatcgaataaaatcttgtggggaggacctacata

SEQ ID NO: 356206 - DNA, 954 bp, Homo sapiens
ggacctgccgggacccttgcccgccgcgcacccgcagtcaccgccgagcgggcggccgggccgggacccgcgagtgtgcaccggcggccgggctggcgccgagcccagagcggaccagcagcagctcaagcgctgcggccgccgcctccccgctgaccccgcgatctgaggctgtcagagatgactctggttctgtccatgaatagattctgcgagcccattgtctcggaaggagctgctgaaattgctgggtaccaaacactatgggaggctgacagctacggaggcccaagccccccagggccagcacaagctcctttgcagggagaccggggagctggtcccccactggcaggatcacattacaggggaatttcaaatcctataacaacatccaagatcacatactttaagaggaagtatgtggaagaagaggattttcacccaccactcagcagctgtagccataaaagcagaggacaacttgtagaagacatgaccattaagagacatcaacttcgcaacaaatataagacaaggatacaaggattcctatgtgatgcagctaggtttttatatccttctaacaaatgtatctgtgacaggctgaagaacgatgactaaacgaagggaatttacacaagctagtctggtggtgtttgcaaaccatcgccatgagcttcatcttctttggtaaacaatccgctggtgggctgtctatggttggtttcttttctttgttgttgatccaatttgttaactttgaaaatgcaaactacttattcacagtgtggaaacacctgcttttgaccacaatgaaactgatagaatgtatggcgatgtattagttgtttctcatgaaatttcttatatttctcaaccccatttctatgactcttctcttgatttaaaaatatgaaaatcgaataaaatcttgtggggaggacctacata

SEQ ID NO: 356207 - DNA, 946 bp, Homo sapiens
agtgaaccaatcatgccaccatactccagcttggatgacagagcgagaatctgtctaaaaaaaaaaaaaagcagttactggaaggagttaccttcatcatagatcactattcctatttctcaagtttccaccgactccacctctctcctcaaggccagtcttgggcatgccttgcctttagatggcactttagggcaatctaatgtgcccaacaggagagcctggtttgttaaacgggagagccttatcctgtgaatatcagtgctctatccagaacaggttctctgtggtctcagaggcagtccccagctacctaagaagtttggcaaagcgaatgcacttctcaaggtgccaaagccactcggtggaccccagtcttaggagacaccagacaaggctgtagggacaggtgctggctccgcaatgacacgggttcagttcctaactcggtatttcctgtgtggccttgacgggtctcttaatctcttaaatttcttggtcataaaaaaatcaaaagaaaagtgaaccttgaggccattatgccaggggaaatacgccagtcacaaaaaaagacaaatactgaatgattccacctgtatgaagtatctagaggagccaacttcagagagacagaaagtgccacggtgactgccagggacgaggagaggagggaaatacgaagttgttgttaaatgggtacagagttttggttttgcaagatgaaaacattctggggattcattgcacaaccacgtaaacgtccttgacgctactgaaaagtacgctaatggttaagatggtaaattttatgctttgcgtagtttgccacgatttaaaatatgttaaaaaattttttgaaagaaaggaagggaatttagctaatgcttcctttgcaagattgtttcgaggatttgaggtaaaatgccagagtaaaaagtagatggtg

SEQ ID NO: 356208 - DNA, 557 bp, Homo sapiens
  misc_feature (243)..(243): n is a, c, g, or t
  misc_feature (375)..(375): n is a, c, g, or t
accaggtgatatagtatcctggagcagtgtacttaaggtatgatatctgggctggtgccagtccacacactggtatactgctcgtcctgctcttccaccaagtaagtaaagaaatggagagggccctttgaaaaactttagagcaatttggcagagtgattttatgtttattgaatctactaatgaaaactgtagccttataatttatatacctctagtttatttttccatttcacttctcangtttttgtatttaaaaaaagaactggtacggccgggcacagtggctcatgcctgtcccagtactttgggaggccaaggcgggcggatcacaaggtcaggaattcaagaccaatctggccaacatggtgaaanccccttctctactaaaaatacaaaaattagcggggcgtggtgtcgtgcacctgtaatcccagcttctcgggaggctgaggcagaagaattgcttgaacccgggaggtggaggttgcagtgagccgagatcacgccactgcactccggcctgggcgacagagtgagactccatctccaaaaaa

SEQ ID NO: 356209 - DNA, 326 bp, Homo sapiens
ttttttttcagttttggaggtttctactgggatatcctcaaggccagagattctttcctcagctatgcccaatctcctaataagcccagtaacaacgtttttcatttctgttacagtgtttttgatctctagcatttcatttggtttctttttttagaatttccatctctctacttacatagcccaactgttcttgcatgctactttatgcatcagacttcttggcatagttgttttacattcttagcctgatcattccaacatccctgccatatctgaatttagttctgatgcttactctgtctcttcaactgtgtgtggtcgac

SEQ ID NO: 356210 - DNA, 1856 bp, Homo sapiens
ctagcgcaggggcggtgcctccaagtgactgccgtgcagatccaggggagttggaaggtcacaggagttcagcctcagaagactggactttatgagtataaagtctttggtgttctggaggactgctcaccaactctactggcagacatctatatggactcagattacagaaaacaatgggaccagtatgttaaagaactctatgaacaagaatgcaacggagagactgtggtctactgggaagtgaagtacccttttcccatgtccaacagagactatgtctaccttcggcagcggcgagacctggacatggaagggaggaagatccatgtgatcctggcccggagcacctccatgcctcagcttggcgagaggtctggggtgatccgggtgaagcaatacaagcagagcctggcgattgagagtgacggcaagaaggggagcaaagttttcatgtattacttcgataacccgggtggccaaattccgtcctggctcattaactgggccgccaagaatggagttcctaacttcttgaaagacatggcaagagcctgtcagaactacctcaagaaaacctaagaaagagaactgggaacattgcatccatgggttgatgtctctggaagtgcaaccacccaatgtctctggaagtgccacctggaagtgccacctggaagtgtctctggaagagcacccaccactgttcagccttcccctgctgtttctgtcttcagaggcctacacactaccacatcctttctaagcatgtttgcctgacatccagctcactcgtctgcttcctttctcgctccccccatcctgggctgggctgccttcttctacagttcaatatggggcagactagggaaacctttgcttgcttactattaggaggggaagtcttcagtagggaacacgatcattccattgtgcaattttacggggatgggtgggcggagggacacaacaaaatttaagaatgactatttgggcgggctggctcttttgcagcttgtgatttcttccagcttgggaggggctgctggaagtggcatttcgttcagagctgactttcagtgcacccaaactggatgacgtgccaatgtccatttgccttatgctttgtggagctgattaggctgggatttgaggtgataatccagtaagtctttcctcgttcctacttgtggaggatcagtagctgttatgatgccagaccatttggagaagtatcagaggcctgaccggacacataatacgacaaccacatttttcctcatcatccatgaggaaatggatgatttctcttttccatatgtcactgggggaaaggctgcctgtacctctcaagctttgcattttactggaaactgaggcgtcaagatggctgtggcagctagcaaaagcaaagatgctttgtgcatagccttgtgaaaaagtatctttctatgcaataagatgaattttcctcccagaatatttagaaatgtagaagggataacagttcacagccaggtaaaatttaactggtggcttaatgactctgcacctttttctcaggaattctgcctaagttgtctgccttttctaccaccaaaaagacttttagttttctatgctttctcctgaattttggtagggtaaggtatttctatgtcaaaggcacagccttgatgatctcagggaaaaattttaatcactgtgtataatgatactgaaccttgattaataacagaaattcaggatgtaaagccacagaatgggatttattaatgtgggatacctcagactgtttgttttctttctgggaagaaaagtgtgttctataatgaataaatatagagtggttttta

SEQ ID NO: 356211 - DNA, 1122 bp, Homo sapiens
cagtttcctgccaatgacgctggggcagccggggcagccggggcagcccggtcaccccgcccccaggcccacactaagggtgtccgcggcctgccctccaggcggaggagcccggactgcggaaggatggagctggccgccggaagcttctcggaggagcagttctgggaggcctgcgccgagctccagcagcccgctctggccggggccgactggcagctcctagtggagacctcgggcatcagcatctaccggctgctggacaagaagactggactttatgagtataaagtctttggtgttctggaggactgctcaccaactctactggcagacatctatatggactcagattacagaaaacaatgggaccagtatgttaaagaactctatgaacaagaatgcaacggagagactgtggtctactgggaagtgaagtacccttttcccatgtccaacagagactatgtctaccttcggcagcggcgagacctggacatggaagggaggaagatccatgtgatcctggcccggagcacctccatgcctcagcttggcgagaggtctggggtgatccgggtgaagcaatacaagcagagcctggcgattgagagtgacggcaagaaggggagcaaagttttcatgtattacttcgataacccgggtggccaaattccgtcctggctcattaactgggccgccaagggagggaactgcagtggtagtttgtatcactagagactgcccaggagcctggcattatggggaccatcagcctgctttgcacaagatctactactagagagctcaacagattccttggaagagtgaaaaagcacatcaactttggagtcaaacagacgcaatttcaaatcctggctctgctgctgactgtcttgttttatttaaggaagccatgcatttcttcctttttaaaaatgaagatagttgtcttctactgcatagagggggagtaaataagacaatatttaggaaaagtcttgcccagtgctcaacattaactaaataataatatatcctgctccttgatccccaatccttaccattttctaattcaataaagcaagtgctttcatttctttggaagaatgtaacaatcca

SEQ ID NO: 356212 - DNA, 1889 bp, Homo sapiens
cagtttcctgccaatgacgctggggcagccggggcagccggggcagcccggtcaccccgcccccaggcccacactaagggtgtccgcggcctgccctccaggcggaggagcccggactgcggaaggatggagctggccgccggaagcttctcggaggagcagttctgggaggcctgcgccgagctccagcagcccgctctggccggggccgactggcagctcctagtggagacctcgggcatcagcatctaccggctgctggacaagaagactggactttatgagtataaagtctttggtgttctggaggactgctcaccaactctactggcagacatctatatggactcagattacagaaaacaatgggaccagtatgttaaagaactctatgaacaagaatgcaacggagagactgtggtctactgggaagtgaagtacccttttcccatgtccaacagagactatgtctaccttcggcagcggcgagacctggacatggaagggaggaagatccatgtgatcctggcccggagcacctccatgcctcagcttggcgagaggtctggggtgatccgggtgaagcaatacaagcagagcctggcgattgagagtgacggcaagaaggggagcaaagttttcatgtattacttcgataacccgggtggccaaattccgtcctggctcattaactgggccgccaagaatggagttcctaacttcttgaaagacatggcaagagcctgtcagaactacctcaagaaaacctaagaaagagaactgggaacattgcatccatgggttgatgtctctggaagtgcaaccacccaatgtctctggaagtgccacctggaagtgccacctggaagtgtctctggaagagcacccaccactgttcagccttcccctgctgtttctgtcttcagaggcctacacactaccacatcctttctaagcatgtttgcctgacatccagctcactcgtctgcttcctttctcgctccccccatcctgggctgggctgccttcttctacagttcaatatggggcagactagggaaacctttgcttgcttactattaggaggggaagtcttcagtagggaacacgatcattccattgtgcaattttacggggatgggtgggcggagggacacaacaaaatttaagaatgactatttgggcgggctggctcttttgcagcttgtgatttcttccagcttgggaggggctgctggaagtggcatttcgttcagagctgactttcagtgcacccaaactggatgacgtgccaatgtccatttgccttatgctttgtggagctgattaggctgggatttgaggtgataatccagtaagtctttcctcgttcctacttgtggaggatcagtagctgttatgatgccagaccatttggagaagtatcagaggcctgaccggacacataatacgacaaccacatttttcctcatcatccatgaggaaatggatgatttctattttcctcccagaatatttagaaatgtagaagggataacagttcacagccaggtaaaatttaactggtggcttaatgactctgcacctttttctcaggaattctgcctaagttgtctgccttttctaccaccaaaaagacttttagttttctatgctttctcctgaattttggtagggtaaggtatttctatgtcaaaggcacagccttgatgatctcagggaaaaattttaatcactgtgtataatgatactgaaccttgattaataacagaaattcaggatgtaaagccacagaatgggatttattaatgtgggatacctcagactgtttgttttctttctgggaagaaaagtgtgttctataatgaataaatatagagtggttttta

SEQ ID NO: 356213 - DNA, 1605 bp, Homo sapiens
gtttcagaaacatcttcgctttttcctagaaaaagctaacatataaggcctttttgcaacagaagttcctgttgactggtcttacttttgtcctcagtcctactttttgtcatcatctgcaacaacattctgttgaaatccagttagggagcctattcatttttgttcgtcctaaagccaacattgtttaccttctgccacatcccaaagaatcaagagtgaccactgtgaagacatagaaatgacagtctcatttcctttgcagaatggagttcctaacttcttgaaagacatggcaagagcctgtcagaactacctcaagaaaacctaagaaagagaactgggaacattgcatccatgggttgatgtctctggaagtgcaaccacccaatgtctctggaagtgccacctggaagtgccacctggaagtgtctctggaagagcacccaccactgttcagccttcccctgctgtttctgtcttcagaggcctacacactaccacatcctttctaagcatgtttgcctgacatccagctcactcgtctgcttcctttctcgctccccccatcctgggctgggctgccttcttctacagttcaatatggggcagactagggaaacctttgcttgcttactattaggaggggaagtcttcagtagggaacacgatcattccattgtgcaattttacggggatgggtgggcggagggacacaacaaaatttaagaatgactatttgggcgggctggctcttttgcagcttgtgatttcttccagcttgggaggggctgctggaagtggcatttcgttcagagctgactttcagtgcacccaaactggatgacgtgccaatgtccatttgccttatgctttgtggagctgattaggctgggatttgaggtgataatccagtaagtctttcctcgttcctacttgtggaggatcagtagctgttatgatgccagaccatttggagaagtatcagaggcctgaccggacacataatacgacaaccacatttttcctcatcatccatgaggaaatggatgatttctcttttccatatgtcactgggggaaaggctgcctgtacctctcaagctttgcattttactggaaactgaggcgtcaagatggctgtggcagctagcaaaagcaaagatgctttgtgcatagccttgtgaaaaagtatctttctatgcaataagatgaattttcctcccagaatatttagaaatgtagaagggataacagttcacagccaggtaaaatttaactggtggcttaatgactctgcacctttttctcaggaattctgcctaagttgtctgccttttctaccaccaaaaagacttttagttttctatgctttctcctgaattttggtagggtaaggtatttctatgtcaaaggcacagccttgatgatctcagggaaaaattttaatcactgtgtataatgatactgaaccttgattaataacagaaattcaggatgtaaagccacagaatgggatttattaatgtgggatacctcagactgtttgttttctttctgggaagaaaagtgtgttctataatgaataaatatagagtggttttta

SEQ ID NO: 356214 - DNA, 1125 bp, Homo sapiens
cagtttcctgccaatgacgctggggcagccggggcagccggggcagcccggtcaccccgcccccaggcccacactaagggtgtccgcggcctgccctccaggcggaggagcccggactgcggaaggatggagctggccgccggaagcttctcggaggagcagttctgggaggcctgcgccgagctccagcagcccgctctggccggggccgactggcagctcctagtggagacctcgggcatcagcatctaccggctgctggacaagaagactggactttatgagtataaagtctttggtgttctggaggactgctcaccaactctactggcagacatctatatggactcagattacagaaaacaatgggaccagtatgttaaagaactctatgaacaagaatgcaacggagagactgtggtctactgggaagtgaagtacccttttcccatgtccaacagagactatgtctaccttcggcagcggcgagacctggacatggaagggaggaagatccatgtgatcctggcccggagcacctccatgcctcagcttggcgagaggtctggggtgatccgggtgaagcaatacaagcagagcctggcgattgagagtgacggcaagaaggggagcaaagttttcatgtattacttcgataacccgggtggccaaattccgtcctggctcattaactgggccgccaaggctggccttgagctcctgacctcaagcaatccactggcctcggcctctcaaagtgctgggattacaggcatgagccaccacacccggccaatcagagcagaaccaagcgggaagctcagaatcagagagacctcatcaagtttttggcaaacccaaacattctgcaatagattgagtggaaggaagaggaaggacataaagataaagacatgagaaaagaagctgagtctttgttgaaacactgaaatgggtgcaggtatcatttcttatctcattgttttttctcataagccctgaattaattcatttattcacagtattttcgcagatgtgaaattcacatattattcacagatgtgttcactatcatctatgtactggaaagatagcagtgaataaaatggacaaaattacctgcca

SEQ ID NO: 356215 - DNA, 1089 bp, Homo sapiens
cagtttcctgccaatgacgctggggcagccggggcagccggggcagcccggtcaccccgcccccaggcccacactaagggtgtccgcggcctgccctccaggcggaggagcccggactgcggaaggatggagctggccgccggaagcttctcggaggagcagttctgggaggcctgcgccgagctccagcagcccgctctggccggggccgactggcagctcctagtggagacctcgggcatcagcatctaccggctgctggacaagaagactggactttatgagtataaagtctttggtgttctggaggactgctcaccaactctactggcagacatctatatggactcagattacagaaaacaatgggaccagtatgttaaagaactctatgaacaagaatgcaacggagagactgtggtctactgggaagtgaagtacccttttcccatgtccaacagagactatgtctaccttcggcagcggcgagacctggacatggaagggaggaagatccatgtgatcctggcccggagcacctccatgcctcagcttggcgagaggtctggggtgatccgggtgaagcaatacaagcagagcctggcgattgagagtgacggcaagaaggggagcaaagttttcatgtattacttcgataacccgggtggccaaattccgtcctggctcattaactgggccgccaagaatcagagcagaaccaagcgggaagctcagaatcagagagacctcatcaagtttttggcaaacccaaacattctgcaatagattgagtggaaggaagaggaaggacataaagataaagacatgagaaaagaagctgagtctttgttgaaacactgaaatgggtgcaggtatcatttcttatctcattgttttttctcataagccctgaattaattcatttattcacagtattttcgcagatgtgaaattcacatattattcacagatgtgttcactatcatctatgaataagatgtgaaattcacatattattcacagatgtgttcactatcatctatgtactggaaagatagcagtgaataaaatggacaaaattacctgcca

SEQ ID NO: 356216 - DNA, 1051 bp, Homo sapiens
gtgttgtcgtagtgcatgtcaacagagactatgtctaccttcggcagcggcgagacctggacatggaagggaggaagatccatgtgatcctggcccggagcacctccatgcctcagcttggcgagaggtctggggtgatccgggtgaagcaatacaagcagagcctggcgattgagagtgacggcaagaaggggagcaaagttttcatgtattacttcgataacccgggtggccaaattccgtcctggctcattaactgggccgccaaggctggccttgagctcctgacctcaagcaatccactggcctcggcctctcaaagtgctgggattacaggcatgagccaccacacccggccaatcagagcagaaccaagcgggaagctcagaatcagagagacctcatcaagtttttggcaaacccaaacattctgcaatagattgagtggaaggaagaggaaggacataaagataaagacatgagaaaagaagctgagtctttgttgaaacactgaaatgggtgcagactcttcaaaatactcttcagtggctttgtttccaaatgaaaaccagaaaaatgatgctggaatttcatagaggcagcggcggatggaagagggctcctcctgtctataaccatgggaatattgtttttgattgtagaccaactaactgcaaagagagaagacacataaataagacaagccctggaaagcacatgtggtgtgacggtgtcctgccaaagctgagaagacacaaataaaaagtttgagtatttctctagagaattcatctaggagtgaaactgttgaataaacagctctgcagatctcctccaagtgattgtactaatttattctctaaccagccattatgggctgattatctgtgccctcctcaaactcatatgttgaagcctcaatccctagtatgatagtatctggagatgggaccattgggaggtaattaggtttagactagatcacaagggtggagcctttatgatgggattagtgtccttataagaagaggaagtgaaatgagagctctct

SEQ ID NO: 356217 - DNA, 389 bp, Homo sapiens
cctgtctataaccatgggaatattgtttttgattgtagaccaactaactgcaaagagagaagacacataaataagacaagccctggaaagcacatgtggtgtgacggtgtcctgccaaagctgagaagacacaaataaaaagtaattatttactctttgtaagagagtgttctaaacccaagacactgattcatagatgctatcatggccctgtaaacacattaaaaatcaaatacaggttatattacatgtacccagttcatcttacaatggtaaagtccagaaattgtcaacagtctaaaaaaattctaactacttgtcatattaatgatgtgtaataaggtataatattgataatattttatattataataatgttatattatctt

SEQ ID NO: 356218 - DNA, 821 bp, Homo sapiens
gggggagtgtgtttgacaaatgttgacttagcccgcggggctgtcaggctgaagagacacattgtctcaggcgtaatgaggctcttttatgaagagtttggttgagtgactctggttagggctggggctgccaacatccaagacggaggctgggacaagagacaaagaattgtcagcttggaatgccagcctctccctgcttgtgccccaggaccccgccagaatcactctctggaacttctggacaatagtctgctcttagtaggaacaatagtgcctttggagcctatattcctctgcttactggggaataagacagactgacctggcttggagacaaccagatgtgtccaagcctgaggaaagcttccacttttgttgttgttgcccttttttttttttctttttctctataagggagggaactgcagtggtagtttgtatcactagagactgcccaggagcctggcattatggggaccatcagcctgctttgcacaagatctactactagagagctcaacagattccttggaagagtgaaaaagcacatcaactttggagtcaaacagacgcaatttcaaatcctggctctgctgctgactgtcttgttttatttaaggaagccatgcatttcttcctttttaaaaatgaagatagttgtcttctactgcatagagggggagtaaataagacaatatttaggaaaagtcttgcccagtgctcaacattaactaaataataatatatcctgctccttgatccccaatccttaccattttctaattcaataaagcaagtgctttcatttctttggaaga

SEQ ID NO: 356219 - DNA, 2045 bp, Homo sapiens
cagtttcctgccaatgacgctggggcagccggggcagccggggcagcccggtcaccccgcccccaggcccacactaagggtgtccgcggcctgccctccaggcggaggagcccggactgcggaaggatggagctggccgccggaagcttctcggaggagcagttctgggaggcctgcgccgagctccagcagcccgctctggccggggccgactggcagctcctagtggagacctcgggcatcagcatctaccggctgctggacaagaagactggactttatgagtataaagtctttggtgttctggaggactgctcaccaactctactggcagacatctatatggactcagattacagaaaacaatgggaccagtatgttaaagaactctatgaacaagaatgcaacggagagactgtggtctactgggaagtgaagtacccttttcccatgtccaacagagactatgtctaccttcggcagcggcgagacctggacatggaagggaggaagatccatgtgatcctggcccggagcacctccatgcctcagcttggcgagaggtctggggtgatccgggtgaagcaatacaagcagagcctggcgattgagagtgacggcaagaaggggagcaaagttttcatgtattacttcgataacccgggtggccaaattccgtcctggctcattaactgggccgccaagaatggagttcctaacttcttgaaagacatggcaagagcctgtcagaactacctcaagaaaacctaagaaagagaactgggaacattgcatccatgggttgatgtctctggaagtgcaaccacccaatgtctctggaagtgccacctggaagtgccacctggaagtgtctctggaagagcacccaccactgttcagccttcccctgctgtttctgtcttcagaggcctacacactaccacatcctttctaagcatgtttgcctgacatccagctcactcgtctgcttcctttctcgctccccccatcctgggctgggctgccttcttctacagttcaatatggggcagactagggaaacctttgcttgcttactattaggaggggaagtcttcagtagggaacacgatcattccattgtgcaattttacggggatgggtgggcggagggacacaacaaaatttaagaatgactatttgggcgggctggctcttttgcagcttgtgatttcttccagcttgggaggggctgctggaagtggcatttcgttcagagctgactttcagtgcacccaaactggatgacgtgccaatgtccatttgccttatgctttgtggagctgattaggctgggatttgaggtgataatccagtaagtctttcctcgttcctacttgtggaggatcagtagctgttatgatgccagaccatttggagaagtatcagaggcctgaccggacacataatacgacaaccacatttttcctcatcatccatgaggaaatggatgatttctcttttccatatgtcactgggggaaaggctgcctgtacctctcaagctttgcattttactggaaactgaggcgtcaagatggctgtggcagctagcaaaagcaaagatgctttgtgcatagccttgtgaaaaagtatctttctatgcaataagatgaattttcctcccagaatatttagaaatgtagaagggataacagttcacagccaggtaaaatttaactggtggcttaatgactctgcacctttttctcaggaattctgcctaagttgtctgccttttctaccaccaaaaagacttttagttttctatgctttctcctgaattttggtagggtaaggtatttctatgtcaaaggcacagccttgatgatctcagggaaaaattttaatcactgtgtataatgatactgaaccttgattaataacagaaattcaggatgtaaagccacagaatgggatttattaatgtgggatacctcagactgtttgttttctttctgggaagaaaagtgtgttctataatgaataaatatagagtggttttta

SEQ ID NO: 356220 - DNA, 2067 bp, Homo sapiens
cagtttcctgccaatgacgctggggcagccggggcagccggggcagcccggtcaccccgcccccaggcccacactaagggtgtccgcggcctgccctccaggcggaggagcccggactgcggaaggatggagctggccgccggaagcttctcggaggagcagttctgggaggcctgcgccgagctccagcagcccgctctggccggggccgactggcagctcctagtggagacctcgggcatcagcatctaccggctgctggacaagaagactggactttatgagtataaagtctttggtgttctggaggactgctcaccaactctactggcagacatctatatggactcagattacagaaaacaatgggaccagtatgttaaagaactctatgaacaagaatgcaacggagagactgtggtctactgggaagtgaagtacccttttcccatgtccaacagagactatgtctaccttcggcagcggcgagacctggacatggaagggaggaagatccatgtgatcctggcccggagcacctccatgcctcagcttggcgagaggtctggggtgatccgggtgaagcaatacaagcagagcctggcgattgagagtgacggcaagaaggggagcaaagttttcatgtattacttcgataacccgggtggccaaattccgtcctggctcattaactgggccgccaagaatggagttcctaacttcttgaaagacatggcaagagcctgtcagaactacctcaagaaaacctaagaaagagaactgggaacattgcatccatgggttgatgtctctggaagtgcaaccacccaatgtctctggaagtgccacctggaagtgccacctggaagtgtctctggaagagcacccaccactgttcagccttcccctgctgtttctgtcttcagaggcctacacactaccacatcctttctaagcatgtttgcctgacatccagctcactcgtctgcttcctttctcgctccccccatcctgggctgggctgccttcttctacagttcaatatggggcagactagggaaacctttgcttgcttactattaggaggggaagtcttcagtagggaacacgatcattccattgtgcaattttacggggatgggtgggcggagggacacaacaaaatttaagaatgactatttgggcgggctggctcttttgcagcttgtgatttcttccagcttgggaggggctgctggaagtggcatttcgttcagagctgactttcagtgcacccaaactggatgacgtgccaatgtccatttgccttatgctttgtggagctgattaggctgggatttgaggtgataatccagtaagtctttcctcgttcctacttgtggaggatcagtagctgttatgatgccagaccatttggagaagtatcagaggcctgaccggacacataatacgacaaccacatttttcctcatcatccatgaggaaatggatgatttctcttttccatatgtcactgggggaaaggctgcctgtacctctcaagctttgcattttactggaaactgaggcgtcaagatggctgtggcagctagcaaaagcaaagatgctttgtgcatagccttgtgaaaaagtatctttctatgcaataagatgaattttcctcccagaatatttagaaatgtagaagggataacagttcacagccaggtaaaatttaactggtggcttaatgactctgcacctttttctcaggaattctgcctaagttgtctgccttttctaccaccaaaaagacttttagttttctatgctttctcctgaattttggtagggtaaggtatttctatgtcaaaggcacagccttgatgatctcagggaaaaattttaatcactgtgtataatgatactgaaccttgattaataacagaaattcaggatgtaaagccacagaatgggatttattaatgtgggatacctcagactgtttgttttctttctgggaagaaaagtgtgttctataatgaataaatatagagtggtttttaagacaaatatcaacaaaaggcg

SEQ ID NO: 356221 - DNA, 1036 bp, Homo sapiens
cagtttcctgccaatgacgctggggcagccggggcagccggggcagcccggtcaccccgcccccaggcccacactaagggtgtccgcggcctgccctccaggcggaggagcccggactgcggaaggatggagctggccgccggaagcttctcggaggagcagttctgggaggcctgcgccgagctccagcagcccgctctggccggggccgactggcagctcctagtggagacctcgggcatcagcatctaccggctgctggacaagaagactggactttatgagtataaagtctttggtgttctggaggactgctcaccaactctactggcagacatctatatggactcagattacagaaaacaatgggaccagtatgttaaagaactctatgaacaagaatgcaacggagagactgtggtctactgggaagtgaagtacccttttcccatgtccaacagagactatgtctaccttcggcagcggcgagacctggacatggaagggaggaagatccatgtgatcctggcccggagcacctccatgcctcagcttggcgagaggtctggggtgatccgggtgaagcaatacaagcagagcctggcgattgagagtgacggcaagaaggggagcaaagttttcatgtattacttcgataacccgggtggccaaattccgtcctggctcattaactgggccgccaagaatcagagcagaaccaagcgggaagctcagaatcagagagacctcatcaagtttttggcaaacccaaacattctgcaatagattgagtggaaggaagaggaaggacataaagataaagacatgagaaaagaagctgagtctttgttgaaacactgaaatgggtgcaggtatcatttcttatctcattgttttttctcataagccctgaattaattcatttattcacagtattttcgcagatgtgaaattcacatattattcacagatgtgttcactatcatctatgtactggaaagatagcagtgaataaaatggacaaaattacctgcca

SEQ ID NO: 356222 - DNA, 1398 bp, Homo sapiens
cagtttcctgccaatgacgctggggcagccggggcagccggggcagcccggtcaccccgcccccaggcccacactaagggtgtccgcggcctgccctccaggcggaggagcccggactgcggaaggatggagctggccgccggaagcttctcggaggagcagttctgggaggcctgcgccgagctccagcagcccgctctggccggggccgactggcagctcctagtggagacctcgggcatcagcatctaccggctgctggacaagaagactggactttatgagtataaagtctttggtgttctggaggactgctcaccaactctactggcagacatctatatggactcagattacagaaaacaatgggaccagtatgttaaagaactctatgaacaagaatgcaacggagagactgtggtctactgggaagtgaagtacccttttcccatgtccaacagagactatgtctaccttcggcagcggcgagacctggacatggaagggaggaagatccatgtgatcctggcccggagcacctccatgcctcagcttggcgagaggtctggggtgatccgggtgaagcaatacaagcagagcctggcgattgagagtgacggcaagaaggggagcaaagttttcatgtattacttcgataacccgggtggccaaattccgtcctggctcattaactgggccgccaagaatcagagcagaaccaagcgggaagctcagaatcagagagacctcatcaagtttttggcaaacccaaacattctgcaatagattgagtggaaggaagaggaaggacataaagataaagacatgagaaaagaagctgagtctttgttgaaacactgaaatgggtgcagactcttcaaaatactcttcagtggctttgtttccaaatgaaaaccagaaaaatgatgctggaatttcatagaggcagcggcggatggaagagggctcctcctgtctataaccatgggaatattgtttttgattgtagaccaactaactgcaaagagagaagacacataaataagacaagccctggaaagcacatgtggtgtgacggtgtcctgccaaagctgagaagacacaaataaaaagtttgagtatttctctagagaattcatctaggagtgaaactgttgaataaacagctctgcagatctcctccaagtgattgtactaatttattctctaaccagccattatgggctgattatctgtgccctcctcaaactcatatgttgaagcctcaatccctagtatgatagtatctggagatgggaccattgggaggtaattaggtttagactagatcacaagggtggagcctttatgatgggattagtgtccttataagaagaggaagtgaaatgagagctctct

SEQ ID NO: 356223 - DNA, 497 bp, Homo sapiens
ctttccctacccattctcagaacaatccctagctctgagaaaactccactgtacttcctgttgctctttaaccccctctgcacgccctgggagcctaagtgtaagctcccgaaaatgccagaatcatctcccttgcctaaatggccgagtgttttcattgcggagcctgtgaagctggtagtagctatgtttagtggaagccctaagcactctcctcctagcctaccttggaaaagtcgctcggggcaccaagcaagacaaattttccccttgtcgttagtcctcctagtcccgaggcagtccaatattctggagagtatttagcttttgtatgggagcaaggtattggagaaaagaaaattattaccctgggggatgaagagtttgtgtctggggggaagggagttggggaggaagaagtgagggtggagcttccacctcttaacaacttaaatacttcaggaagtgtttctaaagattggccaagagggtcgctg

SEQ ID NO: 356224 - DNA, 2037 bp, Homo sapiens
gactagttctagatcgcgatctagaactagccgcgggagacgctgctgaggcggcttcggttgcgggtcggaacggcgctgctctgcggggccggtccaggctggcagctgccggcgcttggcggtgagggcgggctcccgagtggccccccaccgaaggcggtgggaccagcggctgaggccaggatgccgtccaggcggcgcggcggctcctcactcatcccagatgttggttatctttctgaagtagactgtccatggcctgaacattttccgaaaatcattttgagcaaaatatctgtttaataacaagataaccacatcaagatggttggaaagctgaagcagaacttactattggcatgtctggtgattagttctgtgactgtgttttacctgggccagcatgccatggaatgccatcaccggatagaggaacgtagccagccagtcaaattggagagcacaaggaccactgtgagaactggcctggacctcaaagccaacaaaacctttgcctatcacaaagatatgcctttaatatttattggaggtgtgcctcggagtggaaccacactcatgagggccatgctggacgcacatcctgacattcgctgtggagaggaaaccagggtcattccccgaatcctggccctgaagcagatgtggtcacggtcaagtaaagagaagatccgcctggatgaggctggtgttactgatgaagtgctggattctgccatgcaagccttcttactagaaattatcgttaagcatggggagccagccccttatttatgtaataaagatccttttgccctgaaatctttaacttacctttctaggttattccccaatgccaaatttctcctgatggtccgagatggccgggcatcagtacattcaatgatttctcgaaaagttactatagctggatttgatctgaacagctatagggactgtttgacaaagtggaatcgtgctatagagaccatgtataaccagtgtatggaggttggttataaaaagtgcatgttggttcactatgaacaacttgtcttacatcctgaacggtggatgagaacactcttaaagttcctccagattccatggaaccactcagtattgcaccatgaagagatgattgggaaagctgggggagtgtctctgtcaaaagtggagagatctacagaccaagtaatcaagccagtcaatgtaggagctctatcaaaatgggttgggaagataccgccagatgttttacaagacatggcagtgattgctcctatgcttgccaagcttggatatgacccatatgccaacccacctaactacggaaaacctgatcccaaaattattgaaaacactcgaagggtctataagggagaattccaactacctgactttcttaaagaaaaaccacagactgagcaagtggagtagcagaaccaggagcctcttccatacatgaggaaagattgctgccttttcagcagaagggaaattcctaggattggctgtcccctgccaagcttggtggagcgtctgcaccttggctgcgccgcctgtgcatttgccagtttcctcccactgagaggatggaggtgtccgcacagctttgggcctcgtgagggatctgcctcctgagcaaagagctcttgatcccgatttcatgcacagccctgcagtaaggagcccagaaggaacatgtgtttcctgttaaaactcctcttgttctcttttcttacattatgacgtttgttttcaaggagagggtttaaaaatgggatcctgtaagcagacttgggcagtctccttttgaaataggttgtctgtacatgttctaatgttttgtagaacacgtgtgcctgtttaagtgtattgatgtgaataatattaaatatcctaattatttaattcattgtattgtttctgagaagttgggaaattaccattatacatttacaacctaatgacttttgtattttatttttcaaaataaaagctttcaatgtgaagcattctggtaaaaaaatgttt

SEQ ID NO: 356225 - DNA, 711 bp, Homo sapiens
agcctgcgggccacccctcatgtttcagtggggacggtcacttctcatgctgaccaacttcaaggacattaaaacatcttttctttccttcaacagactgagcaagtggagtagcagaaccaggagcctcttccatacatgaggaaagattgctgccttttcagcagaagggaaattcctaggattggctgtcccctgccaagcttggtggagcgtctgcaccttggctgcgccgcctgtgcatttgccagtttcctcccactgagaggatggaggtgtccgcacagctttgggcctcgtgagggatctgcctcctgagcaaagagctcttgatcccgatttcatgcacagccctgcagtaaggagcccagaaggaacatgtgtttcctgttaaaactcctcttgttctcttttcttacattatgacgtttgttttcaaggagagggtttaaaaatgggatcctgtaagcagacttgggcagtctccttttgaaataggttgtctgtacatgttctaatgttttgtagaacacgtgtgcctgtttaagtgtattgatgtgaataatattaaatatcctaattatttaattcattgtattgtttctgagaagttgggaaattaccattatacatttacaacctaatgacttttgtattttatttttcaaaataaaagctttcaatgtgaagcattctggtaaaaaaatgttt

SEQ ID NO: 356226 - DNA, 516 bp, Homo sapiens
cgcccggtctcaattttgttttaagaatatcaaagaatccaagactgtttcagcttctttctacctaaaatgcagtggtgataactggtgactgatttgtaagcaatctcaatgtaatgataaataaccttttcctttctctactagatgttggttatctttctgaagtagactgtccatggcctgaacattttccgaaaatcattttgagcaaaatatctgtttaataacaagataaccacatcaagatggttggaaagctgaagcagaacttactattggcatgtctggtgattagttctgtgactgtgttttacctgggccagcatgccatggaatgccatcaccggatagaggaacgtagccagccagtcaaattggagagcagtggcgtgatctctgaattgccaaagaattcagaaggctgattattaagctactcaaggagataccaaaggtgaaaatcaacttcaagaaattttaaaatatataggatatggatgatgctccaggtcg

SEQ ID NO: 356227 - DNA, 2120 bp, Homo sapiens
ggctgtgggggcgctggccggctgcgacgtcagacccccgcccctcggcgcctgccggacccagctccattcccagccgcgcctccttcggtgggcagccggccggaactcacgaatcagagcagccgacacatcgtccgctcagccaatcgtagcagatgtgtgatcccgccacctccccggaccctggcggttgtcgctgagttggcgaccgcgggagacgctgctgaggcggcttcggttgcgggtcggaacggcgctgctctgcggggccggtccaggctggcagctgccggcgcttggcggtgagggcgggctcccgagtggccccccaccgaaggcggtgggaccagcggctgaggccaggatgccgtccaggcggcgcggcggctcctcactcatcccagatgttggttatctttctgaagtagactgtccatggcctgaacattttccgaaaatcattttgagcaaaatatctgtttaataacaagataaccacatcaagatggttggaaagctgaagcagaacttactattggcatgtctggtgattagttctgtgactgtgttttacctgggccagcatgccatggaatgccatcaccggatagaggaacgtagccagccagtcaaattggagagcacaaggaccactgtgagaactggcctggacctcaaagccaacaaaacctttgcctatcacaaagatatgcctttaatatttattggaggtgtgcctcggagtggaaccacactcatgagggccatgctggacgcacatcctgacattcgctgtggagaggaaaccagggtcattccccgaatcctggccctgaagcagatgtggtcacggtcaagtaaagagaagatccgcctggatgaggctggtgttactgatgaagtgctggattctgccatgcaagccttcttactagaaattatcgttaagcatggggagccagccccttatttatgtaataaagatccttttgccctgaaatctttaacttacctttctaggttattccccaatgccaaatttctcctgatggtccgagatggccgggcatcagtacattcaatgatttctcgaaaagttactatagctggatttgatctgaacagctatagggactgtttgacaaagtggaatcgtgctatagagaccatgtataaccagtgtatggaggttggttataaaaagtgcatgttggttcactatgaacaacttgtcttacatcctgaacggtggatgagaacactcttaaagttcctccagattccatggaaccactcagtattgcaccatgaagagatgattgggaaagctgggggagtgtctctgtcaaaagtggagagatctacagaccaagtaatcaagccagtcaatgtaggagctctatcaaaatgggttgggaagataccgccagatgttttacaagacatggcagtgattgctcctatgcttgccaagcttggatatgacccatatgccaacccacctaactacggaaaacctgatcccaaaattattgaaaacactcgaagggaaagattgctgccttttcagcagaagggaaattcctaggattggctgtcccctgccaagcttggtggagcgtctgcaccttggctgcgccgcctgtgcatttgccagtttcctcccactgagaggatggaggtgtccgcacagctttgggcctcgtgagggatctgcctcctgagcaaagagctcttgatcccgatttcatgcacagccctgcagtaaggagcccagaaggaacatgtgtttcctgttaaaactcctcttgttctcttttcttacattatgacgtttgttttcaaggagagggtttaaaaatgggatcctgtaagcagacttgggcagtctccttttgaaataggttgtctgtacatgttctaatgttttgtagaacacgtgtgcctgtttaagtgtattgatgtgaataatattaaatatcctaattatttaattcattgtattgtttctgagaagttgggaaattaccattatacatttacaacctaatgacttttgtattttatttttcaaaataaaagctttcaatgtgaagcattctggtaaaaaaatgttt

SEQ ID NO: 356228 - DNA, 1968 bp, Homo sapiens
ggctgtgggggcgctggccggctgcgacgtcagacccccgcccctcggcgcctgccggacccagctccattcccagccgcgcctccttcggtgggcagccggccggaactcacgaatcagagcagccgacacatcgtccgctcagccaatcgtagcagatgtgtgatcccgccacctccccggaccctggcggttgtcgctgagttggcgaccgcgggagacgctgctgaggcggcttcggttgcgggtcggaacggcgctgctctgcggggccggtccaggctggcagctgccggcgcttggcggtgagggcgggctcccgagtggccccccaccgaaggcggtgggaccagcggctgaggccaggatgccgtccaggcggcgcggcggctcctcactcatcccagatgttggttatctttctgaagtagactgtccatggcctgaacattttccgaaaatcattttgagcaaaatatctgtttaataacaagataaccacatcaagatggttggaaagctgaagcagaacttactattggcatgtctggtgattagttctgtgactgtgttttacctgggccagcatgccatggaatgccatcaccggatagaggaacgtagccagccagtcaaattggagagcacaaggaccactgtgagaactggcctggacctcaaagccaacaaaacctttgcctatcacaaagatatgcctttaatatttattggaggtgtgcctcggagtggaaccacactcatgagggccatgctggacgcacatcctgacattcgctgtggagaggaaaccagggtcattccccgaatcctggccctgaagcagatgtggtcacggtcaagtaaagagaagatccgcctggatgaggctggtgttactgatgaagtgctggattctgccatgcaagccttcttactagaaattatcgttaagcatggggagccagccccttatttatgtaataaagatccttttgccctgaaatctttaacttacctttctaggttattccccaatgccaaatttctcctgatggtccgagatggccgggcatcagtacattcaatgatttctcgaaaagttactatagctggatttgatctgaacagctatagggactgtttgacaaagtggaatcgtgctatagagaccatgtataaccagtgtatggaggttggttataaaaagtgcatgttggttcactatgaacaacttgtcttacatcctgaacggtggatgagaacactcttaaagttcctccagattccatggaaccactcagtattgcaccatgaagagatgattgggaaagctgggggagtgtctctgtcaaaactgagcaagtggagtagcagaaccaggagcctcttccatacatgaggaaagattgctgccttttcagcagaagggaaattcctaggattggctgtcccctgccaagcttggtggagcgtctgcaccttggctgcgccgcctgtgcatttgccagtttcctcccactgagaggatggaggtgtccgcacagctttgggcctcgtgagggatctgcctcctgagcaaagagctcttgatcccgatttcatgcacagccctgcagtaaggagcccagaaggaacatgtgtttcctgttaaaactcctcttgttctcttttcttacattatgacgtttgttttcaaggagagggtttaaaaatgggatcctgtaagcagacttgggcagtctccttttgaaataggttgtctgtacatgttctaatgttttgtagaacacgtgtgcctgtttaagtgtattgatgtgaataatattaaatatcctaattatttaattcattgtattgtttctgagaagttgggaaattaccattatacatttacaacctaatgacttttgtattttatttttcaaaataaaagctttcaatgtgaagcattctggtaaaaaaatgttt

SEQ ID NO: 356229 - DNA, 2164 bp, Homo sapiens
ggctgtgggggcgctggccggctgcgacgtcagacccccgcccctcggcgcctgccggacccagctccattcccagccgcgcctccttcggtgggcagccggccggaactcacgaatcagagcagccgacacatcgtccgctcagccaatcgtagcagatgtgtgatcccgccacctccccggaccctggcggttgtcgctgagttggcgaccgcgggagacgctgctgaggcggcttcggttgcgggtcggaacggcgctgctctgcggggccggtccaggctggcagctgccggcgcttggcggtgagggcgggctcccgagtggccccccaccgaaggcggtgggaccagcggctgaggccaggatgccgtccaggcggcgcggcggctcctcactcatcccagatgttggttatctttctgaagtagactgtccatggcctgaacattttccgaaaatcattttgagccagaacttactattggcatgtctggtgattagttctgtgactgtgttttacctgggccagcatgccatggaatgccatcaccggatagaggaacgtagccagccagtcaaattggagagcacaaggaccactgtgagaactggcctggacctcaaagccaacaaaacctttgcctatcacaaagatatgcctttaatatttattggaggtgtgcctcggagtggaaccacactcatgagggccatgctggacgcacatcctgacattcgctgtggagaggaaaccagggtcattccccgaatcctggccctgaagcagatgtggtcacggtcaagtaaagagaagatccgcctggatgaggctggtgttactgatgaagtgctggattctgccatgcaagccttcttactagaaattatcgttaagcatggggagccagccccttatttatgtaataaagatccttttgccctgaaatctttaacttacctttctaggttattccccaatgccaaatttctcctgatggtccgagatggccgggcatcagtacattcaatgatttctcgaaaagttactatagctggatttgatctgaacagctatagggactgtttgacaaagtggaatcgtgctatagagaccatgtataaccagtgtatggaggttggttataaaaagtgcatgttggttcactatgaacaacttgtcttacatcctgaacggtggatgagaacactcttaaagttcctccagattccatggaaccactcagtattgcaccatgaagagatgattgggaaagctgggggagtgtctctgtcaaaagtggagagatctacagaccaagtaatcaagccagtcaatgtaggagctctatcaaaatgggttgggaagataccgccagatgttttacaagacatggcagtgattgctcctatgcttgccaagcttggatatgacccatatgccaacccacctaactacggaaaacctgatcccaaaattattgaaaacactcgaagggtctataagggagaattccaactacctgactttcttaaagaaaaaccacagactgagcaagtggagtagcagaaccaggagcctcttccatacatgaggaaagattgctgccttttcagcagaagggaaattcctaggattggctgtcccctgccaagcttggtggagcgtctgcaccttggctgcgccgcctgtgcatttgccagtttcctcccactgagaggatggaggtgtccgcacagctttgggcctcgtgagggatctgcctcctgagcaaagagctcttgatcccgatttcatgcacagccctgcagtaaggagcccagaaggaacatgtgtttcctgttaaaactcctcttgttctcttttcttacattatgacgtttgttttcaaggagagggtttaaaaatgggatcctgtaagcagacttgggcagtctccttttgaaataggttgtctgtacatgttctaatgttttgtagaacacgtgtgcctgtttaagtgtattgatgtgaataatattaaatatcctaattatttaattcattgtattgtttctgagaagttgggaaattaccattatacatttacaacctaatgacttttgtattttatttttcaaaataaaagctttcaatgtgaagcattctggtaaaaaaatgttt

SEQ ID NO: 356230 - DNA, 1835 bp, Homo sapiens
ggctgtgggggcgctggccggctgcgacgtcagacccccgcccctcggcgcctgccggacccagctccattcccagccgcgcctccttcggtgggcagccggccggaactcacgaatcagagcagccgacacatcgtccgctcagccaatcgtagcagatgtgtgatcccgccacctccccggaccctggcggttgtcgctgagttggcgaccgcgggagacgctgctgaggcggcttcggttgcgggtcggaacggcgctgctctgcggggccggtccaggctggcagctgccggcgcttggcggtgagggcgggctcccgagtggccccccaccgaaggcggtgggaccagcggctgaggccaggatgccgtccaggcggcgcggcggctcctcactcatcccagatgttggttatctttctgaagtagactgtccatggcctgaacattttccgaaaatcattttgagcaaaatatctgtttaataacaagataaccacatcaagatggttggaaagctgaagcagaacttactattggcatgtctggtgattagttctgtgactgtgttttacctgggccagcatgccatggaatgccatcaccggatagaggaacgtagccagccagtcaaattggagagcacaaggaccactgtgagaactggcctggacctcaaagccaacaaaacctttgcctatcacaaagatatgcctttaatatttattggaggtgtgcctcggagtggaaccacactcatgagggccatgctggacgcacatcctgacattcgctgtggagaggaaaccagggtcattccccgaatcctggccctgaagcagatgtggtcacggtcaagtaaagagaagatccgcctggatgaggctggtgttactgatgaagtgctggattctgccatgcaagccttcttactagaaattatcgttaagcatggggagccagccccttatttatgtaataaagatccttttgccctgaaatctttaacttacctttctaggttattccccaatgccaaatttctcctgatggtccgagatggccgggcatcagtacattcaatgatttctcgaaaagttactatagctggatttgatctgaacagctatagggactgtttgacaaagtggaatcgtgctatagagaccatgtataaccagtgtatggaggttggttataaaaagtgcatgttggttcactatgaacaacttgtcttacatcctgaacggtggatgagaacactcttaaagttcctccagattccatggaaccactcagtattgcaccatgaagagatgattgggaaagctgggggagtgtctctgtcaaaagtggagagatctacagaccaagtaatcaagccagtcaatgtaggagctctatcaaaatgggttgggaagataccgccagatgttttacaagacatggcagtgattgctcctatgcttgccaagcttggatatgacccatatgccaacccacctaactacggaaaacctgatcccaaaattattgaaaacactcgaagggtctataagggagaattccaactacctgactttcttaaagaaaaaccacagactgagcaagtggagtagcagaaccaggagcctcttccatacatgagcagagacaagatcttatcatgtttcccaggctgcttttgaacttctgggctcaagcaatcctcctgcttcagcgtcccaaagtgccgggattacaggtgtgggccactgctcccagcctggcaccatgctacttgtatagtctgcaggactgtgagccaaataaactgtttttctttataaacta

SEQ ID NO: 356231 - DNA, 1875 bp, Homo sapiens
gttttgctagtgagaaaacaggttgaatgtgacttgcggtgcgttgatggattatagacataagaagcacatggacgctggtccgtcatgtcaaaatcccagatggcagcaagctgctaatattgacaggttctaggattcaggtttcctttttgctgaggagcaaatgctgaatgttagtcttatgccctgtgggtctgcatatttaacagcagttatcaggccttggctaattttgtttataccaaggcctcatttctttaccagcgtgttgtaggatggaccgcatcagcagttgcctctgcagcatttcaccctggcttgtgtgtggaggttgggaggggccaacctgtgctgaggaggactcaggagaactggggacacagcaaagcccttaggatggatactatctttcttatcttttgggtccctttggcatttcaataacagtatctgtgttctctggagcttcctttaaagaaccttaggatccatttcttcacgtgaggaggaatcagggtgctgacccctggacacttaaagaaccttaggacccatttcttcacatgaggaggaatcagggtgctgacccctgggacacttaaagaaccttaggacccatttcttcacatgaggaggaatcagggtcttgacccctggacacttaaccttaggacccatttcttcacatgaggaggaatcagggtgctgccccctggacacttaaagaaccttaggacccatttcttcacatgaggaatcagggtgctgccccctggacacttaaagaaccttaggacccatttcttcacgaggaggaatcagggtgctgccccctggacacctgaagaaccttaggacccatttcttcacataaggaggaatcagggtcttgacccctggacactttaagaaccttaggacccatttcttcacacgaggaatcatggtgctgacccctggacatctggtgcccctgacagtgcccccacagtagcaacaatagcagatgacagtcagttatttagaaatgggcaggagcagccctggttttggccatctgcttgctttgcacccagcagctacttgcatgcatctgaaagcaccagagtgagggtgtgtgtgcctcccaggcagtcttcctgaggcagctgttctcaacatccatcctcctggcccctgatctgcaggaacctccccaaccgcctggcttgtctaggcctgtagctgggaaggaagagacgaagacacagggagaacacaccgggactccacacctgtaaccacattctgtttgttcgccctaggaaagattgctgccttttcagcagaagggaaattcctaggattggctgtcccctgccaagcttggtggagcgtctgcaccttggctgcgccgcctgtgcatttgccagtttcctcccactgagaggatggaggtgtccgcacagctttgggcctcgtgagggatctgcctcctgagcaaagagctcttgatcccgatttcatgcacagccctgcagtaaggagcccagaaggaacatgtgtttcctgttaaaactcctcttgttctcttttcttacattatgacgtttgttttcaaggagagggtttaaaaatgggatcctgtaagcagacttgggcagtctccttttgaaataggttgtctgtacatgttctaatgttttgtagaacacgtgtgcctgtttaagtgtattgatgtgaataatattaaatatcctaattatttaattcattgtattgtttctgagaagttgggaaattaccattatacatttacaacctaatgacttttgtattttatttttcaaaataaaagctttcaatgtgaagcattctggtaaaaaaatgttt

SEQ ID NO: 356232 - DNA, 1018 bp, Homo sapiens
gttttgctagtgagaaaacaggttgaatgtgacttgcggtgcgttgatggattatagacataagaagcacatggacgctggtccgtcatgtcaaaatcccagatggcagcaagctgctaatattgacaggttctaggattcaggtttcctttttgctgaggagcaaatgctgaatgttagtcttatgccctgtgggtctgcatatttaacagcagttatcaggccttggctaattttgtttataccaaggcctcatttctttaccagcgtgttgtaggatggaccgcatcagcagttgcctctgcagcatttcaccctggccctgatctgcaggaacctccccaaccgcctggcttgtctaggcctgtagctgggaaggaagagacgaagacacagggagaacacaccgggactccacacctgtaaccacattctgtttgttcgccctaggaaagattgctgccttttcagcagaagggaaattcctaggattggctgtcccctgccaagcttggtggagcgtctgcaccttggctgcgccgcctgtgcatttgccagtttcctcccactgagaggatggaggtgtccgcacagctttgggcctcgtgagggatctgcctcctgagcaaagagctcttgatcccgatttcatgcacagccctgcagtaaggagcccagaaggaacatgtgtttcctgttaaaactcctcttgttctcttttcttacattatgacgtttgttttcaaggagagggtttaaaaatgggatcctgtaagcagacttgggcagtctccttttgaaataggttgtctgtacatgttctaatgttttgtagaacacgtgtgcctgtttaagtgtattgatgtgaataatattaaatatcctaattatttaattcattgtattgtttctgagaagttgggaaattaccattatacatttacaacctaatgacttttgtattttatttttcaaaataaaagctttcaatgtgaagcattctggtaaaaaaatgttt

SEQ ID NO: 356233 - DNA, 1249 bp, Homo sapiens
ggctgtgggggcgctggccggctgcgacgtcagacccccgcccctcggcgcctgccggacccagctccattcccagccgcgcctccttcggtgggcagccggccggaactcacgaatcagagcagccgacacatcgtccgctcagccaatcgtagcagatgtgtgatcccgccacctccccggaccctggcggttgtcgctgagttggcgaccgcgggagacgctgctgaggcggcttcggttgcgggtcggaacggcgctgctctgcggggccggtccaggctggcagctgccggcgcttggcggtgagggcgggctcccgagtggccccccaccgaaggcggtgggaccagcggctgaggccaggatgccgtccaggcggcgcggcggctcctcactcatcccagatgttggttatctttctgaagtagactgtccatggcctgaacattttccgaaaatcattttgagcaaaatatctgtttaataacaagataaccacatcaagatggttggaaagctgaagcagaacttactattggcatgtctggtgattagttctgtgactgtgttttacctgggccagcatgccatggaatgccatcaccggatagaggaacgtagccagccagtcaaattggagagcacaaggaccactgtgagaactggcctggacctcaaagccaacaaaacctttgcctatcacaaagatatgcctttaatatttattggaggtgtgcctcggagtggaaccacactcatgagggccatgctggacgcacatcctgacattcgctgtggagaggaaaccagggtcattccccgaatcctggccctgaagcagatgtggtcacggtcaagtaaagagaagatccgcctggatgaggctggtgttactgatgaagtgctggattctgccatgcaagccttcttactagaaattatcgttaagcatggggagccagccccttatttatgtaataaagatccttttgccctgaaatctttaacttacctttctaggttattccccaatgccgtccagcggcgcggcggctcctcactcatcccagatgttggttatctttctgaagtagactgtccatggcctgaacattttccgaaaatcattttgagcaaaatatctgtttaataacaagataaccacatcaagatggttggaaagctgaagcagaacttactattggcatgtctggtgattagttctgtgactgtgttttacctgggc

SEQ ID NO: 356234 - DNA, 281 bp, Homo sapiens
atggcagcaagctgctaatattgacaggttctaggattcaggtttcctttttgctgaggagcaaatgctgaatgttagtcttatgccctgtgggtctgcatatttaacagcagttatcaggccttggctaattttgtttatacaaaatgctttcaaacttcataggtaatctccctgcccgccccaccaaacacacacaaggcctcatttctttaccagcgtgttgtaggatggaccgcatcagcagttgcctctgcagcatttcaccctggcttgtgtgt

SEQ ID NO: 356235 - DNA, 2218 bp, Homo sapiens
ggctgtgggggcgctggccggctgcgacgtcagacccccgcccctcggcgcctgccggacccagctccattcccagccgcgcctccttcggtgggcagccggccggaactcacgaatcagagcagccgacacatcgtccgctcagccaatcgtagcagatgtgtgatcccgccacctccccggaccctggcggttgtcgctgagttggcgaccgcgggagacgctgctgaggcggcttcggttgcgggtcggaacggcgctgctctgcggggccggtccaggctggcagctgccggcgcttggcggtgagggcgggctcccgagtggccccccaccgaaggcggtgggaccagcggctgaggccaggatgccgtccaggcggcgcggcggctcctcactcatcccagatgttggttatctttctgaagtagactgtccatggcctgaacattttccgaaaatcattttgagcaaaatatctgtttaataacaagataaccacatcaagatggttggaaagctgaagcagaacttactattggcatgtctggtgattagttctgtgactgtgttttacctgggccagcatgccatggaatgccatcaccggatagaggaacgtagccagccagtcaaattggagagcacaaggaccactgtgagaactggcctggacctcaaagccaacaaaacctttgcctatcacaaagatatgcctttaatatttattggaggtgtgcctcggagtggaaccacactcatgagggccatgctggacgcacatcctgacattcgctgtggagaggaaaccagggtcattccccgaatcctggccctgaagcagatgtggtcacggtcaagtaaagagaagatccgcctggatgaggctggtgttactgatgaagtgctggattctgccatgcaagccttcttactagaaattatcgttaagcatggggagccagccccttatttatgtaataaagatccttttgccctgaaatctttaacttacctttctaggttattccccaatgccaaatttctcctgatggtccgagatggccgggcatcagtacattcaatgatttctcgaaaagttactatagctggatttgatctgaacagctatagggactgtttgacaaagtggaatcgtgctatagagaccatgtataaccagtgtatggaggttggttataaaaagtgcatgttggttcactatgaacaacttgtcttacatcctgaacggtggatgagaacactcttaaagttcctccagattccatggaaccactcagtattgcaccatgaagagatgattgggaaagctgggggagtgtctctgtcaaaagtggagagatctacagaccaagtaatcaagccagtcaatgtaggagctctatcaaaatgggttgggaagataccgccagatgttttacaagacatggcagtgattgctcctatgcttgccaagcttggatatgacccatatgccaacccacctaactacggaaaacctgatcccaaaattattgaaaacactcgaagggtctataagggagaattccaactacctgactttcttaaagaaaaaccacagactgagcaagtggagtagcagaaccaggagcctcttccatacatgaggaaagattgctgccttttcagcagaagggaaattcctaggattggctgtcccctgccaagcttggtggagcgtctgcaccttggctgcgccgcctgtgcatttgccagtttcctcccactgagaggatggaggtgtccgcacagctttgggcctcgtgagggatctgcctcctgagcaaagagctcttgatcccgatttcatgcacagccctgcagtaaggagcccagaaggaacatgtgtttcctgttaaaactcctcttgttctcttttcttacattatgacgtttgttttcaaggagagggtttaaaaatgggatcctgtaagcagacttgggcagtctccttttgaaataggttgtctgtacatgttctaatgttttgtagaacacgtgtgcctgtttaagtgtattgatgtgaataatattaaatatcctaattatttaattcattgtattgtttctgagaagttgggaaattaccattatacatttacaacctaatgacttttgtattttatttttcaaaataaaagctttcaatgtgaagcattctggtaaaaaaatgttt

SEQ ID NO: 356236 - DNA, 2019 bp, Homo sapiens
ggctgtgggggcgctggccggctgcgacgtcagacccccgcccctcggcgcctgccggacccagctccattcccagccgcgcctccttcggtgggcagccggccggaactcacgaatcagagcagccgacacatcgtccgctcagccaatcgtagcagatgtgtgatcccgccacctccccggaccctggcggttgtcgctgagttggcgaccgcgggagacgctgctgaggcggcttcggttgcgggtcggaacggcgctgctctgcggggccggtccaggctggcagctgccggcgcttggcggtgagggcgggctcccgagtggccccccaccgaaggcggtgggaccagcggctgaggccaggatgccgtccaggcggcgcggcggctcctcactcatcccagatgttggttatctttctgaagtagactgtccatggcctgaacattttccgaaaatcattttgagcaaaatatctgtttaataacaagataaccacatcaagatggttggaaagctgaagcagaacttactattggcatgtctggtgattagttctgtgactgtgttttacctgggccagcatgccatggaatgccatcaccggatagaggaacgtagccagccagtcaaattggagagcacaaggaccactgtgagaactggcctggacctcaaagccaacaaaacctttgcctatcacaaagatatgcctttaatatttattggaggtgtgcctcggagtggaaccacactcatgagggccatgctggacgcacatcctgacattcgctgtggagaggaaaccagggtcattccccgaatcctggccctgaagcagatgtggtcacggtcaagtaaagagaagatccgcctggatgaggctggtgttactgatgaagtgctggattctgccatgcaagccttcttactagaaattatcgttaagcatggggagccagccccttatttatgtaataaagatccttttgccctgaaatctttaacttacctttctaggttattccccaatgccaaatttctcctgatggtccgagatggccgggcatcagtacattcaatgatttctcgaaaagttactatagctggatttgatctgaacagctatagggactgtttgacaaagtggaatcgtgctatagagaccatgtataaccagtgtatggaggttggttataaaaagtgcatgttggttcactatgaacaacttgtcttacatcctgaacggtggatgagaacactcttaaagttcctccagattccatggaaccactcagtattgcaccatgaagagatgattgggaaagctgggggagtgtctctgtcaaagtctataagggagaattccaactacctgactttcttaaagaaaaaccacagactgagcaagtggagtagcagaaccaggagcctcttccatacatgaggaaagattgctgccttttcagcagaagggaaattcctaggattggctgtcccctgccaagcttggtggagcgtctgcaccttggctgcgccgcctgtgcatttgccagtttcctcccactgagaggatggaggtgtccgcacagctttgggcctcgtgagggatctgcctcctgagcaaagagctcttgatcccgatttcatgcacagccctgcagtaaggagcccagaaggaacatgtgtttcctgttaaaactcctcttgttctcttttcttacattatgacgtttgttttcaaggagagggtttaaaaatgggatcctgtaagcagacttgggcagtctccttttgaaataggttgtctgtacatgttctaatgttttgtagaacacgtgtgcctgtttaagtgtattgatgtgaataatattaaatatcctaattatttaattcattgtattgtttctgagaagttgggaaattaccattatacatttacaacctaatgacttttgtattttatttttcaaaataaaagctttcaatgtgaagcattctggtaaaaaaatgttt

SEQ ID NO: 356237 - DNA, 1989 bp, Homo sapiens
ggctgtgggggcgctggccggctgcgacgtcagacccccgcccctcggcgcctgccggacccagctccattcccagccgcgcctccttcggtgggcagccggccggaactcacgaatcagagcagccgacacatcgtccgctcagccaatcgtagcagatgtgtgatcccgccacctccccggaccctggcggttgtcgctgagttggcgaccgcgggagacgctgctgaggcggcttcggttgcgggtcggaacggcgctgctctgcggggccggtccaggctggcagctgccggcgcttggcggtgagggcgggctcccgagtggccccccaccgaaggcggtgggaccagcggctgaggccaggatgccgtccaggcggcgcggcggctcctcactcatcccagatgttggttatctttctgaagtagactgtccatggcctgaacattttccgaaaatcattttgagcaaaatatctgtttaataacaagataaccacatcaagatggttggaaagctgaagcagaacttactattggcatgtctggtgattagttctgtgactgtgttttacctgggccagcatgccatggaatgccatcaccggatagaggaacgtagccagccagtcaaattggagagcacaaggaccactgtgagaactggcctggacctcaaagccaacaaaacctttgcctatcacaaagatatgcctttaatatttattggaggtgtgcctcggagtggaaccacactcatgagggccatgctggacgcacatcctgacattcgctgtggagaggaaaccagggtcattccccgaatcctggccctgaagcagatgtggtcacggtcaagtaaagagaagatccgcctggatgaggctggtgttactgatgaagtgctggattctgccatgcaagccttcttactagaaattatcgttaagcatggggagccagccccttatttatgtaataaagatccttttgccctgaaatctttaacttacctttctaggttattccccaatgccaaatttctcctgatggtccgagatggccgggcatcagtacattcaatgatttctcgaaaagttactatagctggatttgatctgaacagctatagggactgtttgacaaagtggaatcgtgctatagagaccatgtataaccagtgtatggaggttggttataaaaagtgcatgttggttcactatgaacaacttgtcttacatcctgaacggtggatgagaacactcttaaagttcctccagattccatggaaccactcagtattgcaccatgaagagatgattgggaaagctgggggagtgtctctgtcaaaagtggagagatctacagaccaagtaatcaagccagtcaatgtaggagctctatcaaaatgggttgggaagataccgccagatgttttacaagacatggcagtgattgctcctatgcttgccaagcttggatatgacccatatgccaacccacctaactacggaaaacctgatcccaaaattattgaaaacactcgaagggtctataagggagaattccaactacctgactttcttaaagaaaaaccacagtgtctactatggtgaggaattagagtaagtcctcaggagtcacgggggaaagaaagacctcaaggagctcctgatttatccagaagaatccgaccacctcgtgcagacaaggggacacagagctctgggcccaggctgggcatgatgtcccagaaacctgggcagattcatgaacagactgacaccggctgtggaaattggagccagagaatattccaagaggctgtcttgaaggaatataaaatccaaaagcgcccaggtgcggtggttcacgcctgtaatcccagcactttgggaggcccaggtgggtggattgcctgaggtcaggagttcaagatctgtttagccaacacagtgacaccccgtctctactaaaaatataaaat

SEQ ID NO: 356238 - DNA, 853 bp, Homo sapiens
  misc_feature (4)..(4): n is a, c, g, or t
tagngtatcccctccccgtacgctcaatgtaggagctctatcaaaatgggttgggaagataccgccagatgttttacaagacatggcagtgattgctcctatgcttgccaagcttggatatgacccatatgccaacccacctaactacggaaaacctgatcccaaaattattgaaaacactcgaagggtctataagggagaattccaactacctgactttcttaaagaaaaaccacagactgagcaagtggagtagcagaaccaggagcctcttccatacatgaggaaagattgctgccttttcagcagaagggaaattcctaggattggctgtcccctgccaagcttggtggagcgtctgcaccttggctgcgccgcctgtgcatttgccagtttcctcccactgagaggatggaggtgtccgcacagctttgggcctcgtgagggatctgcctcctgagcaaagagctcttgatcccgatttcatgcacagccctgcagtaaggagcccagaaggaacatgtgtttcctgttaaaactcctcttgttctcttttcttacattatgacgtttgttttcaaggagagggtttaaaaatgggatcctgtaagcagacttgggcagtctccttttgaaataggttgtctgtacatgttctaatgttttgtagaacacgtgtgcctgtttaagtgtattgatgtgaataatattaaatatcctaattatttaattcattgtattgtttctgagaagttgggaaattaccattatacatttacaacctaatgacttttgtattttatttttcaaaataaaagctttcaatgtgaagcattctggtaaaaaaatgttt

SEQ ID NO: 356239 - DNA, 624 bp, Homo sapiens
actgcatacaacgccgctgactgcatcaacgccgctgactgcatccaacgccgctgactgcatccaacgccgctgactgcatccaacgccgctgactgcatccaacgccgctgactgcatccaacgccgctgactgcatccaacgccgcctgtgcatttgccagtttcctcccactgagaggatggaggtgtccgcacagctttgggcctcgtgagggatctgcctcctgagcaaagagctcttgatcccgatttcatgcacagccctgcagtaaggagcccagaaggaacatgtgtttcctgttaaaactcctcttgttctcttttcttacattatgacgtttgttttcaaggagagggtttaaaaatgggatcctgtaagcagacttgggcagtctccttttgaaataggttgtctgtacatgttctaatgttttgtagaacacgtgtgcctgtttaagtgtattgatgtgaataatattaaatatcctaattatttaattcattgtattgtttctgagaagttgggaaattaccattatacatttacaacctaatgacttttgtattttatttttcaaaataaaagctttcaatgtgaagcattctggtaaaaaaatgttt

SEQ ID NO: 356240 - DNA, 313 bp, Homo sapiens
aaaatctctaaatattgttaaatttattaaatccactgtcattagtagaccttagaacttaagcctataatctatataaatatataacactgtcaatcatattacaatgtttaatttgcattaaaatgtaagaatttgcttttcttattttattttattattattatactttaagttttagggaacatgtgcacaatgtgcaggttagttacatatgtatacacgtgccatgctggtgcgctgcacccattaactcgtcatttagcattaggtatatctcctaatgctatccctcccccctccccccacccca

SEQ ID NO: 356241 - DNA, 224 bp, Homo sapiens
ggtctagtgcatccggctgcagagggaaattgaggaccttacacagcagctagcggccatgcagttcttcaacgacaagttccagggcctttgaagttggagccagcgtccggagctgcagccaagcgagtttcctccttatcctccttagccagggctttttctcttccgctgcatttgcccccttcccaacgcagttcaaagcagtgtgaaataaagtcgtt

SEQ ID NO: 356242 - DNA, 3074 bp, Homo sapiens
ggatttccgggcggcggaaggagacgcggccgcgtgaggacgaggctatttgaaaacacgctccgggagctagagcctgaggtcggcggcgcacgctgttgccccgtgggcttctgctccctcgcttgtcttctcgggcttctcgccccggccgcggccgggtcctcagtagtcgagaatgactaaaaaaagaaaacgccaacatgattttcaaaaagtaaaattgaaagttggtaaaaagaagcccaagttacaaaatgctactcctacaaactttaaaacaaagactatacatctgcctgagcaactcaaagaggatggaacacttccaacaaacaatagaaaacttaacataaaggatttgctgtcacagatgcatcactacaatgctggggttaaacaaagtgctcttcttggacttaaagaccttttgtctcaatacccatttataattgatgcacacctttcaaacatattaagtgaagtgactgctgtgtttacagataaagatgctaatgtacgattagcagcagttcaacttcttcaattcctggcccccaaaatacgagctgaacaaatttctccattttttcctttggtaagtgcccatctctctagtgccatgactcacattactgaaggaattcaggaggactctttaaaagttttggacattctgctggaacagtacccagctctaattactggccgtagcagcatattgcttaagaattttgtagaacttatttctcatcagcagctgtccaaaggactgataaatagagacagatcccagtcctggatactttctgtaaatcctaatcggagactcacttctcagcaatggaggctgaaagtcttagtgagactcagtaaattccttcaggccttggcagatggatccagtaggttgagagaaagtgaaggacttcaggaacagaaagaaaatccccatgccactagcaactccatttttatcaactggaaggaacatgccaacgaccagcaacacatccaggtttatgaaaatgggggttcacagccaaatgtcagttcacagttcaggctacggtatctggttggaggactgagtggtgtggatgaaggcctgtcatctactgaaaacctgaaaggatttattgagataataattccattgctaattgaatgctgggttgaagctgtacctccacaactagctactcctgttgggaatggtatagaacgagaacctctacaggttatgcagcaagttcttaatattatttcccttctgtggaaactctctaaacaacaggatgaaacccataaattggagtcatggcttcgaaagaactaccttattgattttaaacaccattttatgagtcgttttccatatgtcttaaaagaaataaccaagcacaaaaggaaagagccaaataaaagcatcaagcattgcacagttctctccaataacatagatcatctcttactgaatttaacactgtctgatatcatggtctccctggcaaatgcgtcaactttgcagaaggattgcagttggatagaaatgataaggaaatttgtaacagagacccttgaagatggctctaggctaaatagtaagcaactgaacagattgctgggagtatcctggaggttaatgcaaatacagccaaacagagaggacacagagactcttattaaggcagtttatacattatatcagcagaggggccttatccttccagttcggactttgttattgaagtttttcagtaaaatctatcagacagaagaactgagatcttgtagattcagatatcgtagtaaagtgttatcccgttggctggctggcttaccattgcaacttgctcatcttggctcccgaaatcctgagctctctacacagcttatcgatatcattcataccgctgcagcacgagcaaataaagaattactaaaaagtttacaagctactgccctccgaatttatgatccacaagaaggtgctgtggtggttctccctgcagactctcagcagcgtttggttcagcttgtatatttcctacccagtctgccggctgatttgctttctcggttaagtcgttgctgtattatgggaagactcagttcaagtttggctgccatgcttatcgggatactgcacatgagatcatcattttctgggtggaagtattcagctaaagactggttgatgagtgatgtagactatttcagcttcttattttccacacttacagggttttcgaaagaggagttgacttggcttcagagccttcgaggagttcctcatgtcatccagacacagctttcccctgtgcttctctaccttacagatttggatcaatttttacaccactgggatgtaacagaggcagtttttcacagtttattggttattcctgcccgaagtcagaactttgacatcttgcaaagtgccatcagtaagcatttggttgggttgactgtaattcctgacagcacggctggctgtgtttttggtgttatctgtaagctcctggatcatacttgtgtagttagtgagactctactgccatttctggcttcttgttgctacagtcttctttattttctgctcactatagagaaaggggaagcagaacatctaagaaagagggacaagctgtggggggtctgtgtctccatcctggctctcttgcctcgagtcctcaggttgatgctgcagagcctgcgggtgaacagagttgggcctgaggagctgcctgttgtgggccagctgcttcgactgctgcttcagcatgcacccctcaggactcatatgttgaccaatgcgatcttggtgcagcagatcatcaagaatatcacgacattgaagagtggaagtgttcaggaacagtggctcacagacttacattactgcttcaacgtgtatatcactgggcatccccaagggcccagtgcactggctacagtgtattgaagaggccatagtacctcctgtttgaagttgtttattcacatctatcttatttgaagaaaaagactgatgtaatagatctttgtcattaaagctgaacttttaaaga

SEQ ID NO: 356243 - DNA, 3011 bp, Homo sapiens
ctcaaaataaataaacatttattaagcactcattggtgtccggcgcccggaagctcactaaattggcttgaaggacttatcaccccggtcgcggacgggtcctcagtagtcgagaatgactaaaaaaagaaaacgccaacatgattttcaaaaagtaaaattgaaagttggtaaaaagaagcccaagttacaaaatgctactcctacaaactttaaaacaaagactatacatctgcctgagcaactcaaagaggatggaacacttccaacaaacaatagaaaacttaacataaaggatttgctgtcacagatgcatcactacaatgctggggttaaacaaagtgctcttcttggacttaaagaccttttgtctcaatacccatttataattgatgcacacctttcaaacatattaagtgaagtgactgctgtgtttacagataaagatgctaatgtacgattagcagcagttcaacttcttcaattcctggcccccaaaatacgagctgaacaaatttctccattttttcctttggtaagtgcccatctctctagtgccatgactcacattactgaaggaattcaggaggactctttaaaagttttggacattctgctggaacagtacccagctctaattactggccgtagcagcatattgcttaagaattttgtagaacttatttctcatcagcagctgtccaaaggactgataaatagagacagatcccagtcctggatactttctgtaaatcctaatcggagactcacttctcagcaatggaggctgaaagtcttagtgagactcagtaaattccttcaggccttggcagatggatccagtaggttgagagaaagtgaaggacttcaggaacagaaagaaaatccccatgccactagcaactccatttttatcaactggaaggaacatgccaacgaccagcaacacatccaggtttatgaaaatgggggttcacagccaaatgtcagttcacagttcaggctacggtatctggttggaggactgagtggtgtggatgaaggcctgtcatctactgaaaacctgaaaggatttattgagataataattccattgctaattgaatgctgggttgaagctgtacctccacaactagctactcctgttgggaatggtatagaacgagaacctctacaggttatgcagcaagttcttaatattatttcccttctgtggaaactctctaaacaacaggatgaaacccataaattggagtcatggcttcgaaagaactaccttattgattttaaacaccattttatgagtcgttttccatatgtcttaaaagaaataaccaagcacaaaaggaaagagccaaataaaagcatcaagcattgcacagttctctccaataacatagatcatctcttactgaatttaacactgtctgatatcatggtctccctggcaaatgcgtcaactttgcagaaggattgcagttggatagaaatgataaggaaatttgtaacagagacccttgaagatggctctaggctaaatagtaagcaactgaacagattgctgggagtatcctggaggttaatgcaaatacagccaaacagagaggacacagagactcttattaaggcagtttatacattatatcagcagaggggccttatccttccagttcggactttgttattgaagtttttcagtaaaatctatcagacagaagaactgagatcttgtagattcagatatcgtagtaaagtgttatcccgttggctggctggcttaccattgcaacttgctcatcttggctcccgaaatcctgagctctctacacagcttatcgatatcattcataccgctgcagcacgagcaaataaagaattactaaaaagtttacaagctactgccctccgaatttatgatccacaagaaggtgctgtggtggttctccctgcagactctcagcagcgtttggttcagcttgtatatttcctacccagtctgccggctgatttgctttctcggttaagtcgttgctgtattatgggaagactcagttcaagtttggctgccatgcttatcgggatactgcacatgagatcatcattttctgggtggaagtattcagctaaagactggttgatgagtgatgtagactatttcagcttcttattttccacacttacagggttttcgaaagaggagttgacttggcttcagagccttcgaggagttcctcatgtcatccagacacagctttcccctgtgcttctctaccttacagatttggatcaatttttacaccactgggatgtaacagaggcagtttttcacagtttattggttattcctgcccgaagtcagaactttgacatcttgcaaagtgccatcagtaagcatttggttgggttgactgtaattcctgacagcacggctggctgtgtttttggtgttatctgtaagctcctggatcatacttgtgtagttagtgagactctactgccatttctggcttcttgttgctacagtcttctttattttctgctcactatagagaaaggggaagcagaacatctaagaaagagggacaagctgtggggggtctgtgtctccatcctggctctcttgcctcgagtcctcaggttgatgctgcagagcctgcgggtgaacagagttgggcctgaggagctgcctgttgtgggccagctgcttcgactgctgcttcagcatgcacccctcaggactcatatgttgaccaatgcgatcttggtgcagcagatcatcaagaatatcacgacattgaagagtggaagtgttcaggaacagtggctcacagacttacattactgcttcaacgtgtatatcactgggcatccccaagggcccagtgcactggctacagtgtattgaagaggccatagtacctcctgtttgaagttgtttattcacatctatcttatttgaagaaaaagactgatgtaatagatctttgtcattaaagctgaacttttaaaga

SEQ ID NO: 356244 - DNA, 3020 bp, Homo sapiens
ggatttccgggcggcggaaggagacgcggccgcgtgaggacgaggctatttgaaaacacgctccgggagctagagcctgaggtcggcggcgcacgctgttgccccgtgggcttctgctccctcgcttgtcttctcgggcttctcgccccggccgcggccgggtcctcagtagtcgagaatgactaaaaaaagaaaacgccaacatgattttcaaaaagtaaaattgaaagttggtaaaaagaagcccaagttacaaaatgctactcctacaaactttaaaacaaagactatacatctgcctgagcaactcaaagaggatggaacacttccaacaaacaatagaaaacttaacataaaggatttgctgtcacagatgcatcactacaatgctggggttaaacaaagtgctcttcttggacttaaagaccttttgtctcaatacccatttataattgatgcacacctttcaaacatattaagtgaagtgactgctgtgtttacagataaagatgctaatgtacgattagcagcagttcaacttcttcaattcctggcccccaaaatacgagctgaacaaatttctccattttttcctttggtaagtgcccatctctctagtgccatgactcacattactgaaggaattcaggaggactctttaaaagttttggacattctgctggaacagtacccagctctaattactggccgtagcagcatattgcttaagaattttgtagaacttatttctcatcagcagctgtccaaaggactgataaatagagacagatcccagtcctggatactttctgtaaatcctaatcggagactcacttctcagcaatggaggctgaaagtcttagtgagactcagtaaattccttcaggccttggcagatggatccagtaggttgagagaaagtgaaggacttcaggaacagaaagaaaatccccatgccactagcaactccatttttatcaactggaaggaacatgccaacgaccagcaacacatccaggtttatgaaaatgggggttcacagccaaatgtcagttcacagttcaggctacggtatctggttggaggactgagtggtgtggatgaaggcctgtcatctactgaaaacctgaaaggatttattgagataataattccattgctaattgaatgctgggttgaagctgtacctccacaactagctactcctgttgggaatggtatagaacgagaacctctacaggttatgcagcaagttcttaatattatttcccttctgtggaaactctctaaacaacaggatgaaacccataaattggagtcatggcttcgaaagaactaccttattgattttaaacaccattttatgagtcgttttccatatgtcttaaaagaaataaccaagcacaaaaggaaagagccaaataaaagcatcaagcattgcacagttctctccaataacatagatcatctcttactgaatttaacactgtctgatatcatggtctccctggcaaatgcgtcaactttgcagaaggattgcagttggatagaaatgataaggaaatttgtaacagagacccttgaagatggctctaggctaaatagtaagcaactgaacagattgctgggagtatcctggaggttaatgcaaatacagccaaacagagaggacacagagactcttattaaggcagtttatacattatatcagcagaggggccttatccttccagttcggactttgttattgaagtttttcagtaaaatctatcagacagaagaactgagatcttgtagattcagatatcgtagtaaagtgttatcccgttggctggctggcttaccattgcaacttgctcatcttggctcccgaaatcctgagctctctacacagcttatcgatatcattcataccgctgcagcacgagcaaataaagaattactagtggttctccctgcagactctcagcagcgtttggttcagcttgtatatttcctacccagtctgccggctgatttgctttctcggttaagtcgttgctgtattatgggaagactcagttcaagtttggctgccatgcttatcgggatactgcacatgagatcatcattttctgggtggaagtattcagctaaagactggttgatgagtgatgtagactatttcagcttcttattttccacacttacagggttttcgaaagaggagttgacttggcttcagagccttcgaggagttcctcatgtcatccagacacagctttcccctgtgcttctctaccttacagatttggatcaatttttacaccactgggatgtaacagaggcagtttttcacagtttattggttattcctgcccgaagtcagaactttgacatcttgcaaagtgccatcagtaagcatttggttgggttgactgtaattcctgacagcacggctggctgtgtttttggtgttatctgtaagctcctggatcatacttgtgtagttagtgagactctactgccatttctggcttcttgttgctacagtcttctttattttctgctcactatagagaaaggggaagcagaacatctaagaaagagggacaagctgtggggggtctgtgtctccatcctggctctcttgcctcgagtcctcaggttgatgctgcagagcctgcgggtgaacagagttgggcctgaggagctgcctgttgtgggccagctgcttcgactgctgcttcagcatgcacccctcaggactcatatgttgaccaatgcgatcttggtgcagcagatcatcaagaatatcacgacattgaagagtggaagtgttcaggaacagtggctcacagacttacattactgcttcaacgtgtatatcactgggcatccccaagggcccagtgcactggctacagtgtattgaagaggccatagtacctcctgtttgaagttgtttattcacatctatcttatttgaagaaaaagactgatgtaatagatctttgtcattaaagctgaacttttaaaga

SEQ ID NO: 356245 - DNA, 2478 bp, Homo sapiens
ggatttccgggcggcggaaggagacgcggccgcgtgaggacgaggctatttgaaaacacgctccgggagctagagcctgaggtcggcggcgcacgctgttgccccgtgggcttctgctccctcgcttgtcttctcgggcttctcgccccggccgcggccgggtcctcagtagtcgagaatgactaaaaaaagaaaacgccaacatgattttcaaaaagtaaaattgaaagttggtaaaaagaagcccaagttacaaaatgctactcctacaaactttaaaacaaagactatacatctgcctgagcaactcaaagaggatggaacacttccaacaaacaatagaaaacttaacataaaggatttgctgtcacagatgcatcactacaatgctggggttaaacaaagtgctcttcttggacttaaagaccttttgtctcaatacccatttataattgatgcacacctttcaaacatattaagtgaagtgactgctgtgtttacagataaagatgctaatgtacgattagcagcagttcaacttcttcaattcctggcccccaaaatacgagctgaacaaatttctccattttttcctttggtaagtgcccatctctctagtgccatgactcacattactgaaggaattcaggaggactctttaaaagttttggacattctgctggaacagtacccagctctaattactggccgtagcagcatattgcttaagaattttgtagaacttatttctcatcagcagctgtccaaaggactgataaatagagacagatcccagtcctggatactttctgtaaatcctaatcggagactcacttctcagcaatggaggctgaaagtcttagtgagactcagtaaattccttcaggccttggcagatggatccagtaggttgagagaaagtgaaggacttcaggaacagaaagaaaatccccatgccactagcaactccatttttatcaactggaaggaacatgccaacgaccagcaacacatccaggtttatgaaaatgggggttcacagccaaatgtcagttcacagttcaggctacgaggacacagagactcttattaaggcagtttatacattatatcagcagaggggccttatccttccagttcggactttgttattgaagtttttcagtaaaatctatcagacagaagaactgagatcttgtagattcagatatcgtagtaaagtgttatcccgttggctggctggcttaccattgcaacttgctcatcttggctcccgaaatcctgagctctctacacagcttatcgatatcattcataccgctgcagcacgagcaaataaagaattactaaaaagtttacaagctactgccctccgaatttatgatccacaagaaggtgctgtggtggttctccctgcagactctcagcagcgtttggttcagcttgtatatttcctacccagtctgccggctgatttgctttctcggttaagtcgttgctgtattatgggaagactcagttcaagtttggctgccatgcttatcgggatactgcacatgagatcatcattttctgggtggaagtattcagctaaagactggttgatgagtgatgtagactatttcagcttcttattttccacacttacagggttttcgaaagaggagttgacttggcttcagagccttcgaggagttcctcatgtcatccagacacagctttcccctgtgcttctctaccttacagatttggatcaatttttacaccactgggatgtaacagaggcagtttttcacagtttattggttattcctgcccgaagtcagaactttgacatcttgcaaagtgccatcagtaagcatttggttgggttgactgtaattcctgacagcacggctggctgtgtttttggtgttatctgtaagctcctggatcatacttgtgtagttagtgagactctactgccatttctggcttcttgttgctacagtcttctttattttctgctcactatagagaaaggggaagcagaacatctaagaaagagggacaagctgtggggggtctgtgtctccatcctggctctcttgcctcgagtcctcaggttgatgctgcagagcctgcgggtgaacagagttgggcctgaggagctgcctgttgtgggccagctgcttcgactgctgcttcagcatgcacccctcaggactcatatgttgaccaatgcgatcttggtgcagcagatcatcaagaatatcacgacattgaagagtggaagtgttcaggaacagtggctcacagacttacattactgcttcaacgtgtatatcactgggcatccccaagggcccagtgcactggctacagtgtattgaagaggccatagtacctcctgtttgaagttgtttattcacatctatcttatttgaagaaaaagactgatgtaatagatctttgtcattaaagctgaacttttaaaga

SEQ ID NO: 356246 - DNA, 2601 bp, Homo sapiens
ggatttccgggcggcggaaggagacgcggccgcgtgaggacgaggctatttgaaaacacgctccgggagctagagcctgaggtcggcggcgcacgctgttgccccgtgggcttctgctccctcgcttgtcttctcgggcttctcgccccggccgcggccgggtcctcagtagtcgagaatgactaaaaaaagaaaacgccaacatgattttcaaaaagtaaaattgaaagttggtaaaaagaagcccaagttacaaaatgctactcctacaaactttaaaacaaagactatacatctgcctgagcaactcaaagaggatggaacacttccaacaaacaatagaaaacttaacataaaggatttgctgtcacagatgcatcactacaatgctggggttaaacaaagtgctcttcttggacttaaagaccttttgtctcaatacccatttataattgatgcacacctttcaaacatattaagtgaagtgactgctgtgtttacagataaagatgctaatgtacgattagcagcagttcaacttcttcaattcctggcccccaaaatacgagctgaacaaatttctccattttttcctttggtatctggttggaggactgagtggtgtggatgaaggcctgtcatctactgaaaacctgaaaggatttattgagataataattccattgctaattgaatgctgggttgaagctgtacctccacaactagctactcctgttgggaatggtatagaacgagaacctctacaggttatgcagcaagttcttaatattatttcccttctgtggaaactctctaaacaacaggatgaaacccataaattggagtcatggcttcgaaagaactaccttattgattttaaacaccattttatgagtcgttttccatatgtcttaaaagaaataaccaagcacaaaaggaaagagccaaataaaagcatcaagcattgcacagttctctccaataacatagatcatctcttactgaatttaacactgtctgatatcatggtctccctggcaaatgcgtcaactttgcagaaggattgcagttggatagaaatgataaggaaatttgtaacagagacccttgaagatggctctaggctaaatagtaagcaactgaacagattgctgggagtatcctggaggttaatgcaaatacagccaaacagagaggacacagagactcttattaaggcagtttatacattatatcagcagaggggccttatccttccagttcggactttgttattgaagtttttcagtaaaatctatcagacagaagaactgagatcttgtagattcagatatcgtagtaaagtgttatcccgttggctggctggcttaccattgcaacttgctcatcttggctcccgaaatcctgagctctctacacagcttatcgatatcattcataccgctgcagcacgagcaaataaagaattactaaaaagtttacaagctactgccctccgaatttatgatccacaagaaggtgctgtggtggttctccctgcagactctcagcagcgtttggttcagcttgtatatttcctacccagtctgccggctgatttgctttctcggttaagtcgttgctgtattatgggaagactcagttcaagtttggctgccatgcttatcgggatactgcacatgagatcatcattttctgggtggaagtattcagctaaagactggttgatgagtgatgtagactatttcagcttcttattttccacacttacagggttttcgaaagaggagttgacttggcttcagagccttcgaggagttcctcatgtcatccagacacagctttcccctgtgcttctctaccttacagatttggatcaatttttacaccactgggatgtaacagaggcagtttttcacagtttattggttattcctgcccgaagtcagaactttgacatcttgcaaagtgccatcagtaagcatttggttgggttgactgtaattcctgacagcacggctggctgtgtttttggtgttatctgtaagctcctggatcatacttgtgtagttagtgagactctactgccatttctggcttcttgttgctacagtcttctttattttctgctcactatagagaaaggggaagcagaacatctaagaaagagggacaagctgtggggggtctgtgtctccatcctggctctcttgcctcgagtcctcaggttgatgctgcagagcctgcgggtgaacagagttgggcctgaggagctgcctgttgtgggccagctgcttcgactgctgcttcagcatgcacccctcaggactcatatgttgaccaatgcgatcttggtgcagcagatcatcaagaatatcacgacattgaagagtggaagtgttcaggaacagtggctcacagacttacattactgcttcaacgtgtatatcactgggcatccccaagggcccagtgcactggctacagtgtattgaagaggccatagtacctcctgtttgaagttgtttattcacatctatcttatttgaagaaaaagactgatgtaatagatctttgtcattaaagctgaacttttaaaga

SEQ ID NO: 356247 - DNA, 2892 bp, Homo sapiens
ggatttccgggcggcggaaggagacgcggccgcgtgaggacgaggctatttgaaaacacgctccgggagctagagcctgaggtcggcggcgcacgctgttgccccgtgggcttctgctccctcgcttgtcttctcgggcttctcgccccggccgcggccgggtcctcagtagtcgagaatgactaaaaaaagaaaacgccaacatgattttcaaaaagtaaaattgaaagttggtaaaaagaagcccaagttacaaaatgctactcctacaaactttaaaacaaagactatacatctgcctgagcaactcaaagaggatggaacacttccaacaaacaatagaaaacttaacataaaggatttgctgtcacagatgcatcactacaatgctggggttaaacaaagtgctcttcttggacttaaagaccttttgtctcaatacccatttataattgatgcacacctttcaaacatattaagtgaagtgactgctgtgtttacagataaagatgctaatgtacgattagcagcagttcaacttcttcaattcctggcccccaaaatacgagctgaacaaatttctccattttttcctttggtaagtgcccatctctctagtgccatgactcacattactgaaggaattcaggaggactctttaaaagttttggacattctgctggaacagtacccagctctaattactggccgtagcagcatattgcttaagaattttgtagaacttatttctcatcagcagctgtccaaaggactgataaatagagacagatcccagtcctggatactttctgtaaatcctaatcggagactcacttctcagcaatggaggctgaaagtcttagtgagactcagtaaattccttcaggccttggcagatggatccagtaggttgagagaaagtgaaggacttcaggaacagaaagaaaatccccatgccactagcaactccatttttatcaactggaaggaacatgccaacgaccagcaacacatccaggtttatgaaaatgggggttcacagccaaatgtcagttcacagttcaggctacggtatctggttggaggactgagtggtgtggatgaaggcctgtcatctactgaaaacctgaaaggatttattgagataataattccattgctaattgaatgctgggttgaagctgtacctccacaactagctactcctgttgggaatggtatagaacgagaacctctacaggttatgcagcaagttcttaatattatttcccttctgtggaaactctctaaacaacaggatgaaacccataaattggagtcatggcttcgaaagaactaccttattgattttaaacaccattttatgagtcgttttccatatgtcttaaaagaaataaccaagcacaaaaggaaagagccaaataaaagcatcaagcattgcacagttctctccaataacatagatcatctcttactgaatttaacactgtctgatatcatggtctccctggcaaatgcgtcaactttgcagaaggattgcagttggatagaaatgataaggaaatttgtaacagagacccttgaagatggctctaggctaaatagtaagcaactgaacagattgctgggagtatcctggaggttaatgcaaatacagccaaacagagaggacacagagactcttattaaggcagtttatacattatatcagcagaggggccttatccttccagttcggactttgttattgaagtttttcagtaaaatctatcagacagaagaactgagatcttgtagattcagatatcgtagtaaagtgttatcccgttggctggctggcttaccattgcaacttgctcatcttggctcccgaaatcctgagctctctacacagcttatcgatatcattcataccgctgcagcacgagcaaataaagaattactaaaaagtttacaagctactgccctccgaatttatgatccacaagaaggtgctgtggtggttctccctgcagactctcagcagcgtttggttcagcttgtatatttcctacccagtctgccggctgatttgctttctcggttaagtcgttgctgtattatgggaagactcagttcaagtttggctgccatgcttatcgggatactgcacatgagatcatcattttctgggtggaagtattcagctaaagactggttgatgagtgatgtagactatttcagcttcttattttccacacttacagggttttcgaaagaggagttgacttggcttcagagccttcgaggagttcctcatgtcatccagacacagctttcccctgtgcttctctaccttacagatttggatcaatttttacaccactgggatgtaacagaggcagtttttcacagtttattggttattcctgcccgaagtcagaactttgacatcttgcaaagtgccatcagtaagcatttgggacaagctgtggggggtctgtgtctccatcctggctctcttgcctcgagtcctcaggttgatgctgcagagcctgcgggtgaacagagttgggcctgaggagctgcctgttgtgggccagctgcttcgactgctgcttcagcatgcacccctcaggactcatatgttgaccaatgcgatcttggtgcagcagatcatcaagaatatcacgacattgaagagtggaagtgttcaggaacagtggctcacagacttacattactgcttcaacgtgtatatcactgggcatccccaagggcccagtgcactggctacagtgtattgaagaggccatagtacctcctgtttgaagttgtttattcacatctatcttatttgaagaaaaagactgatgtaatagatctttgtcattaaagctgaacttttaaaga

SEQ ID NO: 356248 - DNA, 3441 bp, Homo sapiens
ggatttccgggcggcggaaggagacgcggccgcgtgaggacgaggctatttgaaaacacgctccgggagctagagcctgaggtcggcggcgcacgctgttgccccgtgggcttctgctccctcgcttgtcttctcgggcttctcgccccggccgcggccgggtcctcagtagtcgagaatgactaaaaaaagaaaacgccaacatgattttcaaaaagtaaaattgaaagttggtaaaaagaagcccaagttacaaaatgctactcctacaaactttaaaacaaagactatacatctgcctgagcaactcaaagaggatggaacacttccaacaaacaatagaaaacttaacataaaggatttgctgtcacagatgcatcactacaatgctggggttaaacaaagtgctcttcttggacttaaagaccttttgtctcaatacccatttataattgatgcacacctttcaaacatattaagtgaagtgactgctgtgtttacagataaagatgctaatgtacgattagcagcagttcaacttcttcaattcctggcccccaaaatacgagctgaacaaatttctccattttttcctttggtaagtgcccatctctctagtgccatgactcacattactgaaggaattcaggaggactctttaaaagttttggacattctgctggaacagtacccagctctaattactggccgtagcagcatattgcttaagaattttgtagaacttatttctcatcagcagctgtccaaaggactgataaatagagacagatcccagtcctggatactttctgtaaatcctaatcggagactcacttctcagcaatggaggctgaaagtcttagtgagactcagtaaattccttcaggccttggcagatggatccagtaggttgagagaaagtgaaggacttcaggaacagaaagaaaatccccatgccactagcaactccatttttatcaactggaaggaacatgccaacgaccagcaacacatccaggtttatgaaaatgggggttcacagccaaatgtcagttcacagttcaggctacggtatctggttggaggactgagtggtgtggatgaaggcctgtcatctactgaaaacctgaaaggatttattgagataataattccattgctaattgaatgctgggttgaagctgtacctccacaactagctactcctgttgggaatggtatagaacgagaacctctacaggttatgcagcaagttcttaatattatttcccttctgtggaaactctctaaacaacaggatgaaacccataaattggagtcatggcttcgaaagaactaccttattgattttaaacaccattttatgagtcgttttccatatgtcttaaaagaaataaccaagcacaaaaggaaagagccaaataaaagcatcaagcattgcacagttctctccaataacatagatcatctcttactgaatttaacactgtctgatatcatggtctccctggcaaatgcgtcaactttgcagaaggattgcagttggatagaaatgataaggaaatttgtaacagagacccttgaagatggctctaggctaaatagtaagcaactgaacagattgctgggagtatcctggaggttaatgcaaatacagccaaacagagaggacacagagactcttattaaggcagtttatacattatatcagcagaggggccttatccttccagttcggactttgttattgaagtttttcagtaaaatctatcagacagaagaactgagatcttgtagattcagatatcgtagtaaagtgttatcccgttggctggctggcttaccattgcaacttgctcatcttggctcccgaaatcctgagctctctacacagcttatcgatatcattcataccgctgcagcacgagcaaataaagaattactaaaaagtttacaagctactgccctccgaatttatgatccacaagaaggtgctgtggtggttctccctgcagactctcagcagcgtttggttcagcttgtatatttcctacccagtctgccggctgatttgctttctcggttaagtcgttgctgtattatgggaagactcagttcaagtttggctgccatgcttatcgggatactgcacatgagatcatcattttctgggtggaagtattcagctaaagactggttgatgagtgatgtagactatttcagcttcttattttccacacttacagggttttcgaaagaggagttgacttggcttcagagccttcgaggagttcctcatgtcatccagacacagctttcccctgtgcttctctaccttacagatttggatcaatttttacaccactgggatgtaacagaggcagtttttcacagtttattggttattcctgcccgaagtcagaactttgacatcttgcaaagtgccatcagtaagcatttggttgggttgactgtaattcctgacagcacggctggctgtgtttttggtgttatctgtaagctcctggatcatacttgtgtagttagtgagactctactgccatttctggcttcttgttgctacagtcttctttattttctgctcactatagagaaaggggaagcagaacatctaagaaagagggacaagctgtggggggtctgtgtctccatcctggctctcttgcctcgagtcctcaggttgatgctgcagagcctgcgggtgaacagagcctgttgtgggccagctgcttcgactgctgcttcagcatgcacccctcaggactcatatgttgaccaatgcgatcttggtgcagcagatcatcaagaatatcacgacattgaagagtggaagtgttcaggaacagtggctcacagacttacattactgcttcaacgtgtatatcactgggcatccccaagggcccagtgcactggctacagtgtattgaagaggccatagtacctcctgtttgaagttgtttattcacatctatcttatttgaagaaaaagactgatgtaatagatctttgtcattaaagctgaacttttaaagaagtttacgaaccttctttctttgcactgatatatgaaaataatgtttgggcgttcctattgatgtgtaggctggcttcccggactagcacacgatacatggtcataggcggttgtgcattgtgcatttcataggagctaaatatttacaaaatagagagtgatactgtggtaccttctgttatataccaagaaactggctaaatctttgtaatcccatccaggcagacctccttctttgtgtttttgtgatcacaaaaacgatgaatgtaataattagtaaactaaaaaccaaggtaattaagtgaacacttcattgcctatctgtctatctcttaccgttagcacagaagtggcactgatctgaagaaaatgaaagcaacccc

SEQ ID NO: 356249 - DNA, 2710 bp, Homo sapiens
ggatttccgggcggcggaaggagacgcggccgcgtgaggacgaggctatttgaaaacacgctccgggagctagagcctgaggtcggcggcgcacgctgttgccccgtgggcttctgctccctcgcttgtcttctcgggcttctcgccccggccgcggccgggtcctcagtagtcgagaatgactaaaaaaagaaaacgccaacatgattttcaaaaagtaaaattgaaagttggtaaaaagaagcccaagttacaaaatgctactcctacaaactttaaaacaaagactatacatctgcctgagcaactcaaagaggatggaacacttccaacaaacaatagaaaacttaacataaaggatttgctgtcacagatgcatcactacaatgctggggttaaacaaagtgctcttcttggacttaaagaccttttgtctcaatacccatttataattgatgcacacctttcaaacatattaagtgaagtgactgctgtgtttacagataaagatgctaatgtacgattagcagcagttcaacttcttcaattcctggcccccaaaatacgagctgaacaaatttctccattttttcctttggtaagtgcccatctctctagtgccatgactcacattactgaaggaattcaggaggactctttaaaagttttggacattctgctggaacagtacccagctctaattactggccgtagcagcatattgcttaagaattttgtagaacttatttctcatcagcagctgtccaaaggactgataaatagagacagatcccagtcctggatactttctgtaaatcctaatcggagactcacttctcagcaatggaggctgaaagtcttagtgagactcagtaaattccttcaggccttggcagatggatccagtaggttgagagaaagtgaaggacttcaggaacagaaagaaaatccccatgccactagcaactccatttttatcaactggaaggaacatgccaacgaccagcaacacatccaggtttatgaaaatgggggttcacagccaaatgtcagttcacagttcaggctacggtatctggttggaggactgagtggtgtggatgaaggcctgtcatctactgaaaacctgaaaggatttattgagataataattccattgctaattgaatgctgggttgaagctgtacctccacaactagctactcctgttgggaatggtatagaacgagaacctctacaggttatgcagcaagttcttaatattatttcccttctgtggaaactctctaaacaacaggatgaaacccataaattggagtcatggcttcgaaagaactaccttattgattttaaacaccattttatgagtcgttttccatatgtcttaaaagaaataaccaagcacaaaaggaaagagccaaataaaagcatcaagcattgcacagttctctccaataacatagatcatctcttactgaatttaacactgtctgatatcatggtctccctggcaaatgcgtcaactttgcagaaggattgcagttggatagaaatgataaggaaatttgtaacagagacccttgaagatggctctaggctaaatagtaagcaactgaacagattgctgggagtatcctggaggttaatgcaaatacagccaaacagagaggacacagagactcttattaaggcagtttatacattatatcagcagaggggccttatccttccagttcggactttgttattgaagtttttcagtaaaatctatcagacagaagaactgagatcttgtagattcagatatcgtagtaaagtgttatcccgttggctggctggcttaccattgcaacttgctcatcttggctcccgaaatcctgagctctctacacagcttatcgatatcattcataccgctgcagcacgagcaaataaagaattactaaaaagtttacaagctactgccctccgaatttatgatccacaagaaggtgctgtggtggttctccctgcagactctcagcagcgtttggttcagcttgtatatttcctacccagtctgccggctgatttgctttctcggttaagtcgttgctgtattatgggaagactcagttcaagtttggctgccatgcttatcgggatactgcacatgagatcatcattttctgggtggaagtattcagctaaagactggttgatgagtgatgtagactatttcagcttcttattttccacacttacagggttttcgaaagaggagttgacttggcttcagagccttcgaggagttcctcatgtcatccagacacagctttcccctgtgcttctctaccttacagatttggatcaatttttacaccactgggatgtaacagaggcagtttttcacagtttattggttattcctgcccgaagtcagaactttgacatcttgcaaagtgccatcagtaagcatttggttgggttgactgtaattcctgacagcacggctggctgtgtttttggtgttatctgtaagctcctggatcatacttgtgtagttagtgagactctactgccatttctggcttcttgttgctacagtcttctttattttctgctcactatagagaaaggggaagcagaacatctaagaaagaggacaagctgttgctggtctgtgtctccgtccagtctatccgtactcatggtcacaggtgtatgctgg

SEQ ID NO: 356250 - DNA, 940 bp, Homo sapiens
cggacgcgtgggtcgacccacgcatcatcattttctgggtggaagtattcagctaaagactggttgatgagtgatgtagactatttcagcttcttattttccacacttacagggttttcgaaagaggagttgacttggcttcagagccttcgaggagttcctcatgtcatccagacacagctttcccctgtgcttctctaccttacagatttggatcaatttttacaccactgggatgtaacagaggcagtttttcacagtttattggttattcctgcccgaagtcagaactttgacatcttgcaaagtgccatcagtaagcatttggttgggttgactgtaattcctgacagcacggctggctgtgtttttggtgttatctgtaagctcctggatcatacttgtgtagttagtgagactctactgccatttctggcttcttgttgctacagtcttctttattttctgctcactatagagaaaggggaagcagaacatctaagaaagagggacaagctgtggggggtctgtgtctccatcctggctctcttgcctcgagtcctcaggttgatgctgcagagcctgcgggtgaacagagttgggcctgaggagctgcctgttgtgggccagctgcttcgactgctgcttcagcatgcacccctcaggactcatatgttgaccaatgcgatcttggtgcagcagatcatcaagaatatcacgacattgaagagtggaagtgttcaggaacagtggctcacagacttacattactgcttcaacgtgtatatcactgggcatccccaagggcccagtgcactggctacagtgtattgaagaggccatagtacctcctgtttgaagttgtttattcacatctatcttatttgaagaaaaagactgatgtaatagatctttgtcattaaagctgaacttttaaaga

SEQ ID NO: 356251 - DNA, 1466 bp, Homo sapiens
ggatttccgggcggcggaaggagacgcggccgcgtgaggacgaggctatttgaaaacacgctccgggagctagagcctgaggtcggcggcgcacgctgttgccccgtgggcttctgctccctcgcttgtcttctcgggcttctcgccccggccgcggccgggtcctcagtagtcgagaatgactaaaaaaagaaaacgccaacatgattttcaaaaagtaaaattgaaagttggtaaaaagaagcccaagttacaaaatgctactcctacaaactttaaaacaaagactatacatctgcctgagcaactcaaagaggatggaacacttccaacaaacaatagaaaacttaacataaaggatttgctgtcacagatgcatcactacaatgctggggttaaacaaagtgctcttcttggacttaaagaccttttgtctcaatacccatttataattgatgcacacctttcaaacatattaagtgaagtgactgctgtgtttacagataaagatgctaatgtacgattagcagcagttcaacttcttcaattcctggcccccaaaatacgagctgaacaaatttctccattttttcctttggtaagtgcccatctctctagtgccatgactcacattactgaaggaattcaggaggactctttaaaagttttggacattctgctggaacagtacccagctctaattactggccgtagcagcatattgcttaagaattttgtagaacttatttctcatcagcagctgtccaaaggactgataaatagagacagatcccagtcctggatactttctgtaaatcctaatcggagactcacttctcagcaatggaggctgaaagtcttagtgagactcagtaaattccttcaggccttggcagatggatccagtaggttgagagaaagtgaaggacttcaggaacagaaagaaaatccccatgccactagcaactccatttttatcaactggaaggaacatgccaacgaccagcaacacatccaggtttatgaaaatgggggttcacagccaaatgtcagttcacagttcaggctacggtatctggttggaggactgagtggtgtggatgaaggcctgtcatctactgaaaacctgaaaggatttattgagataataattccattgctaattgaatgctgggttgaagctgtacctccacaactagctactcctgttgggaatggtatagaacgagaacctctacaggttatgcagcaagttcttaatattatttcccttctgtggaaactctctaaacaacaggatgaaacccataaattggagtcatggcttcgaaagaactaccttattgattttaaacaccattttatgagtcgttttccatatgtcttaaaagaaataaccaagcacaaaaggaaagagccaaataaaaggtattatgattctttttcactgtataaccttgaaaagc

SEQ ID NO: 356252 - DNA, 392 bp, Homo sapiens
tttttttttgtttaaatttatttcccttgtctttgagtattacattttattcttctttggcctttctaagatatcgtagtaaagtgttatcccgttggctggctggcttaccattgcaacttgctcatcttggctcccgaaatcctgagctctctacacagcttatcgatatcattcataccgctgcagcacgagcaaataaagaattactaaaaagtttacaagctactgccctccgaatttatggtaagagttcatttgtttaatggtatgggtagtcattgatccaccctgatatacaaaagaagtttttaaggggagctctgtaattttgcctttcccttagtctgaattagtaataccatggttaaattgccagaacaaaacatcat

SEQ ID NO: 356253 - DNA, 346 bp, Homo sapiens
aaaacacgctccgggagctagagcctgaggtcggcggcgcacgctgttgccccgtgggcttctgctccctcgcttgtcttctcgggcttctcgccccggccgcggccgggtcctcaggtaagcggccgtcgcccgtcgggccgggtcctcccggggcgcgggactgagcgtggtggggccgtcgccccccgatccgcggcccaagcgggcagggtcggccgtgcacgatttgcgtcccccgggtctgggccgcggcgtccctccgagctgggcctgggtgtgcggccggcactgcgggggcgggaccccctagggcgtttgcggagcttcaggtgactgggcgggt

SEQ ID NO: 356254 - DNA, 3458 bp, Homo sapiens
ggatttccgggcggcggaaggagacgcggccgcgtgaggacgaggctatttgaaaacacgctccgggagctagagcctgaggtcggcggcgcacgctgttgccccgtgggcttctgctccctcgcttgtcttctcgggcttctcgccccggccgcggccgggtcctcagtagtcgagaatgactaaaaaaagaaaacgccaacatgattttcaaaaagtaaaattgaaagttggtaaaaagaagcccaagttacaaaatgctactcctacaaactttaaaacaaagactatacatctgcctgagcaactcaaagaggatggaacacttccaacaaacaatagaaaacttaacataaaggatttgctgtcacagatgcatcactacaatgctggggttaaacaaagtgctcttcttggacttaaagaccttttgtctcaatacccatttataattgatgcacacctttcaaacatattaagtgaagtgactgctgtgtttacagataaagatgctaatgtacgattagcagcagttcaacttcttcaattcctggcccccaaaatacgagctgaacaaatttctccattttttcctttggtaagtgcccatctctctagtgccatgactcacattactgaaggaattcaggaggactctttaaaagttttggacattctgctggaacagtacccagctctaattactggccgtagcagcatattgcttaagaattttgtagaacttatttctcatcagcagctgtccaaaggactgataaatagagacagatcccagtcctggatactttctgtaaatcctaatcggagactcacttctcagcaatggaggctgaaagtcttagtgagactcagtaaattccttcaggccttggcagatggatccagtaggttgagagaaagtgaaggacttcaggaacagaaagaaaatccccatgccactagcaactccatttttatcaactggaaggaacatgccaacgaccagcaacacatccaggtttatgaaaatgggggttcacagccaaatgtcagttcacagttcaggctacggtatctggttggaggactgagtggtgtggatgaaggcctgtcatctactgaaaacctgaaaggatttattgagataataattccattgctaattgaatgctgggttgaagctgtacctccacaactagctactcctgttgggaatggtatagaacgagaacctctacaggttatgcagcaagttcttaatattatttcccttctgtggaaactctctaaacaacaggatgaaacccataaattggagtcatggcttcgaaagaactaccttattgattttaaacaccattttatgagtcgttttccatatgtcttaaaagaaataaccaagcacaaaaggaaagagccaaataaaagcatcaagcattgcacagttctctccaataacatagatcatctcttactgaatttaacactgtctgatatcatggtctccctggcaaatgcgtcaactttgcagaaggattgcagttggatagaaatgataaggaaatttgtaacagagacccttgaagatggctctaggctaaatagtaagcaactgaacagattgctgggagtatcctggaggttaatgcaaatacagccaaacagagaggacacagagactcttattaaggcagtttatacattatatcagcagaggggccttatccttccagttcggactttgttattgaagtttttcagtaaaatctatcagacagaagaactgagatcttgtagattcagatatcgtagtaaagtgttatcccgttggctggctggcttaccattgcaacttgctcatcttggctcccgaaatcctgagctctctacacagcttatcgatatcattcataccgctgcagcacgagcaaataaagaattactaaaaagtttacaagctactgccctccgaatttatgatccacaagaaggtgctgtggtggttctccctgcagactctcagcagcgtttggttcagcttgtatatttcctacccagtctgccggctgatttgctttctcggttaagtcgttgctgtattatgggaagactcagttcaagtttggctgccatgcttatcgggatactgcacatgagatcatcattttctgggtggaagtattcagctaaagactggttgatgagtgatgtagactatttcagcttcttattttccacacttacagggttttcgaaagaggagttgacttggcttcagagccttcgaggagttcctcatgtcatccagacacagctttcccctgtgcttctctaccttacagatttggatcaatttttacaccactgggatgtaacagaggcagtttttcacagtttattggttattcctgcccgaagtcagaactttgacatcttgcaaagtgccatcagtaagcatttggttgggttgactgtaattcctgacagcacggctggctgtgtttttggtgttatctgtaagctcctggatcatacttgtgtagttagtgagactctactgccatttctggcttcttgttgctacagtcttctttattttctgctcactatagagaaaggggaagcagaacatctaagaaagagggacaagctgtggggggtctgtgtctccatcctggctctcttgcctcgagtcctcaggttgatgctgcagagcctgcgggtgaacagagttgggcctgaggagctgcctgttgtgggccagctgcttcgactgctgcttcagcatgcacccctcaggactcatatgttgaccaatgcgatcttggtgcagcagatcatcaagaatatcacgacattgaagagtggaagtgttcaggaacagtggctcacagacttacattactgcttcaacgtgtatatcactgggcatccccaagggcccagtgcactggctacagtgtattgaagaggccatagtacctcctgtttgaagttgtttattcacatctatcttatttgaagaaaaagactgatgtaatagatctttgtcattaaagctgaacttttaaagaagtttacgaaccttctttctttgcactgatatatgaaaataatgtttgggcgttcctattgatgtgtaggctggcttcccggactagcacacgatacatggtcataggcggttgtgcattgtgcatttcataggagctaaatatttacaaaatagagagtgatactgtggtaccttctgttatataccaagaaactggctaaatctttgtaatcccatccaggcagacctccttctttgtgtttttgtgatcacaaaaacgatgaatgtaataattagtaaactaaaaaccaaggtaattaagtgaacacttcattgcctatctgtctatctcttaccgttagcacagaagtggcactgatctgaagaaaatgaaagcaacccc

SEQ ID NO: 356255 - DNA, 4785 bp, Homo sapiens
ggatttccgggcggcggaaggagacgcggccgcgtgaggacgaggctatttgaaaacacgctccgggagctagagcctgaggtcggcggcgcacgctgttgccccgtgggcttctgctccctcgcttgtcttctcgggcttctcgccccggccgcggccgggtcctcagtagtcgagaatgactaaaaaaagaaaacgccaacatgattttcaaaaagtaaaattgaaagttggtaaaaagaagcccaagttacaaaatgctactcctacaaactttaaaacaaagactatacatctgcctgagcaactcaaagaggatggaacacttccaacaaacaatagaaaacttaacataaaggatttgctgtcacagatgcatcactacaatgctggggttaaacaaagtgctcttcttggacttaaagaccttttgtctcaatacccatttataattgatgcacacctttcaaacatattaagtgaagtgactgctgtgtttacagataaagatgctaatgtacgattagcagcagttcaacttcttcaattcctggcccccaaaatacgagctgaacaaatttctccattttttcctttggtaagtgcccatctctctagtgccatgactcacattactgaaggaattcaggaggactctttaaaagttttggacattctgctggaacagtacccagctctaattactggccgtagcagcatattgcttaagaattttgtagaacttatttctcatcagcagctgtccaaaggactgataaatagagacagatcccagtcctggatactttctgtaaatcctaatcggagactcacttctcagcaatggaggctgaaagtcttagtgagactcagtaaattccttcaggccttggcagatggatccagtaggttgagagaaagtgaaggacttcaggaacagaaagaaaatccccatgccactagcaactccatttttatcaactggaaggaacatgccaacgaccagcaacacatccaggtttatgaaaatgggggttcacagccaaatgtcagttcacagttcaggctacggtatctggttggaggactgagtggtgtggatgaaggcctgtcatctactgaaaacctgaaaggatttattgagataataattccattgctaattgaatgctgggttgaagctgtacctccacaactagctactcctgttgggaatggtatagaacgagaacctctacaggttatgcagcaagttcttaatattatttcccttctgtggaaactctctaaacaacaggatgaaacccataaattggagtcatggcttcgaaagaactaccttattgattttaaacaccattttatgagtcgttttccatatgtcttaaaagaaataaccaagcacaaaaggaaagagccaaataaaagcatcaagcattgcacagttctctccaataacatagatcatctcttactgaatttaacactgtctgatatcatggtctccctggcaaatgcgtcaactttgcagaaggattgcagttggatagaaatgataaggaaatttgtaacagagacccttgaagatggctctaggctaaatagtaagcaactgaacagattgctgggagtatcctggaggttaatgcaaatacagccaaacagagaggacacagagactcttattaaggcagtttatacattatatcagcagaggggccttatccttccagttcggactttgttattgaagtttttcagtaaaatctatcagacagaagaactgagatcttgtagattcagatatcgtagtaaagtgttatcccgttggctggctggcttaccattgcaacttgctcatcttggctcccgaaatcctgagctctctacacagcttatcgatatcattcataccgctgcagcacgagcaaataaagaattactaaaaagtttacaagctactgccctccgaatttatgatccacaagaaggtgctgtggtggttctccctgcagactctcagcagcgtttggttcagcttgtatatttcctacccagtctgccggctgatttgctttctcggttaagtcgttgctgtattatgggaagactcagttcaagtttggctgccatgcttatcgggatactgcacatgagatcatcattttctgggtggaagtattcagctaaagactggttgatgagtgatgtagactatttcagcttcttattttccacacttacagggttttcgaaagaggagttgacttggcttcagagccttcgaggagttcctcatgtcatccagacacagctttcccctgtgcttctctaccttacagatttggatcaatttttacaccactgggatgtaacagaggcagtttttcacagtttattggttattcctgcccgaagtcagaactttgacatcttgcaaagtgccatcagtaagcatttggttgggttgactgtaattcctgacagcacggctggctgtgtttttggtgttatctgtaagctcctggatcatacttgtgtagttagtgagactctactgccatttctggcttcttgttgctacagtcttctttattttctgctcactatagagaaaggggaagcagaacatctaagaaagagggacaagctgtggggggtctgtgtctccatcctggctctcttgcctcgagtcctcaggttgatgctgcagagcctgcgggtgaacagagttgggcctgaggagctgcctgttgtgggccagctgcttcgactgctgcttcagcatgcacccctcaggactcatatgttgaccaatgcgatcttggtgcagcagatcatcaagaatatcacggtaagaagcatggtaccggaggctttgcagtattagcataagaatgaatttatgacgggggcatgggggaaagtgtgttttgagggaggaaagggatcccatacattgagtccaggaattaatcccaatatggtagtttctcagggtctcccgtgctgtccagcacctgactgtgacttaatgggggggggggtgtgtctgtgattccagaattagtaataaaagtcttaaaataatcaaactcaatgaaggtgacaaagcttagtttagtttgaaaaggtaagggcatcagagtcattcctacctagactgtgatacagactctattaatgaactgtgacagcttggcaagtttttttctttctttcttacctatccaagcttgttttcctatctgtaaaaatgggaataatgccaactttattgtgttttggtgatcattaaaggagataacccaagtaaagtttttagtatacctgacatttgttaagtgctccataaatgttgtcattaaggaaattatttagcaggaataaacttcaggccaatttctagtcacttagttcactctaaagtaagaaaatcagaagttgcagacttcagctttgtctaatggttggctctctgccttcagctgtgtctgtttggccgggacagctctgttgtttaggattcctttggtgattttagtttggggggggggcggttaaaaaagtgtcttgtatagtttgattggcagattatcccttgagattcgtagtgatactttgaagtaatagtgcttttacatgcatataacacaggtgctcattagtattttttcagtagcctttgtaggggtaatggaagtggcagtggaataattcagaaatagtgaagggaagaaaatcaagagcttggattattcccagactggggaatcagcccatctttgtaaagaagagattgacagaaattgttggttggccctgtagagttattctcagttggcactggggtaaagatcatgagacactagaatggcaagagggagaggcaagggtgaagggatggttggtggtgaaatttcattagtctctagcatgtgcaggagggaacagacttaacaagaaaccattagcatttgaggatataactaggaattttcactgcctgtggtaatgcccaattaatagttccctgtttcctggaagacttcctatggtaatttacagatggggatacagttgccaaagctctgggaaattgtgtttgggtgtgaaaaatactgtcaggtagcatagtgatttgggtgcagttctcagattactcttgtttttctctccagacattgaagagtggaagtgttcaggaacagtggctcacagacttacattactgcttcaacgtgtatatcactgggcatccccaagggcccagtgcactggctacagtgtattgaagaggccatagtacctcctgtttgaagttgtttattcacatctatcttatttgaagaaaaagactgatgtaatagatctttgtcattaaagctgaacttttaaagaagtttacgaaccttctttctttgcactgatatatgaaaataatgtttgggcgttcctattgatgtgtaggctggcttcccggactagcacacgatacatggtcataggcggttgtgcattgtgcatttcataggagctaaatatttacaaaatagagagtgatactgtggtaccttctgttatataccaagaaactggctaaatctttgtaatcccatccaggcagacctccttctttgtgtttttgtgatcacaaaaacgatgaatgtaataattagtaaactaaaaaccaaggtaattaagtgaacacttcattgcctatctgtctatctcttaccgttagcacagaagtggcactgatctgaagaaaatgaaagcaacccc

SEQ ID NO: 356256 - DNA, 4768 bp, Homo sapiens
ggatttccgggcggcggaaggagacgcggccgcgtgaggacgaggctatttgaaaacacgctccgggagctagagcctgaggtcggcggcgcacgctgttgccccgtgggcttctgctccctcgcttgtcttctcgggcttctcgccccggccgcggccgggtcctcagtagtcgagaatgactaaaaaaagaaaacgccaacatgattttcaaaaagtaaaattgaaagttggtaaaaagaagcccaagttacaaaatgctactcctacaaactttaaaacaaagactatacatctgcctgagcaactcaaagaggatggaacacttccaacaaacaatagaaaacttaacataaaggatttgctgtcacagatgcatcactacaatgctggggttaaacaaagtgctcttcttggacttaaagaccttttgtctcaatacccatttataattgatgcacacctttcaaacatattaagtgaagtgactgctgtgtttacagataaagatgctaatgtacgattagcagcagttcaacttcttcaattcctggcccccaaaatacgagctgaacaaatttctccattttttcctttggtaagtgcccatctctctagtgccatgactcacattactgaaggaattcaggaggactctttaaaagttttggacattctgctggaacagtacccagctctaattactggccgtagcagcatattgcttaagaattttgtagaacttatttctcatcagcagctgtccaaaggactgataaatagagacagatcccagtcctggatactttctgtaaatcctaatcggagactcacttctcagcaatggaggctgaaagtcttagtgagactcagtaaattccttcaggccttggcagatggatccagtaggttgagagaaagtgaaggacttcaggaacagaaagaaaatccccatgccactagcaactccatttttatcaactggaaggaacatgccaacgaccagcaacacatccaggtttatgaaaatgggggttcacagccaaatgtcagttcacagttcaggctacggtatctggttggaggactgagtggtgtggatgaaggcctgtcatctactgaaaacctgaaaggatttattgagataataattccattgctaattgaatgctgggttgaagctgtacctccacaactagctactcctgttgggaatggtatagaacgagaacctctacaggttatgcagcaagttcttaatattatttcccttctgtggaaactctctaaacaacaggatgaaacccataaattggagtcatggcttcgaaagaactaccttattgattttaaacaccattttatgagtcgttttccatatgtcttaaaagaaataaccaagcacaaaaggaaagagccaaataaaagcatcaagcattgcacagttctctccaataacatagatcatctcttactgaatttaacactgtctgatatcatggtctccctggcaaatgcgtcaactttgcagaaggattgcagttggatagaaatgataaggaaatttgtaacagagacccttgaagatggctctaggctaaatagtaagcaactgaacagattgctgggagtatcctggaggttaatgcaaatacagccaaacagagaggacacagagactcttattaaggcagtttatacattatatcagcagaggggccttatccttccagttcggactttgttattgaagtttttcagtaaaatctatcagacagaagaactgagatcttgtagattcagatatcgtagtaaagtgttatcccgttggctggctggcttaccattgcaacttgctcatcttggctcccgaaatcctgagctctctacacagcttatcgatatcattcataccgctgcagcacgagcaaataaagaattactaaaaagtttacaagctactgccctccgaatttatgatccacaagaaggtgctgtggtggttctccctgcagactctcagcagcgtttggttcagcttgtatatttcctacccagtctgccggctgatttgctttctcggttaagtcgttgctgtattatgggaagactcagttcaagtttggctgccatgcttatcgggatactgcacatgagatcatcattttctgggtggaagtattcagctaaagactggttgatgagtgatgtagactatttcagcttcttattttccacacttacagggttttcgaaagaggagttgacttggcttcagagccttcgaggagttcctcatgtcatccagacacagctttcccctgtgcttctctaccttacagatttggatcaatttttacaccactgggatgtaacagaggcagtttttcacagtttattggttattcctgcccgaagtcagaactttgacatcttgcaaagtgccatcagtaagcatttggttgggttgactgtaattcctgacagcacggctggctgtgtttttggtgttatctgtaagctcctggatcatacttgtgtagttagtgagactctactgccatttctggcttcttgttgctacagtcttctttattttctgctcactatagagaaaggggaagcagaacatctaagaaagagggacaagctgtggggggtctgtgtctccatcctggctctcttgcctcgagtcctcaggttgatgctgcagagcctgcgggtgaacagagcctgttgtgggccagctgcttcgactgctgcttcagcatgcacccctcaggactcatatgttgaccaatgcgatcttggtgcagcagatcatcaagaatatcacggtaagaagcatggtaccggaggctttgcagtattagcataagaatgaatttatgacgggggcatgggggaaagtgtgttttgagggaggaaagggatcccatacattgagtccaggaattaatcccaatatggtagtttctcagggtctcccgtgctgtccagcacctgactgtgacttaatgggggggggggtgtgtctgtgattccagaattagtaataaaagtcttaaaataatcaaactcaatgaaggtgacaaagcttagtttagtttgaaaaggtaagggcatcagagtcattcctacctagactgtgatacagactctattaatgaactgtgacagcttggcaagtttttttctttctttcttacctatccaagcttgttttcctatctgtaaaaatgggaataatgccaactttattgtgttttggtgatcattaaaggagataacccaagtaaagtttttagtatacctgacatttgttaagtgctccataaatgttgtcattaaggaaattatttagcaggaataaacttcaggccaatttctagtcacttagttcactctaaagtaagaaaatcagaagttgcagacttcagctttgtctaatggttggctctctgccttcagctgtgtctgtttggccgggacagctctgttgtttaggattcctttggtgattttagtttggggggggggcggttaaaaaagtgtcttgtatagtttgattggcagattatcccttgagattcgtagtgatactttgaagtaatagtgcttttacatgcatataacacaggtgctcattagtattttttcagtagcctttgtaggggtaatggaagtggcagtggaataattcagaaatagtgaagggaagaaaatcaagagcttggattattcccagactggggaatcagcccatctttgtaaagaagagattgacagaaattgttggttggccctgtagagttattctcagttggcactggggtaaagatcatgagacactagaatggcaagagggagaggcaagggtgaagggatggttggtggtgaaatttcattagtctctagcatgtgcaggagggaacagacttaacaagaaaccattagcatttgaggatataactaggaattttcactgcctgtggtaatgcccaattaatagttccctgtttcctggaagacttcctatggtaatttacagatggggatacagttgccaaagctctgggaaattgtgtttgggtgtgaaaaatactgtcaggtagcatagtgatttgggtgcagttctcagattactcttgtttttctctccagacattgaagagtggaagtgttcaggaacagtggctcacagacttacattactgcttcaacgtgtatatcactgggcatccccaagggcccagtgcactggctacagtgtattgaagaggccatagtacctcctgtttgaagttgtttattcacatctatcttatttgaagaaaaagactgatgtaatagatctttgtcattaaagctgaacttttaaagaagtttacgaaccttctttctttgcactgatatatgaaaataatgtttgggcgttcctattgatgtgtaggctggcttcccggactagcacacgatacatggtcataggcggttgtgcattgtgcatttcataggagctaaatatttacaaaatagagagtgatactgtggtaccttctgttatataccaagaaactggctaaatctttgtaatcccatccaggcagacctccttctttgtgtttttgtgatcacaaaaacgatgaatgtaataattagtaaactaaaaaccaaggtaattaagtgaacacttcattgcctatctgtctatctcttaccgttagcacagaagtggcactgatctgaagaaaatgaaagcaacccc

SEQ ID NO: 356257 - DNA, 4401 bp, Homo sapiens
ggatttccgggcggcggaaggagacgcggccgcgtgaggacgaggctatttgaaaacacgctccgggagctagagcctgaggtcggcggcgcacgctgttgccccgtgggcttctgctccctcgcttgtcttctcgggcttctcgccccggccgcggccgggtcctcagtagtcgagaatgactaaaaaaagaaaacgccaacatgattttcaaaaagtaaaattgaaagttggtaaaaagaagcccaagttacaaaatgctactcctacaaactttaaaacaaagactatacatctgcctgagcaactcaaagaggatggaacacttccaacaaacaatagaaaacttaacataaaggatttgctgtcacagatgcatcactacaatgctggggttaaacaaagtgctcttcttggacttaaagaccttttgtctcaatacccatttataattgatgcacacctttcaaacatattaagtgaagtgactgctgtgtttacagataaagatgctaatgtacgattagcagcagttcaacttcttcaattcctggcccccaaaatacgagctgaacaaatttctccattttttcctttggtaagtgcccatctctctagtgccatgactcacattactgaaggaattcaggaggactctttaaaagttttggacattctgctggaacagtacccagctctaattactggccgtagcagcatattgcttaagaattttgtagaacttatttctcatcagcagctgtccaaaggactgataaatagagacagatcccagtcctggatactttctgtaaatcctaatcggagactcacttctcagcaatggaggctgaaagtcttagtgagactcagtaaattccttcaggccttggcagatggatccagtaggttgagagaaagtgaaggacttcaggaacagaaagaaaatccccatgccactagcaactccatttttatcaactggaaggaacatgccaacgaccagcaacacatccaggtttatgaaaatgggggttcacagccaaatgtcagttcacagttcaggctacggtatctggttggaggactgagtggtgtggatgaaggcctgtcatctactgaaaacctgaaaggatttattgagataataattccattgctaattgaatgctgggttgaagctgtacctccacaactagctactcctgttgggaatggtatagaacgagaacctctacaggttatgcagcaagttcttaatattatttcccttctgtggaaactctctaaacaacaggatgaaacccataaattggagtcatggcttcgaaagaactaccttattgattttaaacaccattttatgagtcgttttccatatgtcttaaaagaaataaccaagcacaaaaggaaagagccaaataaaagcatcaagcattgcacagttctctccaataacatagatcatctcttactgaatttaacactgtctgatatcatggtctccctggcaaatgcgtcaactttgcagaaggattgcagttggatagaaatgataaggaaatttgtaacagagacccttgaagatggctctaggctaaatagtaagcaactgaacagattgctgggagtatcctggaggttaatgcaaatacagccaaacagagaggacacagagactcttattaaggcagtttatacattatatcagcagaggggccttatccttccagttcggactttgttattgaagtttttcagtaaaatctatcagacagaagaactgagatcttgtagattcagatatcgtagtaaagtgttatcccgttggctggctggcttaccattgcaacttgctcatcttggctcccgaaatcctgagctctctacacagcttatcgatatcattcataccgctgcagcacgagcaaataaagaattactaaaaagtttacaagctactgccctccgaatttatgatccacaagaaggtgctgtggtggttctccctgcagactctcagcagcgtttggttcagcttgtatatttcctacccagtctgccggctgatttgctttctcggttaagtcgttgctgtattatgggaagactcagttcaagtttggctgccatgcttatcgggatactgcacatgagatcatcattttctgggtggaagtattcagctaaagactggttgatgagtgatgtagactatttcagcttcttattttccacacttacagggttttcgaaagaggagttgacttggcttcagagccttcgaggagttcctcatgtcatccagacacagctttcccctgtgcttctctaccttacagatttggatcaatttttacaccactgggatgtaacagaggcagtttttcacagtttattggttattcctgcccgaagtcagaactttgacatcttgcaaagtgccatcagtaagcatttggttgggttgactgtaattcctgacagcacggctggctgtgtttttggtgttatctgtaagctcctggatcatacttgtgtagttagtgagactctactgccatttctggcttcttgttgctacagtcttctttattttctgctcactatagagaaaggggaagcagaacatctaagaaagagggacaagctgtggggggtctgtgtctccatcctggctctcttgcctcgagtcctcaggttgatgctgcagagcctgcgggtgaacagagttgggcctgaggagctgcctgttgtgggccagctgcttcgactgctgcttcagcatgcacccctcaggactcatatgttgaccaatgcgatcttggtgcagcagatcatcaagaatatcacggtaagaagcatggtaccggaggctttgcagtattagcataagaatgaatttatgacgggggcatgggggaaagtgtgttttgagggaggaaagggatcccatacattgagtccaggaattaatcccaatatggtagtttctcagggtctcccgtgctgtccagcacctgactgtgacttaatgggggggggggtgtgtctgtgattccagaattagtaataaaagtcttaaaataatcaaactcaatgaaggtgacaaagcttagtttagtttgaaaaggtaagggcatcagagtcattcctacctagactgtgatacagactctattaatgaactgtgacagcttggcaagtttttttctttctttcttacctatccaagcttgttttcctatctgtaaaaatgggaataatgccaactttattgtgttttggtgatcattaaaggagataacccaagtaaagtttttagtatacctgacatttgttaagtgctccataaatgttgtcattaaggaaattatttagcaggaataaacttcaggccaatttctagtcacttagttcactctaaagtaagaaaatcagaagttgcagacttcagctttgtctaatggttggctctctgccttcagctgtgtctgtttggccgggacagctctgttgtttaggattcctttggtgattttagtttggggggggggcggttaaaaaagtgtcttgtatagtttgattggcagattatcccttgagattcgtagtgatactttgaagtaatagtgcttttacatgcatataacacaggtgctcattagtattttttcagtagcctttgtaggggtaatggaagtggcagtggaataattcagaaatagtgaagggaagaaaatcaagagcttggattattcccagactggggaatcagcccatctttgtaaagaagagattgacagaaattgttggttggccctgtagagttattctcagttggcactggggtaaagatcatgagacactagaatggcaagagggagaggcaagggtgaagggatggttggtggtgaaatttcattagtctctagcatgtgcaggagggaacagacttaacaagaaaccattagcatttgaggatataactaggaattttcactgcctgtggtaatgcccaattaatagttccctgtttcctggaagacttcctatggtaatttacagatggggatacagttgccaaagctctgggaaattgtgtttgggtgtgaaaaatactgtcaggtagcatagtgatttgggtgcagttctcagattactcttgtttttctctccagacattgaagagtggaagtgttcaggaacagtggctcacagacttacattactgcttcaacgtgtatatcactgggcatccccaagggcccagtgcactggctacagtgtattgaagaggccatagtacctcctgtttgaagttgtttattcacatctatcttatttgaagaaaaagactgatgtaatagatctttgtcattaaagctgaacttttaaaga

SEQ ID NO: 356258 - DNA, 1296 bp, Homo sapiens
ggagacattctacggtaaggtagcgatatcgtagtaaagtgttatcccgttggctggctggcttaccattgcaacttgctcatcttggctcccgaaatcctgagctctctacacagcttatcgatatcattcataccgctgcagcacgagcaaataaagaattactaaaaagtttacaagctactgccctccgaatttatgatccacaagaaggtgctgtggtggttctccctgcagactctcagcagcgtttggttcagcttgtatatttcctacccagtctgccggctgatttgctttctcggttaagtcgttgctgtattatgggaagactcagttcaagtttggctgccatgcttatcgggatactgcacatgagatcatcattttctgggtggaagtattcagctaaagactggttgatgagtgatgtagactatttcagcttcttattttccacacttacagggttttcgaaagaggagttgacttggcttcagagccttcgaggagttcctcatgtcatccagacacagctttcccctgtgcttctctaccttacagatttggatcaatttttacaccactgggatgtaacagaggcagtttttcacagtttattggttattcctgcccgaagtcagaactttgacatcttgcaaagtgccatcagtaagcatttggttgggttgactgtaattcctgacagcacggctggctgtgtttttggtgttatctgtaagctcctggatcatacttgtgtagttagtgagactctactgccatttctggcttcttgttgctacagtcttctttattttctgctcactatagagaaaggggaagcagaacatctaagaaagagggacaagctgtggggggtctgtgtctccatcctggctctcttgcctcgagtcctcaggttgatgctgcagagcctgcgggtgaacagagttgggcctgaggagctgcctgttgtgggccagctgcttcgactgctgcttcagcatgcacccctcaggactcatatgttgaccaatgcgatcttggtgcagcagatcatcaagaatatcacgacattgaagagtggaagtgttcaggaacagtggctcacagacttacattactgcttcaacgtgtatatcactgggcatccccaagggcccagtgcactggctacagtgtattgaagaggccatagtacctcctgtttgaagttgtttattcacatctatcttatttgaagaaaaagactgatgtaatagatctttgtcattaaagctgaacttttaaaga

SEQ ID NO: 356259 - DNA, 1639 bp, Homo sapiens
ggatttccgggcggcggaaggagacgcggccgcgtgaggacgaggctatttgaaaacacgctccgggagctagagcctgaggtcggcggcgcacgctgttgccccgtgggcttctgctccctcgcttgtcttctcgggcttctcgccccggccgcggccgggtcctcagtagtcgagaatgactaaaaaaagaaaacgccaacatgattttcaaaaagtaaaattgaaagttggtaaaaagaagcccaagttacaaaatgctactcctacaaactttaaaacaaagactatacatctgcctgagcaactcaaagaggatggaacacttccaacaaacaatagaaaacttaacataaaggatttgctgtcacagatgcatcactacaatgctggggttaaacaaagtgctcttcttggacttaaagaccttttgtctcaatacccatttataattgatgcacacctttcaaacatattaagtgaagtgactgctgtgtttacagataaagatgctaatgtacgattagcagcagttcaacttcttcaattcctggcccccaaaatacgagctgaacaaatttctccattttttcctttggtaagtgcccatctctctagtgccatgactcacattactgaaggaattcaggaggactctttaaaagttttggacattctgctggaacagtacccagctctaattactggccgtagcagcatattgcttaagaattttgtagaacttatttctcatcagcagctgtccaaaggactgataaatagagacagatcccagtcctggatactttctgtaaatcctaatcggagactcacttctcagcaatggaggctgaaagtcttagtgagactcagtaaattccttcaggccttggcagatggatccagtaggttgagagaaagtgaaggacttcaggaacagaaagaaaatccccatgccactagcaactccatttttatcaactggaaggaacatgccaacgaccagcaacacatccaggtttatgaaaatgggggttcacagccaaatgtcagttcacagttcaggctacggtatctggttggaggactgagtggtgtggatgaaggcctgtcatctactgaaaacctgaaaggatttattgagataataattccattgctaattgaatgctgggttgaagctgtacctccacaactagctactcctgttgggaatggtatagaacgagaacctctacaggttatgcagcaagttcttaatattatttcccttctgtggaaactctctaaacaacaggatgaaacccataaattggagtcatggcttcgaaagaactaccttattgattttaaacaccattttatgagtcgttttccatatgtcttaaaagaaataaccaagcacaaaaggaaagagccaaataaaagcatcaagcattgcacagttctctccaataacatagatcatctcttactgaatttaacactgtctgatatcatggtctccctggcaaatgcgtcaactttgcagaaggattgcagttggatagaaatgataaggaaatttgtaacagagaccccctttgaaaatagggttcttgggcttaaatagttagggccacttggaccaaaattgttg

SEQ ID NO: 356260 - DNA, 1415 bp, Homo sapiens
caggcgggcggatcacctgaggtcaggagtttgagaccagcctggccaacatggcaaaaccccgtctctactaaaaatacaaaaattagtggggtgtggtggcaggcgcctgtaatcccacccactcaccctgcttcttcatgcaccctatactcatttccacactgccaggccatggtcccgtgctctgcctggcacacttacgtctctctcttctcccttggcctctatgcttttctcccccatctgcctccctcgccttctcacatcccttccttttctgactcttctgaccttttctgacccttctcatctaccttctcttccctctcacttaccccactgcccctctcaacaccgttctctcagcaccctcactccccacacacttcttcccaatcatggaagctggactctacacccatagagtgggataccatcctctgaggcctggtggcagattcagggtgaagggctggggggcattttcaacagattcatagctcctcactggtctccccattaccatgtggcacttcctgtctgcaaaggaaatgccgccatgttggactgagggtggcctccaggcagcctgaagaaagtgatttggggagccaggagcctggccatcttgcacctggccaaagggatcagacaaagacaaggtctctcctcctcagcaccccacccttgacatcacctttttcctgccctctctcctccctccctccttcccattatcccttcccttctcctcccacaatgggttccatgtagtcaacctggtggtagggcctccgggaagagtggggagaaggcagggccatcagggtgtctgagtgtggcgggccgggtttggggactaagaggccctgtaactctccctcctctcccctcccaccccaaccttccctgccagcctttgatttctcctcacaggtgactcgatgctggggaaacaggatcccttctgtgcttccgtaattttcttcttttactcttcgtcctttcctttcagcgcttgaggccttcagccaccaccgagggggatgcccatctgctccttgaagcctccccacagcactggggacacggctgactcccgcggctgggacagcggggaaggggggtgggaggcagcgagctcagcacaggggggcagtcagatgggtgtaggttcaaggctcgactgggctcttgagttttctggctctgaaaccttgagcaaatgatttaatttctctgggccactacggaaggaggtgtgagtccatgagatgacatgtgagaagcgcttggcccagggccggccacaaagtcgctcctggtggcagggttttgagtgccgagtgtaaacttcccaagggcagaggcttcgtcttcacccgccgccccagcgcccagacccatgcctg

SEQ ID NO: 356261 - DNA, 8061 bp, Homo sapiens
  misc_feature (6026)..(6026): n is a, c, g, or t
gggtttggccctggacggccttgcctttcccgccaaacccggtttaagggaactcctcaaatgctgtgggctccttttccccatgggtatatatcggcggatccctttttttttttttttcctaatttttggtcggcggcggtgctgggccaggggaaggaagggacacggaggccgccctcgtcccgccacctcctacccgcttccccccagccccggctccgggagatgtgccgggcggggggcccgggttcgccgagccgcaggagagacacgctgggccgaccccagagaggcgctggacaggctggtggtccaggccgtggtgcctgccaggtgatgtggggcaaagccccccgcacaggccactgagagctccggacacgcacccggctgccaccatggcccgcctagccgcagtgctctggaatctgtgtgtcaccgccgtcctggtcacctcggccacccaaggcctgagccgggccgggctcccgttcgggctgatgcgccgggagctggcgtgtgaaggctaccccatcgagctgcggtgccccggcagcgacgtcatcatggtggagaatgccaactacgggcgcacggacgacaagatttgcgatgctgaccctttccagatggagaatgtgcagtgctacctgccggacgccttcaagatcatgtcacagaggtgtaacaaccgcacccagtgcgtggtggtcgccggctcggatgcctttcctgacccctgtcctgggacctacaagtacctggaggtgcagtacgactgtgtcccctacaaagtggagcagaaagggattgggggggtggggcggggccccccacctttctgacatcagcgctgccttggtccctcttcccgagccggggatggtcgcagagtcttcgtgtgcccagggaccctgcagaaggtgctggagcccacctcgacacacgagtcagagcaccagtctggcgcatggtgcaaggacccgctgcaggcgggtgaccgcatctacgtgatgccctggatcccctaccgcacggacacactgactgagtatgcctcgtgggaggactacgtggccgcccgccacaccaccacctaccgcctgcccaaccgcgtggatggcacaggctttgtggtctacgatggtgccgtcttctacaacaaggagcgcacgcgcaacatcgtcaagtatgacctacggacgcgcatcaagagcggggagacggtcatcaataccgccaactaccatgacacctcgccctaccgctggggcggaaagaccgacattgacctggcggtggacgagaacgggctgtgggtcatctacgccactgagggcaacaacgggcggctggtggtgagccagctgaacccctacacactgcgctttgagggcacgtgggagacgggttacgacaagcgctcggcatccaacgccttcatggtgtgtggggtcctgtacgtcctgcgttccgtgtacgtggatgatgacagcgaggcggctggcaaccgcgtggactatgccttcaacaccaatgccaaccgcgaggagcctgtcagcctcaccttccccaacccctaccagttcatctcctccgttgactacaaccctcgcgacaaccagctgtacgtctggaacaactatttcgtggtgcgctacagcctggagttcgggccgcccgaccccagtgctggcccagccacttccccacccctcagcacgaccaccacagccaggcccacgcccctcaccagcacagcctcgcccgcagccaccaccccgctccgccgggcacccctcaccacgcacccagtgggtgccatcaaccagctgggacctgatctgcctccagccacagccccagtccccagcacccggcggcccccagccccgaatctacacgtgtcccctgagctcttctgcgagccccgagaggtacggcgggtccagtggccggccacccagcagggcatgctggtggagaggccctgccccaaggggactcgaggaattgcctccttccagtgtctaccagccttggggctctggaacccccggggccctgacctcagcaactgcacctccccctgggtcaaccaggtggcccagaagatcaagagtggggagaacgcggccaacatcgccagcgagctggcccgacacacccggggctccatctacgcgggggacgtctcctcctctgtgaagctgatggagcagctgctggacatcctggatgcccagctgcaggccctgcggcccatcgagcgcgagtcagccggcaagaactacaacaagatgcacaagcgagagagaacttgtaaggattatatcaaggccgtggtggagacagtggacaatctgctccggccagaagctctggagtcctggaaggacatgaatgccacggagcaggtgcacacggccaccatgctcctcgacgtcctggaggagggcgccttcctgctggccgacaatgtcagggagcctgcccgcttcctggctgccaaggagaacgtggtcctggaggtcacagtcctgaacacagagggccaggtgcaggagctggtgttcccccaggaggagtacccgagaaagaactccatccagctgtctgccaaaaccatcaagcagaacagccgcaatggggtggtcaaagttgtcttcatcctctacaacaacctgggcctcttcctgtccacggagaatgccacagtgaagctggccggcgaagcaggcccgggtggccctgggggcgcctctctagtggtgaactcacaggtcatcgcagcatccatcaacaaggagtccagccgcgtcttcctcatggaccctgtcatcttcaccgtggcccacctggaggacaagaaccacttcaatgctaactgctccttctggaactactcggagcgttccatgctgggctactggtcgacccaaggctgccgcctggtggagtccaacaagacccataccacgtgtgcctgcagccacctcaccaacttcgctgtgctcatggctcaccgtgagatctaccagggccgcatcaacgagctgctgctgtcggtcatcacctgggtgggcattgtgatctccctggtctgcttggccatctgcatctccaccttctgcttcctgcgggggctgcagaccgaccgcaacaccatccacaagaacctgtgcatcaacctcttcctggctgagctgctcttcctggtcgggatcgacaagactcagtatgagattgcctgccccatcttcgccggcctgctgcactatttcttcctggctgccttctcctggctgtgcctggagggcgtgcacctctacctgctactagtggaggtgtttgagagcgagtattcccgcaccaagtactactacctgggtggctactgcttcccggccctggtggtgggcatcgcggctgccattgactaccgcagctacggcaccgagaaggcctgctggctccgagtggacaattacttcatctggagtttcatcgggccagtctccttcgttatcgtggtcaacctggtgttcctcatggtgaccctgcacaagatgatccgaagctcatctgtgctcaagcccgactccagccgcctggacaacattaaatcctgggcgctgggggccatcgcgctgctgttcctgctgggcctcacctgggctttcggcctcctcttcatcaacaaggagtcggtggtcatggcctatctcttcaccaccttcaacgccttccagggggtcttcatcttcgtctttcactgcgccttacagaagaaggtgcacaaggagtacagcaagtgcctgcgtcactcctactgctgcatccgctccccacccgggggcactcacggatccctcaagacctcagccatgcgaagcaacacccgctactacacagggacccagagccgaattcggaggatgtggaatgacactgtgaggaaacagacggagtcctccttcatggcgggtgacatcaacagcacccccaccctgaaccgaggtaccatggggaaccacctgctgaccaaccccgtgctgcagccccgtgggggcaccagtccctacaacaccctcatcgccgagtcagtgggcttcaatccctcctcgccccctgtcttcaactccccagggagctaccgggaacccaagcaccccttgggaggccgggaagcctgtggcatggacaccctgcccctgaacggcaacttcaataacagttactccttgcgaagtggggatttccctcccggggatgggggccctgagccgccccgaggccggaacctagccgatgcggcggcctttgagaagatgatcatctcagagctggtgcacaacaacctgcgggggagcagcagcgcggccaagggccctccaccgcctgagccccctgtgccacctgtgccagggggcgggggcgaggaagaggcgggcgggcccgggggtgctgaccgggccgagattgaacttctctataaggccctggaggagcctctgctgctgccccgggcccagtcggtgctgtaccagagcgatctggacgagtcggagagctgcacggccgaggacggcgccaccagccggcccctctcctcccctcctggccgggactccctctatgccagcggggccaacctgcgggactcaccctcctacccggacagcagccctgaggggcccagtgaggccctgcccccaccccctcccgcaccccccggcccccccgaaatctactacacctcgcgcccgccagccctggtggcccggaatcccctgcagggctactaccaggtgcggcgtcctagccacgagggctacctggcagccccaggccttgaggggccagggcccgatggggacgggcagatgcagctggtcaccagtctctgagggcacctcatggaccaggggctggtggcccaggccagggagggaaccctgggcagggctctggtgggagagggagacagatggaggcagtggctggtgggccactctctccaggtgcccctcagccatgggccctacagtcccctcaggggactctaacctgggggcctgaggtgccagggttcacagacagggtttcccaccagccacacgcaccagctctatttgggggaagtgtagtgaggaggagcccagaggaccccaggggagtgaggagggagaacttggaagggtgcagcccacttccagactctcccctctcccacccttctaccctgtgaagggaaatgagggctttagtttcctgggcagggaggggcagcttctgaggttgccaaaggcccccactggatggaacctgttagctgctcctctccgcagccagaaatgctgccggctgcacccagagggagcagtgaggcaggacagatggacaggttcctcctgcgctgtaattccctgctccctggagactgggaaaaggccgcagggcagggggactgggcggtggtggctggtggtttaaaggttgaactttctctgaagctcctttccccttgctcttggtccctgccccgcaagcaaacctgccccctctgcctcccagtgcacccaatgaccccctcccttggggcgactcctgatgaagcacaactccccgcagggcccccagcccacaggggtggccatatttgggcagttcccagtcctgtgggctcggctatctggggagcagattttgggtctggatctccctggggagtgggtcctgggcttggatctttccctagggggccctcttactccttcctctctcctcctccttccccattgctgtaaatatttcaacgaaatggaaaagaaaaaaaaagacaaaaaaaaaaaaaaagaaaagaaaaaaatctcatcacttgaagccaccgggagcctgcggcccgggccagcccgggctttctccggagcagagcagcgctgctggcctggcagccaggacttctccgtgtacgtgcatccccagtccccgccggggcgggcgggccgccagagcagctntttacaatccagagacagaaaacaaaatctagatgcaacagcgaaacaaagaacccatttccttcctggcacccgtttctgtcccctcctttcctgctccgcctgcccggcatcatcagcccttctggggcgtgtacctctcactgcctgccccaggaccagaggcctgtctcccccttccctccccaccggcccgggggagacctcttcacacccaaagatgctttgtcaagatggctgcgctgtccctttgagttcctgcttcttgtatattgctctggggactctcgccggggaagatggggctgatttcccacctagagaggttgatggcagaaggaaaatggggaggcactggggttgtggagggcatgggtatggctgaggagggtgctgggaacggcaaggcggtctgggggatggggaggggcaaaggtgagagatcaccttccctatcctccaccttcccgcagggaagacgaagccaggtgccagggctggggtcgggacacccatgttctgggcggcttgaccccaaatcccagaccccggaagctccaggctcgggatgtgtcctgagcacctgtcccggccccctcctctccagcctgtcaggccagcctccccagcccccttccctcaactctaggggcagcatagccccaggccaccctagcccagcccctgcattgccgtttccccagaggtggcccctccacctctgctctgacctctccccatctctctgcccctccttttctcacaagtgccatgagttttcaaacatcttcgggtctcagcctgctgctgccatgaactttgttgggttaagggggaggggctctaggaaggaactggggggaaggggacaggtaggtggctggagggaccctttttgctgctagaaagcccctcccttctcccggggagctggggctggcttgtccccatcaattaggggagaaggggtcagaccaaagatggtggtttgtcccgtgtaagggaacaggtgtggggaagaggtggggttgggttccaactctggctttttctggtagaaaggcctaacccattacaccagaagaccatgggtgaagtctagatggggaggagaagtgaggccagggacagtcttgccagacgactctgaggagggcaagggacagttccatggcccttcccggactgcactaggctgggagctctgttgtgtggaggggtggtcagaggtctgtgaagagcgggcaggaggcatgagcaggcgaggagctggcctgtcccgggaagcagcccagcctgtggctgcccccgacaccaggaggagggccaggagagttccagggggctgaggcacacagagaggccaacttcctccctgcccagccttccttgtatctctccagactcggacaatcaaagggagagagggtgtatcgggtcctgttccagccggcatcgccgggtggcttccaggcctcagagctgtgtggcagggccccctgctggggctggacatcactgcagtccagtgcaaagccgcccccagagcccaggtgtccccccaacctaaccagacctggtgccttgacgcccccaccccagctgggacggtacagagaagggtcttggtttcctctcctactcccttccttaggctcctgaactcgtttgctcctaaatcttgttaattctttttctctggattttggtttcttttggctttcccttgccttcccctttctctgtctccaacactctttccccatgtctttctggctgtctctatgttcctcttctcttatcctcaactttctgtccattcgggcctcctccccacctcccacgccccagcccctccctccttggtctccttttcgatatgccaaaccaattttgggtcgagtgcatttaacgagaacaaaacaaaaggctcataacaacaagaacgtttcagaaaaaaacaaaaagttttaaaaaaattgttgagtcaaaaagtcaaacaataaagaaattaagatttcttggaaaaaaaaaa

SEQ ID NO: 356262 - DNA, 7932 bp, Homo sapiens
  misc_feature (5897)..(5897): n is a, c, g, or t
gggtttggccctggacggccttgcctttcccgccaaacccggtttaagggaactcctcaaatgctgtgggctccttttccccatgggtatatatcggcggatccctttttttttttttttcctaatttttggtcggcggcggtgctgggccaggggaaggaagggacacggaggccgccctcgtcccgccacctcctacccgcttccccccagccccggctccgggagatgtgccgggcggggggcccgggttcgccgagccgcaggagagacacgctgggccgaccccagagaggcgctggacaggctggtggtccaggccgtggtgcctgccaggtgatgtggggcaaagccccccgcacaggccactgagagctccggacacgcacccggctgccaccatggcccgcctagccgcagtgctctggaatctgtgtgtcaccgccgtcctggtcacctcggccacccaaggcctgagccgggccgggctcccgttcgggctgatgcgccgggagctggcgtgtgaaggctaccccatcgagctgcggtgccccggcagcgacgtcatcatggtggagaatgccaactacgggcgcacggacgacaagatttgcgatgctgaccctttccagatggagaatgtgcagtgctacctgccggacgccttcaagatcatgtcacagaggtgtaacaaccgcacccagtgcgtggtggtcgccggctcggatgcctttcctgacccctgtcctgggacctacaagtacctggaggtgcagtacgactgtgtcccctacaaagtggagcagaaagggattgggggggtggggcggggccccccacctttctgacatcagcgctgccttggtccctcttcccgagccggggatggtcgcagagtcttcgtgtgcccagggaccctgcagaaggtgctggagcccacctcgacacacgagtcagagcaccagtctggcgcatggtgcaaggacccgctgcaggcgggtgaccgcatctacgtgatgccctggatcccctaccgcacggacacactgactgagtatgcctcgtgggaggactacgtggccgcccgccacaccaccacctaccgcctgcccaaccgcgtggatggcacaggctttgtggtctacgatggtgccgtcttctacaacaaggagcgcacgcgcaacatcgtcaagtatgacctacggacgcgcatcaagagcggggagacggtcatcaataccgccaactaccatgacacctcgccctaccgctggggcggaaagaccgacattgacctggcggtggacgagaacgggctgtgggtcatctacgccactgagggcaacaacgggcggctggtggtgagccagctgaacccctacacactgcgctttgagggcacgtgggagacgggttacgacaagcgctcggcatccaacgccttcatggtgtgtggggtcctgtacgtcctgcgttccgtgtacgtggatgatgacagcgaggcggctggcaaccgcgtggactatgccttcaacaccaatgccaaccgcgaggagcctgtcagcctcaccttccccaacccctaccagttcatctcctccgttgactacaaccctcgcgacaaccagctgtacgtctggaacaactatttcgtggtgcgctacagcctggagttcgggccgcccgaccccagtgctggcccagccacttccccacccctcagcacgaccaccacagccaggcccacgcccctcaccagcacagcctcgcccgcagccaccaccccgctccgccgggcacccctcaccacgcacccagtgggtgccatcaaccagctgggacctgatctgcctccagccacagccccagtccccagcacccggcggcccccagccccgaatctacacgtgtcccctgagctcttctgcgagccccgagaggtacggcgggtccagtggccggccacccagcagggcatgctggtggagaggccctgccccaaggggactcgaggaattgcctccttccagtgtctaccagccttggggctctggaacccccggggccctgacctcagcaactgcacctccccctgggtcaaccaggtggcccagaagatcaagagtggggagaacgcggccaacatcgccagcgagctggcccgacacacccggggctccatctacgcgggggacgtctcctcctctgtgaagctgatggagcagctgctggacatcctggatgcccagctgcaggccctgcggcccatcgagcgcgagtcagccggcaagaactacaacaagatgcacaagcgagagagaacttgtaaggattatatcaaggccgtggtggagacagtggacaatctgctccggccagaagctctggagtcctggaaggacatgaatgccacggagcaggtgcacacggccaccatgctcctcgacgtcctggaggagggcgccttcctgctggccgacaatgtcagggagcctgcccgcttcctggctgccaaggagaacgtggtcctggaggtcacagtcctgaacacagagggccaggtgcaggagctggtgttcccccaggaggagtacccgagaaagaactccatccagctgtctgccaaaaccatcaagcagaacagccgcaatggggtggtcaaagttgtcttcatcctctacaacaacctgggcctcttcctgtccacggagaatgccacagtgaagctggccggcgaagcaggcccgggtggccctgggggcgcctctctagtggtgaactcacaggtcatcgcagcatccatcaacaaggagtccagccgcgtcttcctcatggaccctgtcatcttcaccgtggcccacctggaggacaagaaccacttcaatgctaactgctccttctggaactactcggagcgttccatgctgggctactggtcgacccaaggctgccgcctggtggagtccaacaagacccataccacgtgtgcctgcagccacctcaccaacttcgctgtgctcatggctcaccgtgagatctaccagggccgcatcaacgagctgctgctgtcggtcatcacctgggtgggcattgtgatctccctggtctgcttggccatctgcatctccaccttctgcttcctgcgggggctgcagaccgaccgcaacaccatccacaagaacctgtgcatcaacctcttcctggctgagctgctcttcctggtcgggatcgacaagactcagtatgagattgcctgccccatcttcgccggcctgctgcactatttcttcctggctgccttctcctggctgtgcctggagggcgtgcacctctacctgctactagtggaggtgtttgagagcgagtattcccgcaccaagtactactacctgggtggctactgcttcccggccctggtggtgggcatcgcggctgccattgactaccgcagctacggcaccgagaaggcctgctggctccgagtggacaattacttcatctggagtttcatcgggccagtctccttcgttatcgtggtcaacctggtgttcctcatggtgaccctgcacaagatgatccgaagctcatctgtgctcaagcccgactccagccgcctggacaacattaaatcctgggcgctgggggccatcgcgctgctgttcctgctgggcctcacctgggctttcggcctcctcttcatcaacaaggagtcggtggtcatggcctatctcttcaccaccttcaacgccttccagggggtcttcatcttcgtctttcactgcgccttacagaagaaggtgcacaaggagtacagcaagtgcctgcgtcactcctactgctgcatccgctccccacccgggggcactcacggatccctcaagacctcagccatgcgaagcaacacccgctactacacagggacccagagccgaattcggaggatgtggaatgacactgtgaggaaacagacggagtcctccttcatggcgggtgacatcaacagcacccccaccctgaaccgaggtaccatggggaaccacctgctgaccaaccccgtgctgcagccccgtgggggcaccagtccctacaacaccctcatcgccgagtcagtgggcttcaatccctcctcgccccctgtcttcaactccccagggagctaccgggaacccaagcaccccttgggaggccgggaagcctgtggcatggacaccctgcccctgaacggcaacttcaataacagttactccttgcgaagtggggatttccctccaccgcctgagccccctgtgccacctgtgccagggggcgggggcgaggaagaggcgggcgggcccgggggtgctgaccgggccgagattgaacttctctataaggccctggaggagcctctgctgctgccccgggcccagtcggtgctgtaccagagcgatctggacgagtcggagagctgcacggccgaggacggcgccaccagccggcccctctcctcccctcctggccgggactccctctatgccagcggggccaacctgcgggactcaccctcctacccggacagcagccctgaggggcccagtgaggccctgcccccaccccctcccgcaccccccggcccccccgaaatctactacacctcgcgcccgccagccctggtggcccggaatcccctgcagggctactaccaggtgcggcgtcctagccacgagggctacctggcagccccaggccttgaggggccagggcccgatggggacgggcagatgcagctggtcaccagtctctgagggcacctcatggaccaggggctggtggcccaggccagggagggaaccctgggcagggctctggtgggagagggagacagatggaggcagtggctggtgggccactctctccaggtgcccctcagccatgggccctacagtcccctcaggggactctaacctgggggcctgaggtgccagggttcacagacagggtttcccaccagccacacgcaccagctctatttgggggaagtgtagtgaggaggagcccagaggaccccaggggagtgaggagggagaacttggaagggtgcagcccacttccagactctcccctctcccacccttctaccctgtgaagggaaatgagggctttagtttcctgggcagggaggggcagcttctgaggttgccaaaggcccccactggatggaacctgttagctgctcctctccgcagccagaaatgctgccggctgcacccagagggagcagtgaggcaggacagatggacaggttcctcctgcgctgtaattccctgctccctggagactgggaaaaggccgcagggcagggggactgggcggtggtggctggtggtttaaaggttgaactttctctgaagctcctttccccttgctcttggtccctgccccgcaagcaaacctgccccctctgcctcccagtgcacccaatgaccccctcccttggggcgactcctgatgaagcacaactccccgcagggcccccagcccacaggggtggccatatttgggcagttcccagtcctgtgggctcggctatctggggagcagattttgggtctggatctccctggggagtgggtcctgggcttggatctttccctagggggccctcttactccttcctctctcctcctccttccccattgctgtaaatatttcaacgaaatggaaaagaaaaaaaaagacaaaaaaaaaaaaaaagaaaagaaaaaaatctcatcacttgaagccaccgggagcctgcggcccgggccagcccgggctttctccggagcagagcagcgctgctggcctggcagccaggacttctccgtgtacgtgcatccccagtccccgccggggcgggcgggccgccagagcagctntttacaatccagagacagaaaacaaaatctagatgcaacagcgaaacaaagaacccatttccttcctggcacccgtttctgtcccctcctttcctgctccgcctgcccggcatcatcagcccttctggggcgtgtacctctcactgcctgccccaggaccagaggcctgtctcccccttccctccccaccggcccgggggagacctcttcacacccaaagatgctttgtcaagatggctgcgctgtccctttgagttcctgcttcttgtatattgctctggggactctcgccggggaagatggggctgatttcccacctagagaggttgatggcagaaggaaaatggggaggcactggggttgtggagggcatgggtatggctgaggagggtgctgggaacggcaaggcggtctgggggatggggaggggcaaaggtgagagatcaccttccctatcctccaccttcccgcagggaagacgaagccaggtgccagggctggggtcgggacacccatgttctgggcggcttgaccccaaatcccagaccccggaagctccaggctcgggatgtgtcctgagcacctgtcccggccccctcctctccagcctgtcaggccagcctccccagcccccttccctcaactctaggggcagcatagccccaggccaccctagcccagcccctgcattgccgtttccccagaggtggcccctccacctctgctctgacctctccccatctctctgcccctccttttctcacaagtgccatgagttttcaaacatcttcgggtctcagcctgctgctgccatgaactttgttgggttaagggggaggggctctaggaaggaactggggggaaggggacaggtaggtggctggagggaccctttttgctgctagaaagcccctcccttctcccggggagctggggctggcttgtccccatcaattaggggagaaggggtcagaccaaagatggtggtttgtcccgtgtaagggaacaggtgtggggaagaggtggggttgggttccaactctggctttttctggtagaaaggcctaacccattacaccagaagaccatgggtgaagtctagatggggaggagaagtgaggccagggacagtcttgccagacgactctgaggagggcaagggacagttccatggcccttcccggactgcactaggctgggagctctgttgtgtggaggggtggtcagaggtctgtgaagagcgggcaggaggcatgagcaggcgaggagctggcctgtcccgggaagcagcccagcctgtggctgcccccgacaccaggaggagggccaggagagttccagggggctgaggcacacagagaggccaacttcctccctgcccagccttccttgtatctctccagactcggacaatcaaagggagagagggtgtatcgggtcctgttccagccggcatcgccgggtggcttccaggcctcagagctgtgtggcagggccccctgctggggctggacatcactgcagtccagtgcaaagccgcccccagagcccaggtgtccccccaacctaaccagacctggtgccttgacgcccccaccccagctgggacggtacagagaagggtcttggtttcctctcctactcccttccttaggctcctgaactcgtttgctcctaaatcttgttaattctttttctctggattttggtttcttttggctttcccttgccttcccctttctctgtctccaacactctttccccatgtctttctggctgtctctatgttcctcttctcttatcctcaactttctgtccattcgggcctcctccccacctcccacgccccagcccctccctccttggtctccttttcgatatgccaaaccaattttgggtcgagtgcatttaacgagaacaaaacaaaaggctcataacaacaagaacgtttcagaaaaaaacaaaaagttttaaaaaaattgttgagtcaaaaagtcaaacaataaagaaattaagatttcttggaaaaaaaaaa

SEQ ID NO: 356263 - DNA, 8130 bp, Homo sapiens
  misc_feature (6095)..(6095): n is a, c, g, or t
gggtttggccctggacggccttgcctttcccgccaaacccggtttaagggaactcctcaaatgctgtgggctccttttccccatgggtatatatcggcggatccctttttttttttttttcctaatttttggtcggcggcggtgctgggccaggggaaggaagggacacggaggccgccctcgtcccgccacctcctacccgcttccccccagccccggctccgggagatgtgccgggcggggggcccgggttcgccgagccgcaggagagacacgctgggccgaccccagagaggcgctggacaggctggtggtccaggccgtggtgcctgccaggtgatgtggggcaaagccccccgcacaggccactgagagctccggacacgcacccggctgccaccatggcccgcctagccgcagtgctctggaatctgtgtgtcaccgccgtcctggtcacctcggccacccaaggcctgagccgggccgggctcccgttcgggctgatgcgccgggagctggcgtgtgaaggctaccccatcgagctgcggtgccccggcagcgacgtcatcatggtggagaatgccaactacgggcgcacggacgacaagatttgcgatgctgaccctttccagatggagaatgtgcagtgctacctgccggacgccttcaagatcatgtcacagaggtgtaacaaccgcacccagtgcgtggtggtcgccggctcggatgcctttcctgacccctgtcctgggacctacaagtacctggaggtgcagtacgactgtgtcccctacaaagtggagcagaaagggattgggggggtggggcggggccccccacctttctgacatcagcgctgccttggtccctcttcccgagccggggatggtcgcagagtcttcgtgtgcccagggaccctgcagaaggtgctggagcccacctcgacacacgagtcagagcaccagtctggcgcatggtgcaaggacccgctgcaggcgggtgaccgcatctacgtgatgccctggatcccctaccgcacggacacactgactgagtatgcctcgtgggaggactacgtggccgcccgccacaccaccacctaccgcctgcccaaccgcgtggatggcacaggctttgtggtctacgatggtgccgtcttctacaacaaggagcgcacgcgcaacatcgtcaagtatgacctacggacgcgcatcaagagcggggagacggtcatcaataccgccaactaccatgacacctcgccctaccgctggggcggaaagaccgacattgacctggcggtggacgagaacgggctgtgggtcatctacgccactgagggcaacaacgggcggctggtggtgagccagctgaacccctacacactgcgctttgagggcacgtgggagacgggttacgacaagcgctcggcatccaacgccttcatggtgtgtggggtcctgtacgtcctgcgttccgtgtacgtggatgatgacagcgaggcggctggcaaccgcgtggactatgccttcaacaccaatgccaaccgcgaggagcctgtcagcctcaccttccccaacccctaccagttcatctcctccgttgactacaaccctcgcgacaaccagctgtacgtctggaacaactatttcgtggtgcgctacagcctggagttcgggccgcccgaccccagtgctggcccagccacttccccacccctcagcacgaccaccacagccaggcccacgcccctcaccagcacagcctcgcccgcagccaccaccccgctccgccgggcacccctcaccacgcacccagtgggtgccatcaaccagctgggacctgatctgcctccagccacagccccagtccccagcacccggcggcccccagccccgaatctacacgtgtcccctgagctcttctgcgagccccgagaggtacggcgggtccagtggccggccacccagcagggcatgctggtggagaggccctgccccaaggggactcgaggaattgcctccttccagtgtctaccagccttggggctctggaacccccggggccctgacctcagcaactgcacctccccctgggtcaaccaggtggcccagaagatcaagagtggggagaacgcggccaacatcgccagcgagctggcccgacacacccggggctccatctacgcgggggacgtctcctcctctgtgaagctgatggagcagctgctggacatcctggatgcccagctgcaggccctgcggcccatcgagcgcgagtcagccggcaagaactacaacaagatgcacaagcgagagagaacttgtaaggattatatcaaggccgtggtggagacagtggacaatctgctccggccagaagctctggagtcctggaaggacatgaatgccacggagcaggtgcacacggccaccatgctcctcgacgtcctggaggagggcgccttcctgctggccgacaatgtcagggagcctgcccgcttcctggctgccaaggagaacgtggtcctggaggtcacagtcctgaacacagagggccaggtgcaggagctggtgttcccccaggaggagtacccgagaaagaactccatccagctgtctgccaaaaccatcaagcagaacagccgcaatggggtggtcaaagttgtcttcatcctctacaacaacctgggcctcttcctgtccacggagaatgccacagtgaagctggccggcgaagcaggcccgggtggccctgggggcgcctctctagtggtgaactcacaggtcatcgcagcatccatcaacaaggagtccagccgcgtcttcctcatggaccctgtcatcttcaccgtggcccacctggaggacaagaaccacttcaatgctaactgctccttctggaactactcggagcgttccatgctgggctactggtcgacccaaggctgccgcctggtggagtccaacaagacccataccacgtgtgcctgcagccacctcaccaacttcgctgtgctcatggctcaccgtgagatctaccagggccgcatcaacgagctgctgctgtcggtcatcacctgggtgggcattgtgatctccctggtctgcttggccatctgcatctccaccttctgcttcctgcgggggctgcagaccgaccgcaacaccatccacaagaacctgtgcatcaacctcttcctggctgagctgctcttcctggtcgggatcgacaagactcagtatgagattgcctgccccatcttcgccggcctgctgcactatttcttcctggctgccttctcctggctgtgcctggagggcgtgcacctctacctgctactagtggaggtgtttgagagcgagtattcccgcaccaagtactactacctgggtggctactgcttcccggccctggtggtgggcatcgcggctgccattgactaccgcagctacggcaccgagaaggcctgctggctccgagtggacaattacttcatctggagtttcatcgggccagtctccttcgttatcgtggtcaacctggtgttcctcatggtgaccctgcacaagatgatccgaagctcatctgtgctcaagcccgactccagccgcctggacaacattaaatcctgggcgctgggggccatcgcgctgctgttcctgctgggcctcacctgggctttcggcctcctcttcatcaacaaggagtcggtggtcatggcctatctcttcaccaccttcaacgccttccagggggtcttcatcttcgtctttcactgcgccttacagaagaaggtgcacaaggagtacagcaagtgcctgcgtcactcctactgctgcatccgctccccacccgggggcactcacggatccctcaagacctcagccatgcgaagcaacacccgctactacacagggacccagagccgaattcggaggatgtggaatgacactgtgaggaaacagacggagtcctccttcatggcgggtgacatcaacagcacccccaccctgaaccgaggtaccatggggaaccacctgctgaccaaccccgtgctgcagccccgtgggggcaccagtccctacaacaccctcatcgccgagtcagtgggcttcaatccctcctcgccccctgtcttcaactccccaaactggagcctggacttgcatttcgagctcatccttgccttttctcttctctcttctggctgccacctgcagggagctaccgggaacccacaccccttgggaggccgggaagcctgtggcatggacaccctgcccctgaacggcaacttcaataacagttactccttgcgaagtggggatttccctcccggggatgggggccctgagccgccccgaggccggaacctagccgatgcggcggcctttgagaagatgatcatctcagagctggtgcacaacaacctgcgggggagcagcagcgcggccaagggccctccaccgcctgagccccctgtgccacctgtgccagggggcgggggcgaggaagaggcgggcgggcccgggggtgctgaccgggccgagattgaacttctctataaggccctggaggagcctctgctgctgccccgggcccagtcggtgctgtaccagagcgatctggacgagtcggagagctgcacggccgaggacggcgccaccagccggcccctctcctcccctcctggccgggactccctctatgccagcggggccaacctgcgggactcaccctcctacccggacagcagccctgaggggcccagtgaggccctgcccccaccccctcccgcaccccccggcccccccgaaatctactacacctcgcgcccgccagccctggtggcccggaatcccctgcagggctactaccaggtgcggcgtcctagccacgagggctacctggcagccccaggccttgaggggccagggcccgatggggacgggcagatgcagctggtcaccagtctctgagggcacctcatggaccaggggctggtggcccaggccagggagggaaccctgggcagggctctggtgggagagggagacagatggaggcagtggctggtgggccactctctccaggtgcccctcagccatgggccctacagtcccctcaggggactctaacctgggggcctgaggtgccagggttcacagacagggtttcccaccagccacacgcaccagctctatttgggggaagtgtagtgaggaggagcccagaggaccccaggggagtgaggagggagaacttggaagggtgcagcccacttccagactctcccctctcccacccttctaccctgtgaagggaaatgagggctttagtttcctgggcagggaggggcagcttctgaggttgccaaaggcccccactggatggaacctgttagctgctcctctccgcagccagaaatgctgccggctgcacccagagggagcagtgaggcaggacagatggacaggttcctcctgcgctgtaattccctgctccctggagactgggaaaaggccgcagggcagggggactgggcggtggtggctggtggtttaaaggttgaactttctctgaagctcctttccccttgctcttggtccctgccccgcaagcaaacctgccccctctgcctcccagtgcacccaatgaccccctcccttggggcgactcctgatgaagcacaactccccgcagggcccccagcccacaggggtggccatatttgggcagttcccagtcctgtgggctcggctatctggggagcagattttgggtctggatctccctggggagtgggtcctgggcttggatctttccctagggggccctcttactccttcctctctcctcctccttccccattgctgtaaatatttcaacgaaatggaaaagaaaaaaaaagacaaaaaaaaaaaaaaagaaaagaaaaaaatctcatcacttgaagccaccgggagcctgcggcccgggccagcccgggctttctccggagcagagcagcgctgctggcctggcagccaggacttctccgtgtacgtgcatccccagtccccgccggggcgggcgggccgccagagcagctntttacaatccagagacagaaaacaaaatctagatgcaacagcgaaacaaagaacccatttccttcctggcacccgtttctgtcccctcctttcctgctccgcctgcccggcatcatcagcccttctggggcgtgtacctctcactgcctgccccaggaccagaggcctgtctcccccttccctccccaccggcccgggggagacctcttcacacccaaagatgctttgtcaagatggctgcgctgtccctttgagttcctgcttcttgtatattgctctggggactctcgccggggaagatggggctgatttcccacctagagaggttgatggcagaaggaaaatggggaggcactggggttgtggagggcatgggtatggctgaggagggtgctgggaacggcaaggcggtctgggggatggggaggggcaaaggtgagagatcaccttccctatcctccaccttcccgcagggaagacgaagccaggtgccagggctggggtcgggacacccatgttctgggcggcttgaccccaaatcccagaccccggaagctccaggctcgggatgtgtcctgagcacctgtcccggccccctcctctccagcctgtcaggccagcctccccagcccccttccctcaactctaggggcagcatagccccaggccaccctagcccagcccctgcattgccgtttccccagaggtggcccctccacctctgctctgacctctccccatctctctgcccctccttttctcacaagtgccatgagttttcaaacatcttcgggtctcagcctgctgctgccatgaactttgttgggttaagggggaggggctctaggaaggaactggggggaaggggacaggtaggtggctggagggaccctttttgctgctagaaagcccctcccttctcccggggagctggggctggcttgtccccatcaattaggggagaaggggtcagaccaaagatggtggtttgtcccgtgtaagggaacaggtgtggggaagaggtggggttgggttccaactctggctttttctggtagaaaggcctaacccattacaccagaagaccatgggtgaagtctagatggggaggagaagtgaggccagggacagtcttgccagacgactctgaggagggcaagggacagttccatggcccttcccggactgcactaggctgggagctctgttgtgtggaggggtggtcagaggtctgtgaagagcgggcaggaggcatgagcaggcgaggagctggcctgtcccgggaagcagcccagcctgtggctgcccccgacaccaggaggagggccaggagagttccagggggctgaggcacacagagaggccaacttcctccctgcccagccttccttgtatctctccagactcggacaatcaaagggagagagggtgtatcgggtcctgttccagccggcatcgccgggtggcttccaggcctcagagctgtgtggcagggccccctgctggggctggacatcactgcagtccagtgcaaagccgcccccagagcccaggtgtccccccaacctaaccagacctggtgccttgacgcccccaccccagctgggacggtacagagaagggtcttggtttcctctcctactcccttccttaggctcctgaactcgtttgctcctaaatcttgttaattctttttctctggattttggtttcttttggctttcccttgccttcccctttctctgtctccaacactctttccccatgtctttctggctgtctctatgttcctcttctcttatcctcaactttctgtccattcgggcctcctccccacctcccacgccccagcccctccctccttggtctccttttcgatatgccaaaccaattttgggtcgagtgcatttaacgagaacaaaacaaaaggctcataacaacaagaacgtttcagaaaaaaacaaaaagttttaaaaaaattgttgagtcaaaaagtcaaacaataaagaaattaagatttcttggaaaaaaaaaa

SEQ ID NO: 356264 - DNA, 8001 bp, Homo sapiens
  misc_feature (5966)..(5966): n is a, c, g, or t
gggtttggccctggacggccttgcctttcccgccaaacccggtttaagggaactcctcaaatgctgtgggctccttttccccatgggtatatatcggcggatccctttttttttttttttcctaatttttggtcggcggcggtgctgggccaggggaaggaagggacacggaggccgccctcgtcccgccacctcctacccgcttccccccagccccggctccgggagatgtgccgggcggggggcccgggttcgccgagccgcaggagagacacgctgggccgaccccagagaggcgctggacaggctggtggtccaggccgtggtgcctgccaggtgatgtggggcaaagccccccgcacaggccactgagagctccggacacgcacccggctgccaccatggcccgcctagccgcagtgctctggaatctgtgtgtcaccgccgtcctggtcacctcggccacccaaggcctgagccgggccgggctcccgttcgggctgatgcgccgggagctggcgtgtgaaggctaccccatcgagctgcggtgccccggcagcgacgtcatcatggtggagaatgccaactacgggcgcacggacgacaagatttgcgatgctgaccctttccagatggagaatgtgcagtgctacctgccggacgccttcaagatcatgtcacagaggtgtaacaaccgcacccagtgcgtggtggtcgccggctcggatgcctttcctgacccctgtcctgggacctacaagtacctggaggtgcagtacgactgtgtcccctacaaagtggagcagaaagggattgggggggtggggcggggccccccacctttctgacatcagcgctgccttggtccctcttcccgagccggggatggtcgcagagtcttcgtgtgcccagggaccctgcagaaggtgctggagcccacctcgacacacgagtcagagcaccagtctggcgcatggtgcaaggacccgctgcaggcgggtgaccgcatctacgtgatgccctggatcccctaccgcacggacacactgactgagtatgcctcgtgggaggactacgtggccgcccgccacaccaccacctaccgcctgcccaaccgcgtggatggcacaggctttgtggtctacgatggtgccgtcttctacaacaaggagcgcacgcgcaacatcgtcaagtatgacctacggacgcgcatcaagagcggggagacggtcatcaataccgccaactaccatgacacctcgccctaccgctggggcggaaagaccgacattgacctggcggtggacgagaacgggctgtgggtcatctacgccactgagggcaacaacgggcggctggtggtgagccagctgaacccctacacactgcgctttgagggcacgtgggagacgggttacgacaagcgctcggcatccaacgccttcatggtgtgtggggtcctgtacgtcctgcgttccgtgtacgtggatgatgacagcgaggcggctggcaaccgcgtggactatgccttcaacaccaatgccaaccgcgaggagcctgtcagcctcaccttccccaacccctaccagttcatctcctccgttgactacaaccctcgcgacaaccagctgtacgtctggaacaactatttcgtggtgcgctacagcctggagttcgggccgcccgaccccagtgctggcccagccacttccccacccctcagcacgaccaccacagccaggcccacgcccctcaccagcacagcctcgcccgcagccaccaccccgctccgccgggcacccctcaccacgcacccagtgggtgccatcaaccagctgggacctgatctgcctccagccacagccccagtccccagcacccggcggcccccagccccgaatctacacgtgtcccctgagctcttctgcgagccccgagaggtacggcgggtccagtggccggccacccagcagggcatgctggtggagaggccctgccccaaggggactcgaggaattgcctccttccagtgtctaccagccttggggctctggaacccccggggccctgacctcagcaactgcacctccccctgggtcaaccaggtggcccagaagatcaagagtggggagaacgcggccaacatcgccagcgagctggcccgacacacccggggctccatctacgcgggggacgtctcctcctctgtgaagctgatggagcagctgctggacatcctggatgcccagctgcaggccctgcggcccatcgagcgcgagtcagccggcaagaactacaacaagatgcacaagcgagagagaacttgtaaggattatatcaaggccgtggtggagacagtggacaatctgctccggccagaagctctggagtcctggaaggacatgaatgccacggagcaggtgcacacggccaccatgctcctcgacgtcctggaggagggcgccttcctgctggccgacaatgtcagggagcctgcccgcttcctggctgccaaggagaacgtggtcctggaggtcacagtcctgaacacagagggccaggtgcaggagctggtgttcccccaggaggagtacccgagaaagaactccatccagctgtctgccaaaaccatcaagcagaacagccgcaatggggtggtcaaagttgtcttcatcctctacaacaacctgggcctcttcctgtccacggagaatgccacagtgaagctggccggcgaagcaggcccgggtggccctgggggcgcctctctagtggtgaactcacaggtcatcgcagcatccatcaacaaggagtccagccgcgtcttcctcatggaccctgtcatcttcaccgtggcccacctggaggacaagaaccacttcaatgctaactgctccttctggaactactcggagcgttccatgctgggctactggtcgacccaaggctgccgcctggtggagtccaacaagacccataccacgtgtgcctgcagccacctcaccaacttcgctgtgctcatggctcaccgtgagatctaccagggccgcatcaacgagctgctgctgtcggtcatcacctgggtgggcattgtgatctccctggtctgcttggccatctgcatctccaccttctgcttcctgcgggggctgcagaccgaccgcaacaccatccacaagaacctgtgcatcaacctcttcctggctgagctgctcttcctggtcgggatcgacaagactcagtatgagattgcctgccccatcttcgccggcctgctgcactatttcttcctggctgccttctcctggctgtgcctggagggcgtgcacctctacctgctactagtggaggtgtttgagagcgagtattcccgcaccaagtactactacctgggtggctactgcttcccggccctggtggtgggcatcgcggctgccattgactaccgcagctacggcaccgagaaggcctgctggctccgagtggacaattacttcatctggagtttcatcgggccagtctccttcgttatcgtggtcaacctggtgttcctcatggtgaccctgcacaagatgatccgaagctcatctgtgctcaagcccgactccagccgcctggacaacattaaatcctgggcgctgggggccatcgcgctgctgttcctgctgggcctcacctgggctttcggcctcctcttcatcaacaaggagtcggtggtcatggcctatctcttcaccaccttcaacgccttccagggggtcttcatcttcgtctttcactgcgccttacagaagaaggtgcacaaggagtacagcaagtgcctgcgtcactcctactgctgcatccgctccccacccgggggcactcacggatccctcaagacctcagccatgcgaagcaacacccgctactacacagggacccagagccgaattcggaggatgtggaatgacactgtgaggaaacagacggagtcctccttcatggcgggtgacatcaacagcacccccaccctgaaccgaggtaccatggggaaccacctgctgaccaaccccgtgctgcagccccgtgggggcaccagtccctacaacaccctcatcgccgagtcagtgggcttcaatccctcctcgccccctgtcttcaactccccaaactggagcctggacttgcatttcgagctcatccttgccttttctcttctctcttctggctgccacctgcagggagctaccgggaacccacaccccttgggaggccgggaagcctgtggcatggacaccctgcccctgaacggcaacttcaataacagttactccttgcgaagtggggatttccctccaccgcctgagccccctgtgccacctgtgccagggggcgggggcgaggaagaggcgggcgggcccgggggtgctgaccgggccgagattgaacttctctataaggccctggaggagcctctgctgctgccccgggcccagtcggtgctgtaccagagcgatctggacgagtcggagagctgcacggccgaggacggcgccaccagccggcccctctcctcccctcctggccgggactccctctatgccagcggggccaacctgcgggactcaccctcctacccggacagcagccctgaggggcccagtgaggccctgcccccaccccctcccgcaccccccggcccccccgaaatctactacacctcgcgcccgccagccctggtggcccggaatcccctgcagggctactaccaggtgcggcgtcctagccacgagggctacctggcagccccaggccttgaggggccagggcccgatggggacgggcagatgcagctggtcaccagtctctgagggcacctcatggaccaggggctggtggcccaggccagggagggaaccctgggcagggctctggtgggagagggagacagatggaggcagtggctggtgggccactctctccaggtgcccctcagccatgggccctacagtcccctcaggggactctaacctgggggcctgaggtgccagggttcacagacagggtttcccaccagccacacgcaccagctctatttgggggaagtgtagtgaggaggagcccagaggaccccaggggagtgaggagggagaacttggaagggtgcagcccacttccagactctcccctctcccacccttctaccctgtgaagggaaatgagggctttagtttcctgggcagggaggggcagcttctgaggttgccaaaggcccccactggatggaacctgttagctgctcctctccgcagccagaaatgctgccggctgcacccagagggagcagtgaggcaggacagatggacaggttcctcctgcgctgtaattccctgctccctggagactgggaaaaggccgcagggcagggggactgggcggtggtggctggtggtttaaaggttgaactttctctgaagctcctttccccttgctcttggtccctgccccgcaagcaaacctgccccctctgcctcccagtgcacccaatgaccccctcccttggggcgactcctgatgaagcacaactccccgcagggcccccagcccacaggggtggccatatttgggcagttcccagtcctgtgggctcggctatctggggagcagattttgggtctggatctccctggggagtgggtcctgggcttggatctttccctagggggccctcttactccttcctctctcctcctccttccccattgctgtaaatatttcaacgaaatggaaaagaaaaaaaaagacaaaaaaaaaaaaaaagaaaagaaaaaaatctcatcacttgaagccaccgggagcctgcggcccgggccagcccgggctttctccggagcagagcagcgctgctggcctggcagccaggacttctccgtgtacgtgcatccccagtccccgccggggcgggcgggccgccagagcagctntttacaatccagagacagaaaacaaaatctagatgcaacagcgaaacaaagaacccatttccttcctggcacccgtttctgtcccctcctttcctgctccgcctgcccggcatcatcagcccttctggggcgtgtacctctcactgcctgccccaggaccagaggcctgtctcccccttccctccccaccggcccgggggagacctcttcacacccaaagatgctttgtcaagatggctgcgctgtccctttgagttcctgcttcttgtatattgctctggggactctcgccggggaagatggggctgatttcccacctagagaggttgatggcagaaggaaaatggggaggcactggggttgtggagggcatgggtatggctgaggagggtgctgggaacggcaaggcggtctgggggatggggaggggcaaaggtgagagatcaccttccctatcctccaccttcccgcagggaagacgaagccaggtgccagggctggggtcgggacacccatgttctgggcggcttgaccccaaatcccagaccccggaagctccaggctcgggatgtgtcctgagcacctgtcccggccccctcctctccagcctgtcaggccagcctccccagcccccttccctcaactctaggggcagcatagccccaggccaccctagcccagcccctgcattgccgtttccccagaggtggcccctccacctctgctctgacctctccccatctctctgcccctccttttctcacaagtgccatgagttttcaaacatcttcgggtctcagcctgctgctgccatgaactttgttgggttaagggggaggggctctaggaaggaactggggggaaggggacaggtaggtggctggagggaccctttttgctgctagaaagcccctcccttctcccggggagctggggctggcttgtccccatcaattaggggagaaggggtcagaccaaagatggtggtttgtcccgtgtaagggaacaggtgtggggaagaggtggggttgggttccaactctggctttttctggtagaaaggcctaacccattacaccagaagaccatgggtgaagtctagatggggaggagaagtgaggccagggacagtcttgccagacgactctgaggagggcaagggacagttccatggcccttcccggactgcactaggctgggagctctgttgtgtggaggggtggtcagaggtctgtgaagagcgggcaggaggcatgagcaggcgaggagctggcctgtcccgggaagcagcccagcctgtggctgcccccgacaccaggaggagggccaggagagttccagggggctgaggcacacagagaggccaacttcctccctgcccagccttccttgtatctctccagactcggacaatcaaagggagagagggtgtatcgggtcctgttccagccggcatcgccgggtggcttccaggcctcagagctgtgtggcagggccccctgctggggctggacatcactgcagtccagtgcaaagccgcccccagagcccaggtgtccccccaacctaaccagacctggtgccttgacgcccccaccccagctgggacggtacagagaagggtcttggtttcctctcctactcccttccttaggctcctgaactcgtttgctcctaaatcttgttaattctttttctctggattttggtttcttttggctttcccttgccttcccctttctctgtctccaacactctttccccatgtctttctggctgtctctatgttcctcttctcttatcctcaactttctgtccattcgggcctcctccccacctcccacgccccagcccctccctccttggtctccttttcgatatgccaaaccaattttgggtcgagtgcatttaacgagaacaaaacaaaaggctcataacaacaagaacgtttcagaaaaaaacaaaaagttttaaaaaaattgttgagtcaaaaagtcaaacaataaagaaattaagatttcttggaaaaaaaaaa

SEQ ID NO: 356265 - DNA, 7353 bp, Homo sapiens
  misc_feature (5318)..(5318): n is a, c, g, or t
gggtttggccctggacggccttgcctttcccgccaaacccggtttaagggaactcctcaaatgctgtgggctccttttccccatgggtatatatcggcggatccctttttttttttttttcctaatttttggtcggcggcggtgctgggccaggggaaggaagggacacggaggccgccctcgtcccgccacctcctacccgcttccccccagccccggctccgggagatgtgccgggcggggggcccgggttcgccgagccgcaggagagacacgctgggccgaccccagagaggcgctggacaggctggtggtccaggccgtggtgcctgccaggtgatgtggggcaaagccccccgcacaggccactgagagctccggacacgcacccggctgccaccatggcccgcctagccgcagtgctctggaatctgtgtgtcaccgccgtcctggtcacctcggccacccaaggcctgagccgggccgggctcccgttcgggctgatgcgccgggagctggcgtgtgaaggctaccccatcgagctgcggtgccccggcagcgacgtcatcatggtggagaatgccaactacgggcgcacggacgacaagatttgcgatgctgaccctttccagatggagaatgtgcagtgctacctgccggacgccttcaagatcatgtcacagaggtgtaacaaccgcacccagtgcgtggtggtcgccggctcggatgcctttcctgacccctgtcctgggacctacaagtacctggaggtgcagtacgactgtgtcccctacaaagtggagcagaaagggattgggggggtggggcggggccccccacctttctgacatcagcgctgccttggtccctcttcccgagccggggatggtcgcagagtcttcgtgtgcccagggaccctgcagaaggtgctggagcccacctcgacacacgagtcagagcaccagtctggcgcatggtgcaaggacccgctgcaggcgggtgaccgcatctacgtgatgccctggatcccctaccgcacggacacactgactgagtatgcctcgtgggaggactacgtggccgcccgccacaccaccacctaccgcctgcccaaccgcgtggatggcacaggctttgtggtctacgatggtgccgtcttctacaacaaggagcgcacgcgcaacatcgtcaagtatgacctacggacgcgcatcaagagcggggagacggtcatcaataccgccaactaccatgacacctcgccctaccgctggggcggaaagaccgacattgacctggcggtggacgagaacgggctgtgggtcatctacgccactgagggcaacaacgggcggctggtggtgagccagctgaacccctacacactgcgctttgagggcacgtgggagacgggttacgacaagcgctcggcatccaacgccttcatggtgtgtggggtcctgtacgtcctgcgttccgtgtacgtggatgatgacagcgaggcggctggcaaccgcgtggactatgccttcaacaccaatgccaaccgcgaggagcctgtcagcctcaccttccccaacccctaccagttcatctcctccgttgactacaaccctcgcgacaaccagctgtacgtctggaacaactatttcgtggtgcgctacagcctggagttcgggccgcccgaccccagtgctggcccagccacttccccacccctcagcacgaccaccacagccaggcccacgcccctcaccagcacagcctcgcccgcagccaccaccccgctccgccgggcacccctcaccacgcacccagtgggtgccatcaaccagctgggacctgatctgcctccagccacagccccagtccccagcacccggcggcccccagccccgaatctacacgtgtcccctgagctcttctgcgagccccgagaggtacggcgggtccagtggccggccacccagcagggcatgctggtggagaggccctgccccaaggggactcgaggaattgcctccttccagtgtctaccagccttggggctctggaacccccggggccctgacctcagcaactgcacctccccctgggtcaaccaggtggcccagaagatcaagagtggggagaacgcggccaacatcgccagcgagctggcccgacacacccggggctccatctacgcgggggacgtctcctcctctgtgaagctgatggagcagctgctggacatcctggatgcccagctgcaggccctgcggcccatcgagcgcgagtcagccggcaagaactacaacaagatgcacaagcgagagagaacttgtaaggattatatcaaggccgtggtggagacagtggacaatctgctccggccagaagctctggagtcctggaaggacatgaatgccacggagcaggtgcacacggccaccatgctcctcgacgtcctggaggagggcgccttcctgctggccgacaatgtcagggagcctgcccgcttcctggctgccaaggagaacgtggtcctggaggtcacagtcctgaacacagagggccaggtgcaggagctggtgttcccccaggaggagtacccgagaaagaactccatccagctgtctgccaaaaccatcaagcagaacagccgcaatggggtggtcaaagttgtcttcatcctctacaacaacctgggcctcttcctgtccacggagaatgccacagtgaagctggccggcgaagcaggcccgggtggccctgggggcgcctctctagtggtgaactcacaggtcatcgcagcatccatcaacaaggagtccagccgcgtcttcctcatggaccctgtcatcttcaccgtggcccacctggaggacaagaaccacttcaatgctaactgctccttctggaactactcggagcgttccatgctgggctactggtcgacccaaggctgccgcctggtggagtccaacaagacccataccacgtgtgcctgcagccacctcaccaacttcgctgtgctcatggctcaccgtgagatctaccagggccgcatcaacgagctgctgctgtcggtcatcacctgggtgggcattgtgatctccctggtctgcttggccatctgcatctccaccttctgcttcctgcgggggctgcagaccgaccgcaacaccatccacaagaacctgtgcatcaacctcttcctggctgagctgctcttcctggtcgggatcgacaagactcagtatgagattgcctgccccatcttcgccggcctgctgcactatttcttcctggctgccttctcctggctgtgcctggagggcgtgcacctctacctgctactagtggaggtgtttgagagcgagtattcccgcaccaagtactactacctgggtggctactgcttcccggccctggtggtgggcatcgcggctgccattgactaccgcagctacggcaccgagaaggcctgctggctccgagtggacaattacttcatctggagtttcatcgggccagtctccttcgttatcgtggtcaacctggtgttcctcatggtgaccctgcacaagatgatccgaagctcatctgtgctcaagcccgactccagccgcctggacaacattaaatcctgggcgctgggggccatcgcgctgctgttcctgctgggcctcacctgggctttcggcctcctcttcatcaacaaggagtcggtggtcatggcctatctcttcaccaccttcaacgccttccagggggtcttcatcttcgtctttcactgcgccttacagaagaaggtgcacaaggagtacagcaagtgcctgcgtcactcctactgctgcatccgctccccacccgggggcactcacggatccctcaagacctcagccatgcgaagcaacacccgctactacacagggacccagtccctctatgccagcggggccaacctgcgggactcaccctcctacccggacagcagccctgaggggcccagtgaggccctgcccccaccccctcccgcaccccccggcccccccgaaatctactacacctcgcgcccgccagccctggtggcccggaatcccctgcagggctactaccaggtgcggcgtcctagccacgagggctacctggcagccccaggccttgaggggccagggcccgatggggacgggcagatgcagctggtcaccagtctctgagggcacctcatggaccaggggctggtggcccaggccagggagggaaccctgggcagggctctggtgggagagggagacagatggaggcagtggctggtgggccactctctccaggtgcccctcagccatgggccctacagtcccctcaggggactctaacctgggggcctgaggtgccagggttcacagacagggtttcccaccagccacacgcaccagctctatttgggggaagtgtagtgaggaggagcccagaggaccccaggggagtgaggagggagaacttggaagggtgcagcccacttccagactctcccctctcccacccttctaccctgtgaagggaaatgagggctttagtttcctgggcagggaggggcagcttctgaggttgccaaaggcccccactggatggaacctgttagctgctcctctccgcagccagaaatgctgccggctgcacccagagggagcagtgaggcaggacagatggacaggttcctcctgcgctgtaattccctgctccctggagactgggaaaaggccgcagggcagggggactgggcggtggtggctggtggtttaaaggttgaactttctctgaagctcctttccccttgctcttggtccctgccccgcaagcaaacctgccccctctgcctcccagtgcacccaatgaccccctcccttggggcgactcctgatgaagcacaactccccgcagggcccccagcccacaggggtggccatatttgggcagttcccagtcctgtgggctcggctatctggggagcagattttgggtctggatctccctggggagtgggtcctgggcttggatctttccctagggggccctcttactccttcctctctcctcctccttccccattgctgtaaatatttcaacgaaatggaaaagaaaaaaaaagacaaaaaaaaaaaaaaagaaaagaaaaaaatctcatcacttgaagccaccgggagcctgcggcccgggccagcccgggctttctccggagcagagcagcgctgctggcctggcagccaggacttctccgtgtacgtgcatccccagtccccgccggggcgggcgggccgccagagcagctntttacaatccagagacagaaaacaaaatctagatgcaacagcgaaacaaagaacccatttccttcctggcacccgtttctgtcccctcctttcctgctccgcctgcccggcatcatcagcccttctggggcgtgtacctctcactgcctgccccaggaccagaggcctgtctcccccttccctccccaccggcccgggggagacctcttcacacccaaagatgctttgtcaagatggctgcgctgtccctttgagttcctgcttcttgtatattgctctggggactctcgccggggaagatggggctgatttcccacctagagaggttgatggcagaaggaaaatggggaggcactggggttgtggagggcatgggtatggctgaggagggtgctgggaacggcaaggcggtctgggggatggggaggggcaaaggtgagagatcaccttccctatcctccaccttcccgcagggaagacgaagccaggtgccagggctggggtcgggacacccatgttctgggcggcttgaccccaaatcccagaccccggaagctccaggctcgggatgtgtcctgagcacctgtcccggccccctcctctccagcctgtcaggccagcctccccagcccccttccctcaactctaggggcagcatagccccaggccaccctagcccagcccctgcattgccgtttccccagaggtggcccctccacctctgctctgacctctccccatctctctgcccctccttttctcacaagtgccatgagttttcaaacatcttcgggtctcagcctgctgctgccatgaactttgttgggttaagggggaggggctctaggaaggaactggggggaaggggacaggtaggtggctggagggaccctttttgctgctagaaagcccctcccttctcccggggagctggggctggcttgtccccatcaattaggggagaaggggtcagaccaaagatggtggtttgtcccgtgtaagggaacaggtgtggggaagaggtggggttgggttccaactctggctttttctggtagaaaggcctaacccattacaccagaagaccatgggtgaagtctagatggggaggagaagtgaggccagggacagtcttgccagacgactctgaggagggcaagggacagttccatggcccttcccggactgcactaggctgggagctctgttgtgtggaggggtggtcagaggtctgtgaagagcgggcaggaggcatgagcaggcgaggagctggcctgtcccgggaagcagcccagcctgtggctgcccccgacaccaggaggagggccaggagagttccagggggctgaggcacacagagaggccaacttcctccctgcccagccttccttgtatctctccagactcggacaatcaaagggagagagggtgtatcgggtcctgttccagccggcatcgccgggtggcttccaggcctcagagctgtgtggcagggccccctgctggggctggacatcactgcagtccagtgcaaagccgcccccagagcccaggtgtccccccaacctaaccagacctggtgccttgacgcccccaccccagctgggacggtacagagaagggtcttggtttcctctcctactcccttccttaggctcctgaactcgtttgctcctaaatcttgttaattctttttctctggattttggtttcttttggctttcccttgccttcccctttctctgtctccaacactctttccccatgtctttctggctgtctctatgttcctcttctcttatcctcaactttctgtccattcgggcctcctccccacctcccacgccccagcccctccctccttggtctccttttcgatatgccaaaccaattttgggtcgagtgcatttaacgagaacaaaacaaaaggctcataacaacaagaacgtttcagaaaaaaacaaaaagttttaaaaaaattgttgagtcaaaaagtcaaacaataaagaaattaagatttcttggaaaaaaaaaa

SEQ ID NO: 356266 - DNA, 4770 bp, Homo sapiens
  misc_feature (2735)..(2735): n is a, c, g, or t
tcaaaaggtgagtctgtttaagggcaacttaaagagaaataggcagcaaatatagcctaagtggtctggaaatttagcagaaacaatgaagttggcagaggaataactgatgttcacaataccccgacccctgacccagtacctttccctcaggcccaggctccggtggaggtgtcctgggcaggccactgcccccaaggcccactcggcccgctcagggctttgcagacagtgcccaggcccacccaagggcccccgttgtaggctgcaggggaggcctgggctgaggccgtcccctccggcgggtactttgactcccctgtcgccccactcccagatcctgggcgctgggggccatcgcgctgctgttcctgctgggcctcacctgggctttcggcctcctcttcatcaacaaggagtcggtggtcatggcctatctcttcaccaccttcaacgccttccagggggtcttcatcttcgtctttcactgcgccttacagaagaaggtgcacaaggagtacagcaagtgcctgcgtcactcctactgctgcatccgctccccacccgggggcactcacggatccctcaagacctcagccatgcgaagcaacacccgctactacacagggacccagagccgaattcggaggatgtggaatgacactgtgaggaaacagacggagtcctccttcatggcgggtgacatcaacagcacccccaccctgaaccgaggtaccatggggaaccacctgctgaccaaccccgtgctgcagccccgtgggggcaccagtccctacaacaccctcatcgccgagtcagtgggcttcaatccctcctcgccccctgtcttcaactccccagggagctaccgggaacccaagcaccccttgggaggccgggaagcctgtggcatggacaccctgcccctgaacggcaacttcaataacagttactccttgcgaagtggggatttccctcccggggatgggggccctgagccgccccgaggccggaacctagccgatgcggcggcctttgagaagatgatcatctcagagctggtgcacaacaacctgcgggggagcagcagcgcggccaagggccctccaccgcctgagccccctgtgccacctgtgccagggggcgggggcgaggaagaggcgggcgggcccgggggtgctgaccgggccgagattgaacttctctataaggccctggaggagcctctgctgctgccccgggcccagtcggtgctgtaccagagcgatctggacgagtcggagagctgcacggccgaggacggcgccaccagccggcccctctcctcccctcctggccgggactccctctatgccagcggggccaacctgcgggactcaccctcctacccggacagcagccctgaggggcccagtgaggccctgcccccaccccctcccgcaccccccggcccccccgaaatctactacacctcgcgcccgccagccctggtggcccggaatcccctgcagggctactaccaggtgcggcgtcctagccacgagggctacctggcagccccaggccttgaggggccagggcccgatggggacgggcagatgcagctggtcaccagtctctgagggcacctcatggaccaggggctggtggcccaggccagggagggaaccctgggcagggctctggtgggagagggagacagatggaggcagtggctggtgggccactctctccaggtgcccctcagccatgggccctacagtcccctcaggggactctaacctgggggcctgaggtgccagggttcacagacagggtttcccaccagccacacgcaccagctctatttgggggaagtgtagtgaggaggagcccagaggaccccaggggagtgaggagggagaacttggaagggtgcagcccacttccagactctcccctctcccacccttctaccctgtgaagggaaatgagggctttagtttcctgggcagggaggggcagcttctgaggttgccaaaggcccccactggatggaacctgttagctgctcctctccgcagccagaaatgctgccggctgcacccagagggagcagtgaggcaggacagatggacaggttcctcctgcgctgtaattccctgctccctggagactgggaaaaggccgcagggcagggggactgggcggtggtggctggtggtttaaaggttgaactttctctgaagctcctttccccttgctcttggtccctgccccgcaagcaaacctgccccctctgcctcccagtgcacccaatgaccccctcccttggggcgactcctgatgaagcacaactccccgcagggcccccagcccacaggggtggccatatttgggcagttcccagtcctgtgggctcggctatctggggagcagattttgggtctggatctccctggggagtgggtcctgggcttggatctttccctagggggccctcttactccttcctctctcctcctccttccccattgctgtaaatatttcaacgaaatggaaaagaaaaaaaaagacaaaaaaaaaaaaaaagaaaagaaaaaaatctcatcacttgaagccaccgggagcctgcggcccgggccagcccgggctttctccggagcagagcagcgctgctggcctggcagccaggacttctccgtgtacgtgcatccccagtccccgccggggcgggcgggccgccagagcagctntttacaatccagagacagaaaacaaaatctagatgcaacagcgaaacaaagaacccatttccttcctggcacccgtttctgtcccctcctttcctgctccgcctgcccggcatcatcagcccttctggggcgtgtacctctcactgcctgccccaggaccagaggcctgtctcccccttccctccccaccggcccgggggagacctcttcacacccaaagatgctttgtcaagatggctgcgctgtccctttgagttcctgcttcttgtatattgctctggggactctcgccggggaagatggggctgatttcccacctagagaggttgatggcagaaggaaaatggggaggcactggggttgtggagggcatgggtatggctgaggagggtgctgggaacggcaaggcggtctgggggatggggaggggcaaaggtgagagatcaccttccctatcctccaccttcccgcagggaagacgaagccaggtgccagggctggggtcgggacacccatgttctgggcggcttgaccccaaatcccagaccccggaagctccaggctcgggatgtgtcctgagcacctgtcccggccccctcctctccagcctgtcaggccagcctccccagcccccttccctcaactctaggggcagcatagccccaggccaccctagcccagcccctgcattgccgtttccccagaggtggcccctccacctctgctctgacctctccccatctctctgcccctccttttctcacaagtgccatgagttttcaaacatcttcgggtctcagcctgctgctgccatgaactttgttgggttaagggggaggggctctaggaaggaactggggggaaggggacaggtaggtggctggagggaccctttttgctgctagaaagcccctcccttctcccggggagctggggctggcttgtccccatcaattaggggagaaggggtcagaccaaagatggtggtttgtcccgtgtaagggaacaggtgtggggaagaggtggggttgggttccaactctggctttttctggtagaaaggcctaacccattacaccagaagaccatgggtgaagtctagatggggaggagaagtgaggccagggacagtcttgccagacgactctgaggagggcaagggacagttccatggcccttcccggactgcactaggctgggagctctgttgtgtggaggggtggtcagaggtctgtgaagagcgggcaggaggcatgagcaggcgaggagctggcctgtcccgggaagcagcccagcctgtggctgcccccgacaccaggaggagggccaggagagttccagggggctgaggcacacagagaggccaacttcctccctgcccagccttccttgtatctctccagactcggacaatcaaagggagagagggtgtatcgggtcctgttccagccggcatcgccgggtggcttccaggcctcagagctgtgtggcagggccccctgctggggctggacatcactgcagtccagtgcaaagccgcccccagagcccaggtgtccccccaacctaaccagacctggtgccttgacgcccccaccccagctgggacggtacagagaagggtcttggtttcctctcctactcccttccttaggctcctgaactcgtttgctcctaaatcttgttaattctttttctctggattttggtttcttttggctttcccttgccttcccctttctctgtctccaacactctttccccatgtctttctggctgtctctatgttcctcttctcttatcctcaactttctgtccattcgggcctcctccccacctcccacgccccagcccctccctccttggtctccttttcgatatgccaaaccaattttgggtcgagtgcatttaacgagaacaaaacaaaaggctcataacaacaagaacgtttcagaaaaaaacaaaaagttttaaaaaaattgttgagtcaaaaagtcaaacaataaagaaattaagatttcttggaaaaaaaaaa

SEQ ID NO: 356267 - DNA, 5195 bp, Homo sapiens
  misc_feature (4724)..(4725): n is a, c, g, or t
  misc_feature (4742)..(4743): n is a, c, g, or t
  misc_feature (4753)..(4753): n is a, c, g, or t
  misc_feature (4759)..(4759): n is a, c, g, or t
  misc_feature (4766)..(4766): n is a, c, g, or t
  misc_feature (4773)..(4773): n is a, c, g, or t
  misc_feature (4777)..(4777): n is a, c, g, or t
  misc_feature (4785)..(4785): n is a, c, g, or t
  misc_feature (4789)..(4789): n is a, c, g, or t
gggtttggccctggacggccttgcctttcccgccaaacccggtttaagggaactcctcaaatgctgtgggctccttttccccatgggtatatatcggcggatccctttttttttttttttcctaatttttggtcggcggcggtgctgggccaggggaaggaagggacacggaggccgccctcgtcccgccacctcctacccgcttccccccagccccggctccgggagatgtgccgggcggggggcccgggttcgccgagccgcaggagagacacgctgggccgaccccagagaggcgctggacaggctggtggtccaggccgtggtgcctgccaggtgatgtggggcaaagccccccgcacaggccactgagagctccggacacgcacccggctgccaccatggcccgcctagccgcagtgctctggaatctgtgtgtcaccgccgtcctggtcacctcggccacccaaggcctgagccgggccgggctcccgttcgggctgatgcgccgggagctggcgtgtgaaggctaccccatcgagctgcggtgccccggcagcgacgtcatcatggtggagaatgccaactacgggcgcacggacgacaagatttgcgatgctgaccctttccagatggagaatgtgcagtgctacctgccggacgccttcaagatcatgtcacagaggtgtaacaaccgcacccagtgcgtggtggtcgccggctcggatgcctttcctgacccctgtcctgggacctacaagtacctggaggtgcagtacgactgtgtcccctacaaagtggagcagaaagggattgggggggtggggcggggccccccacctttctgacatcagcgctgccttggtccctcttcccgagccggggatggtcgcagagtcttcgtgtgcccagggaccctgcagaaggtgctggagcccacctcgacacacgagtcagagcaccagtctggcgcatggtgcaaggacccgctgcaggcgggtgaccgcatctacgtgatgccctggatcccctaccgcacggacacactgactgagtatgcctcgtgggaggactacgtggccgcccgccacaccaccacctaccgcctgcccaaccgcgtggatggcacaggctttgtggtctacgatggtgccgtcttctacaacaaggagcgcacgcgcaacatcgtcaagtatgacctacggacgcgcatcaagagcggggagacggtcatcaataccgccaactaccatgacacctcgccctaccgctggggcggaaagaccgacattgacctggcggtggacgagaacgggctgtgggtcatctacgccactgagggcaacaacgggcggctggtggtgagccagctgaacccctacacactgcgctttgagggcacgtgggagacgggttacgacaagcgctcggcatccaacgccttcatggtgtgtggggtcctgtacgtcctgcgttccgtgtacgtggatgatgacagcgaggcggctggcaaccgcgtggactatgccttcaacaccaatgccaaccgcgaggagcctgtcagcctcaccttccccaacccctaccagttcatctcctccgttgactacaaccctcgcgacaaccagctgtacgtctggaacaactatttcgtggtgcgctacagcctggagttcgggccgcccgaccccagtgctggcccagccacttccccacccctcagcacgaccaccacagccaggcccacgcccctcaccagcacagcctcgcccgcagccaccaccccgctccgccgggcacccctcaccacgcacccagtgggtgccatcaaccagctgggacctgatctgcctccagccacagccccagtccccagcacccggcggcccccagccccgaatctacacgtgtcccctgagctcttctgcgagccccgagaggtacggcgggtccagtggccggccacccagcagggcatgctggtggagaggccctgccccaaggggactcgaggaattgcctccttccagtgtctaccagccttggggctctggaacccccggggccctgacctcagcaactgcacctccccctgggtcaaccaggtggcccagaagatcaagagtggggagaacgcggccaacatcgccagcgagctggcccgacacacccggggctccatctacgcgggggacgtctcctcctctgtgaagctgatggagcagctgctggacatcctggatgcccagctgcaggccctgcggcccatcgagcgcgagtcagccggcaagaactacaacaagatgcacaagcgagagagaacttgtaaggattatatcaaggccgtggtggagacagtggacaatctgctccggccagaagctctggagtcctggaaggacatgaatgccacggagcaggtgcacacggccaccatgctcctcgacgtcctggaggagggcgccttcctgctggccgacaatgtcagggagcctgcccgcttcctggctgccaaggagaacgtggtcctggaggtcacagtcctgaacacagagggccaggtgcaggagctggtgttcccccaggaggagtacccgagaaagaactccatccagctgtctgccaaaaccatcaagcagaacagccgcaatggggtggtcaaagttgtcttcatcctctacaacaacctgggcctcttcctgtccacggagaatgccacagtgaagctggccggcgaagcaggcccgggtggccctgggggcgcctctctagtggtgaactcacaggtcatcgcagcatccatcaacaaggagtccagccgcgtcttcctcatggaccctgtcatcttcaccgtggcccacctggaggacaagaaccacttcaatgctaactgctccttctggaactactcggagcgttccatgctgggctactggtcgacccaaggctgccgcctggtggagtccaacaagacccataccacgtgtgcctgcagccacctcaccaacttcgctgtgctcatggctcaccgtgagatctaccagggccgcatcaacgagctgctgctgtcggtcatcacctgggtgggcattgtgatctccctggtctgcttggccatctgcatctccaccttctgcttcctgcgggggctgcagaccgaccgcaacaccatccacaagaacctgtgcatcaacctcttcctggctgagctgctcttcctggtcgggatcgacaagactcagtatgagattgcctgccccatcttcgccggcctgctgcactatttcttcctggctgccttctcctggctgtgcctggagggcgtgcacctctacctgctactagtggaggtgtttgagagcgagtattcccgcaccaagtactactacctgggtggctactgcttcccggccctggtggtgggcatcgcggctgccattgactaccgcagctacggcaccgagaaggcctgctggctccgagtggacaattacttcatctggagtttcatcgggccagtctccttcgttatcgtggtcaacctggtgttcctcatggtgaccctgcacaagatgatccgaagctcatctgtgctcaagcccgactccagccgcctggacaacattaaatcctgggcgctgggggccatcgcgctgctgttcctgctgggcctcacctgggctttcggcctcctcttcatcaacaaggagtcggtggtcatggcctatctcttcaccaccttcaacgccttccagggggtcttcatcttcgtctttcactgcgccttacagaagaaggtgcacaaggagtacagcaagtgcctgcgtcactcctactgctgcatccgctccccacccgggggcactcacggatccctcaagacctcagccatgcgaagcaacacccgctactacacagggacccagagccgaattcggaggatgtggaatgacactgtgaggaaacagacggagtcctccttcatggcgggtgacatcaacagcacccccaccctgaaccgaggtaccatggggaaccacctgctgaccaaccccgtgctgcagccccgtgggggcaccagtccctacaacaccctcatcgccgagtcagtgggcttcaatccctcctcgccccctgtcttcaactccccagggagctaccgggaacccaagcaccccttgggaggccgggaagcctgtggcatggacaccctgcccctgaacggcaacttcaataacagttactccttgcgaagtggggatttccctcccggggatgggggccctgagccgccccgaggccggaacctagccgatgcggcggcctttgagaagatgatcatctcagagctggtgcacaacaacctgcgggggagcagcagcgcggccaagggccctccaccgcctgagccccctgtgccacctgtgccagggggcgggggcgaggaagaggcgggcgggcccgggggtgctgaccgggccgagattgaacttctctataaggccctggaggagcctctgctgctgccccgggcccagtcggtgctgtaccagagcgatctggacgagtcggagagctgcacggccgaggacggcgccaccagccggcccctctcctcccctcctggccgggactccctctatgccagcggggccaacctgcgggactcaccctcctacccggacagcagccctgaggggcccagtgaggccctgccccggagnngaggagagagaaagggnngagaggaagnaagaanaaaaaanaaagaanaaanagaaaaanaagnaagaagaaagaaagacaccaaagaagaaagactaaaacagaaaagataaagacaaaaaaaagaaacaaaaaaaaaaaaaaaaaaaaaaaaagacaaaaaataaacagagaagaaaaaaggagagaaaaaaaaagaaaagaaggaaaggcagaaaaagagaagagaagaggaaaaaaagaagaaaaaaaacgagagaaaaaaacagagagaaggaaaagaaagaagaaagaaagaaaagaagagaacaaaagaggaaggagaggaaagagcaaaaagaggagacaagaaagaagacagaagaaaagagaagaacaaagagaaaagaagaaaaaaacacaagaagaaaaaaaaaagaagaaaagagaagaagaaaaagaagaagagaagaaggagagaaaagaaaagc

SEQ ID NO: 356268 - DNA, 844 bp, Homo sapiens
  misc_feature (19)..(19): n is a, c, g, or t
gagctcggtacccgctccncccgacggggtggtcagaggtctgtgaagagcgggcaggaggcatgagcaggcgaggagctggcctgtcccgggaagcagcccagcctgtggctgcccccgacaccaggaggagggccaggagagttccagggggctgaggcacacagagaggccaacttcctccctgcccagccttccttgtatctctccagactcggacaatcaaagggagagagggtgtatcgggtcctgttccagccggcatcgccgggtggcttccaggcctcagagctgtgtggcagggccccctgctggggctggacatcactgcagtccagtgcaaagccgcccccagagcccaggtgtccccccaacctaaccagacctggtgccttgacgcccccaccccagctgggacggtacagagaagggtcttggtttcctctcctactcccttccttaggctcctgaactcgtttgctcctaaatcttgttaattctttttctctggattttggtttcttttggctttcccttgccttcccctttctctgtctccaacactctttccccatgtctttctggctgtctctatgttcctcttctcttatcctcaactttctgtccattcgggcctcctccccacctcccacgccccagcccctccctccttggtctccttttcgatatgccaaaccaattttgggtcgagtgcatttaacgagaacaaaacaaaaggctcataacaacaagaacgtttcagaaaaaaacaaaaagttttaaaaaaattgttgagtcaaaaagtcaaacaataaagaaattaagatttcttggaaaaaaaaaa

SEQ ID NO: 356269 - DNA, 2344 bp, Homo sapiens
gggtttggccctggacggccttgcctttcccgccaaacccggtttaagggaactcctcaaatgctgtgggctccttttccccatgggtatatatcggcggatccctttttttttttttttcctaatttttggtcggcggcggtgctgggccaggggaaggaagggacacggaggccgccctcgtcccgccacctcctacccgcttccccccagccccggctccgggagatgtgccgggcggggggcccgggttcgccgagccgcaggagagacacgctgggccgaccccagagaggcgctggacaggctggtggtccaggccgtggtgcctgccaggtgatgtggggcaaagccccccgcacaggccactgagagctccggacacgcacccggctgccaccatggcccgcctagccgcagtgctctggaatctgtgtgtcaccgccgtcctggtcacctcggccacccaaggcctgagccgggccgggctcccgttcgggctgatgcgccgggagctggcgtgtgaaggctaccccatcgagctgcggtgccccggcagcgacgtcatcatggtggagaatgccaactacgggcgcacggacgacaagatttgcgatgctgaccctttccagatggagaatgtgcagtgctacctgccggacgccttcaagatcatgtcacagaggtgtaacaaccgcacccagtgcgtggtggtcgccggctcggatgcctttcctgacccctgtcctgggacctacaagtacctggaggtgcagtacgactgtgtcccctacaaagtggagcagcatcttgttccttgtgcggatgcgggcccttctcgcatgagtgagtgaggaggagacaccttgacccatcacacatgtgcacacatgcatggggcctgggcacagtggggacagccgggcctgctctctccaacacacattctctaatcccagacaccagtgtccacactcagtgcctgctccccgcctcacagactctgtcccctcctgtggggacaccttctccagctctccttaccccagcccactcaccctgcttcttcatgcaccctatactcatttccacactgccaggccatggtcccgtgctctgcctggcacacttacgtctctctcttctcccttggcctctatgcttttctcccccatctgcctccctcgccttctcacatcccttccttttctgactcttctgaccttttctgacccttctcatctaccttctcttccctctcacttaccccactgcccctctcaacaccgttctctcagcaccctcactccccacacacttcttcccaatcatggaagctggactctacacccatagagtgggataccatcctctgaggcctggtggcagattcagggtgaagggctggggggcattttcaacagattcatagctcctcactggtctccccattaccatgtggcacttcctgtctgcaaaggaaatgccgccatgttggactgagggtggcctccaggcagcctgaagaaagtgatttggggagccaggagcctggccatcttgcacctggccaaagggatcagacaaagacaaggtctctcctcctcagcaccccacccttgacatcacctttttcctgccctctctcctccctccctccttcccattatcccttcccttctcctcccacaatgggttccatgtagtcaacctggtggtagggcctccgggaagagtggggagaaggcagggccatcagggtgtctgagtgtggcgggccgggtttggggactaagaggccctgtaactctccctcctctcccctcccaccccaaccttccctgccagcctttgatttctcctcacaggtgactcgatgctggggaaacaggatcccttctgtgcttccgtaattttcttcttttactcttcgtcctttcctttcagcgcttgaggccttcagccaccaccgagggggatgcccatctgctccttgaagcctccccacagcactggggacacggctgactcccgcggctgggacagcggggaaggggggtgggaggcagcgagctcagcacaggggggcagtcagatgggtgtaggttcaaggctcgactgggctcttgagttttctggctctgaaaccttgagcaaatgatttaatttctctgggccactacggaaggaggtgtgagtccatgagatgacatgtgagaagcgcttggcccagggccggccacaaagtcgctcctggtggcagggttttgagtgccgagtgtaaacttcccaagggcagaggcttcgtcttcacccgccgccccagcgcccagacccatgcctg

SEQ ID NO: 356270 - DNA, 549 bp, Homo sapiens
tcaaaaggtgagtctgtttaagggcaacttaaagagaaataggcagcaaatatagcctaagtggtctggaaatttagcagaaacaatgaagttggcagaggaataactgatgttcacaataccccgacccctgacccagtacctttccctcaggcccaggctccggtggaggtgtcctgggcaggccactgcccccaaggcccactcggcccgctcagggctttgcagacagtgcccaggcccacccaagggcccccgttgtaggctgcaggggaggcctgggctgaggccgtcccctccggcgggtactttgactcccctgtcgccccactcccagatcctgggcgctgggggccatcgcgctgctgttcctgctgggcctcacctgggctttcggcctcctcttcatcaacaaggagtcggtggtcatggcctatctcttcaccaccttcaacgccttccagggggtcttcatcttcgtctttcactgcgccttacagaagaaggtgaggtcgaggcggggtcctgggtcacagcctcccttggaga

SEQ ID NO: 356271 - DNA, 7972 bp, Homo sapiens
  misc_feature (5937)..(5937): n is a, c, g, or t
gggtttggccctggacggccttgcctttcccgccaaacccggtttaagggaactcctcaaatgctgtgggctccttttccccatgggtatatatcggcggatccctttttttttttttttcctaatttttggtcggcggcggtgctgggccaggggaaggaagggacacggaggccgccctcgtcccgccacctcctacccgcttccccccagccccggctccgggagatgtgccgggcggggggcccgggttcgccgagccgcaggagagacacgctgggccgaccccagagaggcgctggacaggctggtggtccaggccgtggtgcctgccaggtgatgtggggcaaagccccccgcacaggccactgagagctccggacacgcacccggctgccaccatggcccgcctagccgcagtgctctggaatctgtgtgtcaccgccgtcctggtcacctcggccacccaaggcctgagccgggccgggctcccgttcgggctgatgcgccgggagctggcgtgtgaaggctaccccatcgagctgcggtgccccggcagcgacgtcatcatggtggagaatgccaactacgggcgcacggacgacaagatttgcgatgctgaccctttccagatggagaatgtgcagtgctacctgccggacgccttcaagatcatgtcacagaggtgtaacaaccgcacccagtgcgtggtggtcgccggctcggatgcctttcctgacccctgtcctgggacctacaagtacctggaggtgcagtacgactgtgtcccctacaaagtggagcagagtcttcgtgtgcccagggaccctgcagaaggtgctggagcccacctcgacacacgagtcagagcaccagtctggcgcatggtgcaaggacccgctgcaggcgggtgaccgcatctacgtgatgccctggatcccctaccgcacggacacactgactgagtatgcctcgtgggaggactacgtggccgcccgccacaccaccacctaccgcctgcccaaccgcgtggatggcacaggctttgtggtctacgatggtgccgtcttctacaacaaggagcgcacgcgcaacatcgtcaagtatgacctacggacgcgcatcaagagcggggagacggtcatcaataccgccaactaccatgacacctcgccctaccgctggggcggaaagaccgacattgacctggcggtggacgagaacgggctgtgggtcatctacgccactgagggcaacaacgggcggctggtggtgagccagctgaacccctacacactgcgctttgagggcacgtgggagacgggttacgacaagcgctcggcatccaacgccttcatggtgtgtggggtcctgtacgtcctgcgttccgtgtacgtggatgatgacagcgaggcggctggcaaccgcgtggactatgccttcaacaccaatgccaaccgcgaggagcctgtcagcctcaccttccccaacccctaccagttcatctcctccgttgactacaaccctcgcgacaaccagctgtacgtctggaacaactatttcgtggtgcgctacagcctggagttcgggccgcccgaccccagtgctggcccagccacttccccacccctcagcacgaccaccacagccaggcccacgcccctcaccagcacagcctcgcccgcagccaccaccccgctccgccgggcacccctcaccacgcacccagtgggtgccatcaaccagctgggacctgatctgcctccagccacagccccagtccccagcacccggcggcccccagccccgaatctacacgtgtcccctgagctcttctgcgagccccgagaggtacggcgggtccagtggccggccacccagcagggcatgctggtggagaggccctgccccaaggggactcgaggaattgcctccttccagtgtctaccagccttggggctctggaacccccggggccctgacctcagcaactgcacctccccctgggtcaaccaggtggcccagaagatcaagagtggggagaacgcggccaacatcgccagcgagctggcccgacacacccggggctccatctacgcgggggacgtctcctcctctgtgaagctgatggagcagctgctggacatcctggatgcccagctgcaggccctgcggcccatcgagcgcgagtcagccggcaagaactacaacaagatgcacaagcgagagagaacttgtaaggattatatcaaggccgtggtggagacagtggacaatctgctccggccagaagctctggagtcctggaaggacatgaatgccacggagcaggtgcacacggccaccatgctcctcgacgtcctggaggagggcgccttcctgctggccgacaatgtcagggagcctgcccgcttcctggctgccaaggagaacgtggtcctggaggtcacagtcctgaacacagagggccaggtgcaggagctggtgttcccccaggaggagtacccgagaaagaactccatccagctgtctgccaaaaccatcaagcagaacagccgcaatggggtggtcaaagttgtcttcatcctctacaacaacctgggcctcttcctgtccacggagaatgccacagtgaagctggccggcgaagcaggcccgggtggccctgggggcgcctctctagtggtgaactcacaggtcatcgcagcatccatcaacaaggagtccagccgcgtcttcctcatggaccctgtcatcttcaccgtggcccacctggaggacaagaaccacttcaatgctaactgctccttctggaactactcggagcgttccatgctgggctactggtcgacccaaggctgccgcctggtggagtccaacaagacccataccacgtgtgcctgcagccacctcaccaacttcgctgtgctcatggctcaccgtgagatctaccagggccgcatcaacgagctgctgctgtcggtcatcacctgggtgggcattgtgatctccctggtctgcttggccatctgcatctccaccttctgcttcctgcgggggctgcagaccgaccgcaacaccatccacaagaacctgtgcatcaacctcttcctggctgagctgctcttcctggtcgggatcgacaagactcagtatgagattgcctgccccatcttcgccggcctgctgcactatttcttcctggctgccttctcctggctgtgcctggagggcgtgcacctctacctgctactagtggaggtgtttgagagcgagtattcccgcaccaagtactactacctgggtggctactgcttcccggccctggtggtgggcatcgcggctgccattgactaccgcagctacggcaccgagaaggcctgctggctccgagtggacaattacttcatctggagtttcatcgggccagtctccttcgttatcgtggtcaacctggtgttcctcatggtgaccctgcacaagatgatccgaagctcatctgtgctcaagcccgactccagccgcctggacaacattaaatcctgggcgctgggggccatcgcgctgctgttcctgctgggcctcacctgggctttcggcctcctcttcatcaacaaggagtcggtggtcatggcctatctcttcaccaccttcaacgccttccagggggtcttcatcttcgtctttcactgcgccttacagaagaaggtgcacaaggagtacagcaagtgcctgcgtcactcctactgctgcatccgctccccacccgggggcactcacggatccctcaagacctcagccatgcgaagcaacacccgctactacacagggacccagagccgaattcggaggatgtggaatgacactgtgaggaaacagacggagtcctccttcatggcgggtgacatcaacagcacccccaccctgaaccgaggtaccatggggaaccacctgctgaccaaccccgtgctgcagccccgtgggggcaccagtccctacaacaccctcatcgccgagtcagtgggcttcaatccctcctcgccccctgtcttcaactccccagggagctaccgggaacccaagcaccccttgggaggccgggaagcctgtggcatggacaccctgcccctgaacggcaacttcaataacagttactccttgcgaagtggggatttccctcccggggatgggggccctgagccgccccgaggccggaacctagccgatgcggcggcctttgagaagatgatcatctcagagctggtgcacaacaacctgcgggggagcagcagcgcggccaagggccctccaccgcctgagccccctgtgccacctgtgccagggggcgggggcgaggaagaggcgggcgggcccgggggtgctgaccgggccgagattgaacttctctataaggccctggaggagcctctgctgctgccccgggcccagtcggtgctgtaccagagcgatctggacgagtcggagagctgcacggccgaggacggcgccaccagccggcccctctcctcccctcctggccgggactccctctatgccagcggggccaacctgcgggactcaccctcctacccggacagcagccctgaggggcccagtgaggccctgcccccaccccctcccgcaccccccggcccccccgaaatctactacacctcgcgcccgccagccctggtggcccggaatcccctgcagggctactaccaggtgcggcgtcctagccacgagggctacctggcagccccaggccttgaggggccagggcccgatggggacgggcagatgcagctggtcaccagtctctgagggcacctcatggaccaggggctggtggcccaggccagggagggaaccctgggcagggctctggtgggagagggagacagatggaggcagtggctggtgggccactctctccaggtgcccctcagccatgggccctacagtcccctcaggggactctaacctgggggcctgaggtgccagggttcacagacagggtttcccaccagccacacgcaccagctctatttgggggaagtgtagtgaggaggagcccagaggaccccaggggagtgaggagggagaacttggaagggtgcagcccacttccagactctcccctctcccacccttctaccctgtgaagggaaatgagggctttagtttcctgggcagggaggggcagcttctgaggttgccaaaggcccccactggatggaacctgttagctgctcctctccgcagccagaaatgctgccggctgcacccagagggagcagtgaggcaggacagatggacaggttcctcctgcgctgtaattccctgctccctggagactgggaaaaggccgcagggcagggggactgggcggtggtggctggtggtttaaaggttgaactttctctgaagctcctttccccttgctcttggtccctgccccgcaagcaaacctgccccctctgcctcccagtgcacccaatgaccccctcccttggggcgactcctgatgaagcacaactccccgcagggcccccagcccacaggggtggccatatttgggcagttcccagtcctgtgggctcggctatctggggagcagattttgggtctggatctccctggggagtgggtcctgggcttggatctttccctagggggccctcttactccttcctctctcctcctccttccccattgctgtaaatatttcaacgaaatggaaaagaaaaaaaaagacaaaaaaaaaaaaaaagaaaagaaaaaaatctcatcacttgaagccaccgggagcctgcggcccgggccagcccgggctttctccggagcagagcagcgctgctggcctggcagccaggacttctccgtgtacgtgcatccccagtccccgccggggcgggcgggccgccagagcagctntttacaatccagagacagaaaacaaaatctagatgcaacagcgaaacaaagaacccatttccttcctggcacccgtttctgtcccctcctttcctgctccgcctgcccggcatcatcagcccttctggggcgtgtacctctcactgcctgccccaggaccagaggcctgtctcccccttccctccccaccggcccgggggagacctcttcacacccaaagatgctttgtcaagatggctgcgctgtccctttgagttcctgcttcttgtatattgctctggggactctcgccggggaagatggggctgatttcccacctagagaggttgatggcagaaggaaaatggggaggcactggggttgtggagggcatgggtatggctgaggagggtgctgggaacggcaaggcggtctgggggatggggaggggcaaaggtgagagatcaccttccctatcctccaccttcccgcagggaagacgaagccaggtgccagggctggggtcgggacacccatgttctgggcggcttgaccccaaatcccagaccccggaagctccaggctcgggatgtgtcctgagcacctgtcccggccccctcctctccagcctgtcaggccagcctccccagcccccttccctcaactctaggggcagcatagccccaggccaccctagcccagcccctgcattgccgtttccccagaggtggcccctccacctctgctctgacctctccccatctctctgcccctccttttctcacaagtgccatgagttttcaaacatcttcgggtctcagcctgctgctgccatgaactttgttgggttaagggggaggggctctaggaaggaactggggggaaggggacaggtaggtggctggagggaccctttttgctgctagaaagcccctcccttctcccggggagctggggctggcttgtccccatcaattaggggagaaggggtcagaccaaagatggtggtttgtcccgtgtaagggaacaggtgtggggaagaggtggggttgggttccaactctggctttttctggtagaaaggcctaacccattacaccagaagaccatgggtgaagtctagatggggaggagaagtgaggccagggacagtcttgccagacgactctgaggagggcaagggacagttccatggcccttcccggactgcactaggctgggagctctgttgtgtggaggggtggtcagaggtctgtgaagagcgggcaggaggcatgagcaggcgaggagctggcctgtcccgggaagcagcccagcctgtggctgcccccgacaccaggaggagggccaggagagttccagggggctgaggcacacagagaggccaacttcctccctgcccagccttccttgtatctctccagactcggacaatcaaagggagagagggtgtatcgggtcctgttccagccggcatcgccgggtggcttccaggcctcagagctgtgtggcagggccccctgctggggctggacatcactgcagtccagtgcaaagccgcccccagagcccaggtgtccccccaacctaaccagacctggtgccttgacgcccccaccccagctgggacggtacagagaagggtcttggtttcctctcctactcccttccttaggctcctgaactcgtttgctcctaaatcttgttaattctttttctctggattttggtttcttttggctttcccttgccttcccctttctctgtctccaacactctttccccatgtctttctggctgtctctatgttcctcttctcttatcctcaactttctgtccattcgggcctcctccccacctcccacgccccagcccctccctccttggtctccttttcgatatgccaaaccaattttgggtcgagtgcatttaacgagaacaaaacaaaaggctcataacaacaagaacgtttcagaaaaaaacaaaaagttttaaaaaaattgttgagtcaaaaagtcaaacaataaagaaattaagatttcttggaaaaaaaaaa

SEQ ID NO: 356272 - DNA, 7957 bp, Homo sapiens
  misc_feature (5922)..(5922): n is a, c, g, or t
gggtttggccctggacggccttgcctttcccgccaaacccggtttaagggaactcctcaaatgctgtgggctccttttccccatgggtatatatcggcggatccctttttttttttttttcctaatttttggtcggcggcggtgctgggccaggggaaggaagggacacggaggccgccctcgtcccgccacctcctacccgcttccccccagccccggctccgggagatgtgccgggcggggggcccgggttcgccgagccgcaggagagacacgctgggccgaccccagagaggcgctggacaggctggtggtccaggccgtggtgcctgccaggtgatgtggggcaaagccccccgcacaggccactgagagctccggacacgcacccggctgccaccatggcccgcctagccgcagtgctctggaatctgtgtgtcaccgccgtcctggtcacctcggccacccaaggcctgagccgggccgggctcccgttcgggctgatgcgccgggagctggcgtgtgaaggctaccccatcgagctgcggtgccccggcagcgacgtcatcatggtggagaatgccaactacgggcgcacggacgacaagatttgcgatgctgaccctttccagatggagaatgtgcagtgctacctgccggacgccttcaagatcatgtcacagaggtgtaacaaccgcacccagtgcgtggtggtcgccggctcggatgcctttcctgacccctgtcctgggacctacaagtacctggaggtgcagtacgactgtgtcccctacaaagtggagcagaaagggattgggggggtggggcggggccccccacctttctgacatcagcgctgccttggtccctcttcccgagccggggatggtcgcagagtcttcgtgtgcccagggaccctgcagaaggtgctggagcccacctcgacacacgagtcagagcaccagtctggcgcatggtgcaaggacccgctgcaggcgggtgaccgcatctacgtgatgccctggatcccctaccgcacggacacactgactgagtatgcctcgtgggaggactacgtggccgcccgccacaccaccacctaccgcctgcccaaccgcgtggatggcacaggctttgtggtctacgatggtgccgtcttctacaacaaggagcgcacgcgcaacatcgtcaagtatgacctacggacgcgcatcaagagcggggagacggtcatcaataccgccaactaccatgacacctcgccctaccgctggggcggaaagaccgacattgacctggcggtggacgagaacgggctgtgggtcatctacgccactgagggcaacaacgggcggctggtggtgagccagctgaacccctacacactgcgctttgagggcacgtgggagacgggttacgacaagcgctcggcatccaacgccttcatggtgtgtggggtcctgtacgtcctgcgttccgtgtacgtggatgatgacagcgaggcggctggcaaccgcgtggactatgccttcaacaccaatgccaaccgcgaggagcctgtcagcctcaccttccccaacccctaccagttcatctcctccgttgactacaaccctcgcgacaaccagctgtacgtctggaacaactatttcgtggtgcgctacagcctggagttcgggccgcccgaccccagtgctggcccagccacttccccacccctcagcacgaccaccacagccaggcccacgcccctcaccagcacagcctcgcccgcagccaccaccccgctccgccgggcacccctcaccacgcacccagtgggtgccatcaaccagctgggacctgatctgcctccagccacagccccagtccccagcacccggcggcccccagccccgaatctacacgtgtcccctgagctcttctgcgagccccgagaggtacggcgggtccagtggccggccacccagcagggcatgctggtggagaggccctgccccaaggggactcgagatcaagagtggggagaacgcggccaacatcgccagcgagctggcccgacacacccggggctccatctacgcgggggacgtctcctcctctgtgaagctgatggagcagctgctggacatcctggatgcccagctgcaggccctgcggcccatcgagcgcgagtcagccggcaagaactacaacaagatgcacaagcgagagagaacttgtaaggattatatcaaggccgtggtggagacagtggacaatctgctccggccagaagctctggagtcctggaaggacatgaatgccacggagcaggtgcacacggccaccatgctcctcgacgtcctggaggagggcgccttcctgctggccgacaatgtcagggagcctgcccgcttcctggctgccaaggagaacgtggtcctggaggtcacagtcctgaacacagagggccaggtgcaggagctggtgttcccccaggaggagtacccgagaaagaactccatccagctgtctgccaaaaccatcaagcagaacagccgcaatggggtggtcaaagttgtcttcatcctctacaacaacctgggcctcttcctgtccacggagaatgccacagtgaagctggccggcgaagcaggcccgggtggccctgggggcgcctctctagtggtgaactcacaggtcatcgcagcatccatcaacaaggagtccagccgcgtcttcctcatggaccctgtcatcttcaccgtggcccacctggaggacaagaaccacttcaatgctaactgctccttctggaactactcggagcgttccatgctgggctactggtcgacccaaggctgccgcctggtggagtccaacaagacccataccacgtgtgcctgcagccacctcaccaacttcgctgtgctcatggctcaccgtgagatctaccagggccgcatcaacgagctgctgctgtcggtcatcacctgggtgggcattgtgatctccctggtctgcttggccatctgcatctccaccttctgcttcctgcgggggctgcagaccgaccgcaacaccatccacaagaacctgtgcatcaacctcttcctggctgagctgctcttcctggtcgggatcgacaagactcagtatgagattgcctgccccatcttcgccggcctgctgcactatttcttcctggctgccttctcctggctgtgcctggagggcgtgcacctctacctgctactagtggaggtgtttgagagcgagtattcccgcaccaagtactactacctgggtggctactgcttcccggccctggtggtgggcatcgcggctgccattgactaccgcagctacggcaccgagaaggcctgctggctccgagtggacaattacttcatctggagtttcatcgggccagtctccttcgttatcgtggtcaacctggtgttcctcatggtgaccctgcacaagatgatccgaagctcatctgtgctcaagcccgactccagccgcctggacaacattaaatcctgggcgctgggggccatcgcgctgctgttcctgctgggcctcacctgggctttcggcctcctcttcatcaacaaggagtcggtggtcatggcctatctcttcaccaccttcaacgccttccagggggtcttcatcttcgtctttcactgcgccttacagaagaaggtgcacaaggagtacagcaagtgcctgcgtcactcctactgctgcatccgctccccacccgggggcactcacggatccctcaagacctcagccatgcgaagcaacacccgctactacacagggacccagagccgaattcggaggatgtggaatgacactgtgaggaaacagacggagtcctccttcatggcgggtgacatcaacagcacccccaccctgaaccgaggtaccatggggaaccacctgctgaccaaccccgtgctgcagccccgtgggggcaccagtccctacaacaccctcatcgccgagtcagtgggcttcaatccctcctcgccccctgtcttcaactccccagggagctaccgggaacccaagcaccccttgggaggccgggaagcctgtggcatggacaccctgcccctgaacggcaacttcaataacagttactccttgcgaagtggggatttccctcccggggatgggggccctgagccgccccgaggccggaacctagccgatgcggcggcctttgagaagatgatcatctcagagctggtgcacaacaacctgcgggggagcagcagcgcggccaagggccctccaccgcctgagccccctgtgccacctgtgccagggggcgggggcgaggaagaggcgggcgggcccgggggtgctgaccgggccgagattgaacttctctataaggccctggaggagcctctgctgctgccccgggcccagtcggtgctgtaccagagcgatctggacgagtcggagagctgcacggccgaggacggcgccaccagccggcccctctcctcccctcctggccgggactccctctatgccagcggggccaacctgcgggactcaccctcctacccggacagcagccctgaggggcccagtgaggccctgcccccaccccctcccgcaccccccggcccccccgaaatctactacacctcgcgcccgccagccctggtggcccggaatcccctgcagggctactaccaggtgcggcgtcctagccacgagggctacctggcagccccaggccttgaggggccagggcccgatggggacgggcagatgcagctggtcaccagtctctgagggcacctcatggaccaggggctggtggcccaggccagggagggaaccctgggcagggctctggtgggagagggagacagatggaggcagtggctggtgggccactctctccaggtgcccctcagccatgggccctacagtcccctcaggggactctaacctgggggcctgaggtgccagggttcacagacagggtttcccaccagccacacgcaccagctctatttgggggaagtgtagtgaggaggagcccagaggaccccaggggagtgaggagggagaacttggaagggtgcagcccacttccagactctcccctctcccacccttctaccctgtgaagggaaatgagggctttagtttcctgggcagggaggggcagcttctgaggttgccaaaggcccccactggatggaacctgttagctgctcctctccgcagccagaaatgctgccggctgcacccagagggagcagtgaggcaggacagatggacaggttcctcctgcgctgtaattccctgctccctggagactgggaaaaggccgcagggcagggggactgggcggtggtggctggtggtttaaaggttgaactttctctgaagctcctttccccttgctcttggtccctgccccgcaagcaaacctgccccctctgcctcccagtgcacccaatgaccccctcccttggggcgactcctgatgaagcacaactccccgcagggcccccagcccacaggggtggccatatttgggcagttcccagtcctgtgggctcggctatctggggagcagattttgggtctggatctccctggggagtgggtcctgggcttggatctttccctagggggccctcttactccttcctctctcctcctccttccccattgctgtaaatatttcaacgaaatggaaaagaaaaaaaaagacaaaaaaaaaaaaaaagaaaagaaaaaaatctcatcacttgaagccaccgggagcctgcggcccgggccagcccgggctttctccggagcagagcagcgctgctggcctggcagccaggacttctccgtgtacgtgcatccccagtccccgccggggcgggcgggccgccagagcagctntttacaatccagagacagaaaacaaaatctagatgcaacagcgaaacaaagaacccatttccttcctggcacccgtttctgtcccctcctttcctgctccgcctgcccggcatcatcagcccttctggggcgtgtacctctcactgcctgccccaggaccagaggcctgtctcccccttccctccccaccggcccgggggagacctcttcacacccaaagatgctttgtcaagatggctgcgctgtccctttgagttcctgcttcttgtatattgctctggggactctcgccggggaagatggggctgatttcccacctagagaggttgatggcagaaggaaaatggggaggcactggggttgtggagggcatgggtatggctgaggagggtgctgggaacggcaaggcggtctgggggatggggaggggcaaaggtgagagatcaccttccctatcctccaccttcccgcagggaagacgaagccaggtgccagggctggggtcgggacacccatgttctgggcggcttgaccccaaatcccagaccccggaagctccaggctcgggatgtgtcctgagcacctgtcccggccccctcctctccagcctgtcaggccagcctccccagcccccttccctcaactctaggggcagcatagccccaggccaccctagcccagcccctgcattgccgtttccccagaggtggcccctccacctctgctctgacctctccccatctctctgcccctccttttctcacaagtgccatgagttttcaaacatcttcgggtctcagcctgctgctgccatgaactttgttgggttaagggggaggggctctaggaaggaactggggggaaggggacaggtaggtggctggagggaccctttttgctgctagaaagcccctcccttctcccggggagctggggctggcttgtccccatcaattaggggagaaggggtcagaccaaagatggtggtttgtcccgtgtaagggaacaggtgtggggaagaggtggggttgggttccaactctggctttttctggtagaaaggcctaacccattacaccagaagaccatgggtgaagtctagatggggaggagaagtgaggccagggacagtcttgccagacgactctgaggagggcaagggacagttccatggcccttcccggactgcactaggctgggagctctgttgtgtggaggggtggtcagaggtctgtgaagagcgggcaggaggcatgagcaggcgaggagctggcctgtcccgggaagcagcccagcctgtggctgcccccgacaccaggaggagggccaggagagttccagggggctgaggcacacagagaggccaacttcctccctgcccagccttccttgtatctctccagactcggacaatcaaagggagagagggtgtatcgggtcctgttccagccggcatcgccgggtggcttccaggcctcagagctgtgtggcagggccccctgctggggctggacatcactgcagtccagtgcaaagccgcccccagagcccaggtgtccccccaacctaaccagacctggtgccttgacgcccccaccccagctgggacggtacagagaagggtcttggtttcctctcctactcccttccttaggctcctgaactcgtttgctcctaaatcttgttaattctttttctctggattttggtttcttttggctttcccttgccttcccctttctctgtctccaacactctttccccatgtctttctggctgtctctatgttcctcttctcttatcctcaactttctgtccattcgggcctcctccccacctcccacgccccagcccctccctccttggtctccttttcgatatgccaaaccaattttgggtcgagtgcatttaacgagaacaaaacaaaaggctcataacaacaagaacgtttcagaaaaaaacaaaaagttttaaaaaaattgttgagtcaaaaagtcaaacaataaagaaattaagatttcttggaaaaaaaaaa

SEQ ID NO: 356273 - DNA, 8040 bp, Homo sapiens
  misc_feature (6005)..(6005): n is a, c, g, or t
gggtttggccctggacggccttgcctttcccgccaaacccggtttaagggaactcctcaaatgctgtgggctccttttccccatgggtatatatcggcggatccctttttttttttttttcctaatttttggtcggcggcggtgctgggccaggggaaggaagggacacggaggccgccctcgtcccgccacctcctacccgcttccccccagccccggctccgggagatgtgccgggcggggggcccgggttcgccgagccgcaggagagacacgctgggccgaccccagagaggcgctggacaggctggtggtccaggccgtggtgcctgccaggtgatgtggggcaaagccccccgcacaggccactgagagctccggacacgcacccggctgccaccatggcccgcctagccgcagtgctctggaatctgtgtgtcaccgccgtcctggtcacctcggccacccaaggcctgagccgggccgggctcccgttcgggctgatgcgccgggagctggcgtgtgaaggctaccccatcgagctgcggtgccccggcagcgacgtcatcatggtggagaatgccaactacgggcgcacggacgacaagatttgcgatgctgaccctttccagatggagaatgtgcagtgctacctgccggacgccttcaagatcatgtcacagaggtgtaacaaccgcacccagtgcgtggtggtcgccggctcggatgcctttcctgacccctgtcctgggacctacaagtacctggaggtgcagtacgactgtgtcccctacaaagtggagcagaaagggattgggggggtggggcggggccccccacctttctgacatcagcgctgccttggtccctcttcccgagccggggatggtcgcagagtcttcgtgtgcccagggaccctgcagaaggtgctggagcccacctcgacacacgagtcagagcaccagtctggcgcatggtgcaaggacccgctgcaggcgggtgaccgcatctacgtgatgccctggatcccctaccgcacggacacactgactgagtatgcctcgtgggaggactacgtggccgcccgccacaccaccacctaccgcctgcccaaccgcgtggatggcacaggctttgtggtctacgatggtgccgtcttctacaacaaggagcgcacgcgcaacatcgtcaagtatgacctacggacgcgcatcaagagcggggagacggtcatcaataccgccaactaccatgacacctcgccctaccgctggggcggaaagaccgacattgacctggcggtggacgagaacgggctgtgggtcatctacgccactgagggcaacaacgggcggctggtggtgagccagctgaacccctacacactgcgctttgagggcacgtgggagacgggttacgacaagcgctcggcatccaacgccttcatggtgtgtggggtcctgtacgtcctgcgttccgtgtacgtggatgatgacagcgaggcggctggcaaccgcgtggactatgccttcaacaccaatgccaaccgcgaggagcctgtcagcctcaccttccccaacccctaccagttcatctcctccgttgactacaaccctcgcgacaaccagctgtacgtctggaacaactatttcgtggtgcgctacagcctggagttcgggccgcccgaccccagtgctggcccagccacttccccacccctcagcacgaccaccacagccaggcccacgcccctcaccagcacagcctcgcccgcagccaccaccccgctccgccgggcacccctcaccacgcacccagtgggtgccatcaaccagctgggacctgatctgcctccagccacagccccagtccccagcacccggcggcccccagccccgaatctacacgtgtcccctgagctcttctgcgagccccgagaggtacggcgggtccagtggccggccacccagcagggcatgctggtggagaggccctgccccaaggggactcgaggaattgcctccttccagtgtctaccagccttggggctctggaacccccggggccctgacctcagcaactgcacctccccctgggtcaaccaggtggcccagaagatcaagagtggggagaacgcggccaacatcgccagcgagctggcccgacacacccggggctccatctacgcgggggacgtctcctcctctgtgaagctgatggagcagctgctggacatcctggatgcccagctgcaggccctgcggcccatcgagcgcgagtcagccggcaagaactacaacaagatgcacaagcgagagagaacttgtaaggattatatcaaggccgtggtggagacagtggacaatctgctccggccagaagctctggagtcctggaaggacatgaatgccacggagcaggtgcacacggccaccatgctcctcgacgtcctggaggagggcgccttcctgctggccgacaatgtcagggagcctgcccgcttcctggctgccaaggagaacgtggtcctggaggtcacagtcctgaacacagagggccaggtgcaggagctggtgttcccccaggaggagtacccgagaaagaactccatccagctgtctgccaaaaccatcaagcagaacagccgcaatggggtggtcaaagttgtcttcatcctctacaacaacctgggcctcttcctgtccacggagaatgccacagtgaagctggccggcgaagcaggcccgggtggccctgggggcgcctctctagtggtgaactcacaggtcatcgcagcatccatcaacaaggagtccagccgcgtcttcctcatggaccctgtcatcttcaccgtggcccacctggaggacaagaaccacttcaatgctaactgctccttctggaactactcggagcgttccatgctgggctactggtcgacccaaggctgccgcctggtggagtccaacaagacccataccacgtgtgcctgcagccacctcaccaacttcgctgtgctcatggctcaccgtgagatctaccagggccgcatcaacgagctgctgctgtcggtcatcacctgggtgggcattgtgatctccctggtctgcttggccatctgcatctccaccttctgcttcctgcgggggctgcagaccgaccgcaacaccatccacaagaacctgtgcatcaacctcttcctggctgagctgctcttcctggtcgggatcgacaagactcagtatgagattgcctgccccatcttcgccggcctgctgcactatttcttcctggctgccttctcctggctgtgcctggagggcgtgcacctctacctgctactagtggaggtgtttgagagcgagtattcccgcaccaagtactactacctgggtggctactgcttcccggccctggtggtgggcatcgcggctgccattgactaccgcagctacggcaccgagaaggcctgctggctccgagtggacaattacttcatctggagtttcatcgggccagtctccttcgttatcgtggtcaacctggtgttcctcatggtgaccctgcacaagatgatccgaagctcatctgtgctcaagcccgactccagccgcctggacaacattaaatcctgggcgctgggggccatcgcgctgctgttcctgctgggcctcacctgggctttcggcctcctcttcatcaacaaggagtcggtggtcatggcctatctcttcaccaccttcaacgccttccagggggtcttcatcttcgtctttcactgcgccttacagaagaaggtgcacaaggagtacagcaagtgcctgcgtcactcctactgctgcatccgctccccacccgggggcactcacggatccctcaagacctcagccatgcgaagcaacacccgctactacacagggacccagagccgaattcggaggatgtggaatgacactgtgaggaaacagacggagtcctccttcatggcgggtgacatcaacagcacccccaccctgaaccgaggtaccatggggaaccacctgctgaccaaccccgtgctgcagccccgtgggggcaccagtccctacaacaccctcatcgccgagtcagtgggcttcaatccctcctcgccccctgtcttcaactccccacaccccttgggaggccgggaagcctgtggcatggacaccctgcccctgaacggcaacttcaataacagttactccttgcgaagtggggatttccctcccggggatgggggccctgagccgccccgaggccggaacctagccgatgcggcggcctttgagaagatgatcatctcagagctggtgcacaacaacctgcgggggagcagcagcgcggccaagggccctccaccgcctgagccccctgtgccacctgtgccagggggcgggggcgaggaagaggcgggcgggcccgggggtgctgaccgggccgagattgaacttctctataaggccctggaggagcctctgctgctgccccgggcccagtcggtgctgtaccagagcgatctggacgagtcggagagctgcacggccgaggacggcgccaccagccggcccctctcctcccctcctggccgggactccctctatgccagcggggccaacctgcgggactcaccctcctacccggacagcagccctgaggggcccagtgaggccctgcccccaccccctcccgcaccccccggcccccccgaaatctactacacctcgcgcccgccagccctggtggcccggaatcccctgcagggctactaccaggtgcggcgtcctagccacgagggctacctggcagccccaggccttgaggggccagggcccgatggggacgggcagatgcagctggtcaccagtctctgagggcacctcatggaccaggggctggtggcccaggccagggagggaaccctgggcagggctctggtgggagagggagacagatggaggcagtggctggtgggccactctctccaggtgcccctcagccatgggccctacagtcccctcaggggactctaacctgggggcctgaggtgccagggttcacagacagggtttcccaccagccacacgcaccagctctatttgggggaagtgtagtgaggaggagcccagaggaccccaggggagtgaggagggagaacttggaagggtgcagcccacttccagactctcccctctcccacccttctaccctgtgaagggaaatgagggctttagtttcctgggcagggaggggcagcttctgaggttgccaaaggcccccactggatggaacctgttagctgctcctctccgcagccagaaatgctgccggctgcacccagagggagcagtgaggcaggacagatggacaggttcctcctgcgctgtaattccctgctccctggagactgggaaaaggccgcagggcagggggactgggcggtggtggctggtggtttaaaggttgaactttctctgaagctcctttccccttgctcttggtccctgccccgcaagcaaacctgccccctctgcctcccagtgcacccaatgaccccctcccttggggcgactcctgatgaagcacaactccccgcagggcccccagcccacaggggtggccatatttgggcagttcccagtcctgtgggctcggctatctggggagcagattttgggtctggatctccctggggagtgggtcctgggcttggatctttccctagggggccctcttactccttcctctctcctcctccttccccattgctgtaaatatttcaacgaaatggaaaagaaaaaaaaagacaaaaaaaaaaaaaaagaaaagaaaaaaatctcatcacttgaagccaccgggagcctgcggcccgggccagcccgggctttctccggagcagagcagcgctgctggcctggcagccaggacttctccgtgtacgtgcatccccagtccccgccggggcgggcgggccgccagagcagctntttacaatccagagacagaaaacaaaatctagatgcaacagcgaaacaaagaacccatttccttcctggcacccgtttctgtcccctcctttcctgctccgcctgcccggcatcatcagcccttctggggcgtgtacctctcactgcctgccccaggaccagaggcctgtctcccccttccctccccaccggcccgggggagacctcttcacacccaaagatgctttgtcaagatggctgcgctgtccctttgagttcctgcttcttgtatattgctctggggactctcgccggggaagatggggctgatttcccacctagagaggttgatggcagaaggaaaatggggaggcactggggttgtggagggcatgggtatggctgaggagggtgctgggaacggcaaggcggtctgggggatggggaggggcaaaggtgagagatcaccttccctatcctccaccttcccgcagggaagacgaagccaggtgccagggctggggtcgggacacccatgttctgggcggcttgaccccaaatcccagaccccggaagctccaggctcgggatgtgtcctgagcacctgtcccggccccctcctctccagcctgtcaggccagcctccccagcccccttccctcaactctaggggcagcatagccccaggccaccctagcccagcccctgcattgccgtttccccagaggtggcccctccacctctgctctgacctctccccatctctctgcccctccttttctcacaagtgccatgagttttcaaacatcttcgggtctcagcctgctgctgccatgaactttgttgggttaagggggaggggctctaggaaggaactggggggaaggggacaggtaggtggctggagggaccctttttgctgctagaaagcccctcccttctcccggggagctggggctggcttgtccccatcaattaggggagaaggggtcagaccaaagatggtggtttgtcccgtgtaagggaacaggtgtggggaagaggtggggttgggttccaactctggctttttctggtagaaaggcctaacccattacaccagaagaccatgggtgaagtctagatggggaggagaagtgaggccagggacagtcttgccagacgactctgaggagggcaagggacagttccatggcccttcccggactgcactaggctgggagctctgttgtgtggaggggtggtcagaggtctgtgaagagcgggcaggaggcatgagcaggcgaggagctggcctgtcccgggaagcagcccagcctgtggctgcccccgacaccaggaggagggccaggagagttccagggggctgaggcacacagagaggccaacttcctccctgcccagccttccttgtatctctccagactcggacaatcaaagggagagagggtgtatcgggtcctgttccagccggcatcgccgggtggcttccaggcctcagagctgtgtggcagggccccctgctggggctggacatcactgcagtccagtgcaaagccgcccccagagcccaggtgtccccccaacctaaccagacctggtgccttgacgcccccaccccagctgggacggtacagagaagggtcttggtttcctctcctactcccttccttaggctcctgaactcgtttgctcctaaatcttgttaattctttttctctggattttggtttcttttggctttcccttgccttcccctttctctgtctccaacactctttccccatgtctttctggctgtctctatgttcctcttctcttatcctcaactttctgtccattcgggcctcctccccacctcccacgccccagcccctccctccttggtctccttttcgatatgccaaaccaattttgggtcgagtgcatttaacgagaacaaaacaaaaggctcataacaacaagaacgtttcagaaaaaaacaaaaagttttaaaaaaattgttgagtcaaaaagtcaaacaataaagaaattaagatttcttggaaaaaaaaaa

SEQ ID NO: 356274 - DNA, 7230 bp, Homo sapiens
  misc_feature (5195)..(5195): n is a, c, g, or t
gggtttggccctggacggccttgcctttcccgccaaacccggtttaagggaactcctcaaatgctgtgggctccttttccccatgggtatatatcggcggatccctttttttttttttttcctaatttttggtcggcggcggtgctgggccaggggaaggaagggacacggaggccgccctcgtcccgccacctcctacccgcttccccccagccccggctccgggagatgtgccgggcggggggcccgggttcgccgagccgcaggagagacacgctgggccgaccccagagaggcgctggacaggctggtggtccaggccgtggtgcctgccaggtgatgtggggcaaagccccccgcacaggccactgagagctccggacacgcacccggctgccaccatggcccgcctagccgcagtgctctggaatctgtgtgtcaccgccgtcctggtcacctcggccacccaaggcctgagccgggccgggctcccgttcgggctgatgcgccgggagctggcgtgtgaaggctaccccatcgagctgcggtgccccggcagcgacgtcatcatggtggagaatgccaactacgggcgcacggacgacaagatttgcgatgctgaccctttccagatggagaatgtgcagtgctacctgccggacgccttcaagatcatgtcacagaggtgtaacaaccgcacccagtgcgtggtggtcgccggctcggatgcctttcctgacccctgtcctgggacctacaagtacctggaggtgcagtacgactgtgtcccctacaaagtggagcagaaagggattgggggggtggggcggggccccccacctttctgacatcagcgctgccttggtccctcttcccgagccggggatggtcgcagagtcttcgtgtgcccagggaccctgcagaaggtgctggagcccacctcgacacacgagtcagagcaccagtctggcgcatggtgcaaggacccgctgcaggcgggtgaccgcatctacgtgatgccctggatcccctaccgcacggacacactgactgagtatgcctcgtgggaggactacgtggccgcccgccacaccaccacctaccgcctgcccaaccgcgtggatggcacaggctttgtggtctacgatggtgccgtcttctacaacaaggagcgcacgcgcaacatcgtcaagtatgacctacggacgcgcatcaagagcggggagacggtcatcaataccgccaactaccatgacacctcgccctaccgctggggcggaaagaccgacattgacctggcggtggacgagaacgggctgtgggtcatctacgccactgagggcaacaacgggcggctggtggtgagccagctgaacccctacacactgcgctttgagggcacgtgggagacgggttacgacaagcgctcggcatccaacgccttcatggtgtgtggggtcctgtacgtcctgcgttccgtgtacgtggatgatgacagcgaggcggctggcaaccgcgtggactatgccttcaacaccaatgccaaccgcgaggagcctgtcagcctcaccttccccaacccctaccagttcatctcctccgttgactacaaccctcgcgacaaccagctgtacgtctggaacaactatttcgtggtgcgctacagcctggagttcgggccgcccgaccccagtgctggcccagccacttccccacccctcagcacgaccaccacagccaggcccacgcccctcaccagcacagcctcgcccgcagccaccaccccgctccgccgggcacccctcaccacgcacccagtgggtgccatcaaccagctgggacctgatctgcctccagccacagccccagtccccagcacccggcggcccccagccccgaatctacacgtgtcccctgagctcttctgcgagccccgagaggtacggcgggtccagtggccggccacccagcagggcatgctggtggagaggccctgccccaaggggactcgaggaattgcctccttccagtgtctaccagccttggggctctggaacccccggggccctgacctcagcaactgcacctccccctgggtcaaccaggtggcccagaagatcaagagtggggagaacgcggccaacatcgccagcgagctggcccgacacacccggggctccatctacgcgggggacgtctcctcctctgtgaagctgatggagcagctgctggacatcctggatgcccagctgcaggccctgcggcccatcgagcgcgagtcagccggcaagaactacaacaagatgcacaagcgagagagaacttgtaaggattatatcaaggccgtggtggagacagtggacaatctgctccggccagaagctctggagtcctggaaggacatgaatgccacggagcaggtgcacacggccaccatgctcctcgacgtcctggaggagggcgccttcctgctggccgacaatgtcagggagcctgcccgcttcctggctgccaaggagaacgtggtcctggaggtcacagtcctgaacacagagggccaggtgcaggagctggtgttcccccaggaggagtacccgagaaagaactccatccagctgtctgccaaaaccatcaagcagaacagccgcaatggggtggtcaaagttgtcttcatcctctacaacaacctgggcctcttcctgtccacggagaatgccacagtgaagctggccggcgaagcaggcccgggtggccctgggggcgcctctctagtggtgaactcacaggtcatcgcagcatccatcaacaaggagtccagccgcgtcttcctcatggaccctgtcatcttcaccgtggcccacctggaggacaagaaccacttcaatgctaactgctccttctggaactactcggagcgttccatgctgggctactggtcgacccaaggctgccgcctggtggagtccaacaagacccataccacgtgtgcctgcagccacctcaccaacttcgctgtgctcatggctcaccgtgagatctaccagggccgcatcaacgagctgctgctgtcggtcatcacctgggtgggcattgtgatctccctggtctgcttggccatctgcatctccaccttctgcttcctgcgggggctgcagaccgaccgcaacaccatccacaagaacctgtgcatcaacctcttcctggctgagctgctcttcctggtcgggatcgacaagactcagtatgagattgcctgccccatcttcgccggcctgctgcactatttcttcctggctgccttctcctggctgtgcctggagggcgtgcacctctacctgctactagtggaggtgtttgagagcgagtattcccgcaccaagtactactacctgggtggctactgcttcccggccctggtggtgggcatcgcggctgccattgactaccgcagctacggcaccgagaaggcctgctggctccgagtggacaattacttcatctggagtttcatcgggccagtctccttcgttatcgtggtcaacctggtgttcctcatggtgaccctgcacaagatgatccgaagctcatctgtgctcaagcccgactccagccgcctggacaacattaaatcctgggcgctgggggccatcgcgctgctgttcctgctgggcctcacctgggctttcggcctcctcttcatcaacaaggagtcggtggtcatggcctatctcttcaccaccttcaacgccttccagggggtcttcatcttcgtctttcactgcgccttacagaagaaggtgcacaaggagtacagcaagtgcctgcgtcactcctactgctgcatccgctccccacccgggggcactcacggatccctcaagacctcagccatgcgaagcaacacccgctactacacagggacccagtacacctcgcgcccgccagccctggtggcccggaatcccctgcagggctactaccaggtgcggcgtcctagccacgagggctacctggcagccccaggccttgaggggccagggcccgatggggacgggcagatgcagctggtcaccagtctctgagggcacctcatggaccaggggctggtggcccaggccagggagggaaccctgggcagggctctggtgggagagggagacagatggaggcagtggctggtgggccactctctccaggtgcccctcagccatgggccctacagtcccctcaggggactctaacctgggggcctgaggtgccagggttcacagacagggtttcccaccagccacacgcaccagctctatttgggggaagtgtagtgaggaggagcccagaggaccccaggggagtgaggagggagaacttggaagggtgcagcccacttccagactctcccctctcccacccttctaccctgtgaagggaaatgagggctttagtttcctgggcagggaggggcagcttctgaggttgccaaaggcccccactggatggaacctgttagctgctcctctccgcagccagaaatgctgccggctgcacccagagggagcagtgaggcaggacagatggacaggttcctcctgcgctgtaattccctgctccctggagactgggaaaaggccgcagggcagggggactgggcggtggtggctggtggtttaaaggttgaactttctctgaagctcctttccccttgctcttggtccctgccccgcaagcaaacctgccccctctgcctcccagtgcacccaatgaccccctcccttggggcgactcctgatgaagcacaactccccgcagggcccccagcccacaggggtggccatatttgggcagttcccagtcctgtgggctcggctatctggggagcagattttgggtctggatctccctggggagtgggtcctgggcttggatctttccctagggggccctcttactccttcctctctcctcctccttccccattgctgtaaatatttcaacgaaatggaaaagaaaaaaaaagacaaaaaaaaaaaaaaagaaaagaaaaaaatctcatcacttgaagccaccgggagcctgcggcccgggccagcccgggctttctccggagcagagcagcgctgctggcctggcagccaggacttctccgtgtacgtgcatccccagtccccgccggggcgggcgggccgccagagcagctntttacaatccagagacagaaaacaaaatctagatgcaacagcgaaacaaagaacccatttccttcctggcacccgtttctgtcccctcctttcctgctccgcctgcccggcatcatcagcccttctggggcgtgtacctctcactgcctgccccaggaccagaggcctgtctcccccttccctccccaccggcccgggggagacctcttcacacccaaagatgctttgtcaagatggctgcgctgtccctttgagttcctgcttcttgtatattgctctggggactctcgccggggaagatggggctgatttcccacctagagaggttgatggcagaaggaaaatggggaggcactggggttgtggagggcatgggtatggctgaggagggtgctgggaacggcaaggcggtctgggggatggggaggggcaaaggtgagagatcaccttccctatcctccaccttcccgcagggaagacgaagccaggtgccagggctggggtcgggacacccatgttctgggcggcttgaccccaaatcccagaccccggaagctccaggctcgggatgtgtcctgagcacctgtcccggccccctcctctccagcctgtcaggccagcctccccagcccccttccctcaactctaggggcagcatagccccaggccaccctagcccagcccctgcattgccgtttccccagaggtggcccctccacctctgctctgacctctccccatctctctgcccctccttttctcacaagtgccatgagttttcaaacatcttcgggtctcagcctgctgctgccatgaactttgttgggttaagggggaggggctctaggaaggaactggggggaaggggacaggtaggtggctggagggaccctttttgctgctagaaagcccctcccttctcccggggagctggggctggcttgtccccatcaattaggggagaaggggtcagaccaaagatggtggtttgtcccgtgtaagggaacaggtgtggggaagaggtggggttgggttccaactctggctttttctggtagaaaggcctaacccattacaccagaagaccatgggtgaagtctagatggggaggagaagtgaggccagggacagtcttgccagacgactctgaggagggcaagggacagttccatggcccttcccggactgcactaggctgggagctctgttgtgtggaggggtggtcagaggtctgtgaagagcgggcaggaggcatgagcaggcgaggagctggcctgtcccgggaagcagcccagcctgtggctgcccccgacaccaggaggagggccaggagagttccagggggctgaggcacacagagaggccaacttcctccctgcccagccttccttgtatctctccagactcggacaatcaaagggagagagggtgtatcgggtcctgttccagccggcatcgccgggtggcttccaggcctcagagctgtgtggcagggccccctgctggggctggacatcactgcagtccagtgcaaagccgcccccagagcccaggtgtccccccaacctaaccagacctggtgccttgacgcccccaccccagctgggacggtacagagaagggtcttggtttcctctcctactcccttccttaggctcctgaactcgtttgctcctaaatcttgttaattctttttctctggattttggtttcttttggctttcccttgccttcccctttctctgtctccaacactctttccccatgtctttctggctgtctctatgttcctcttctcttatcctcaactttctgtccattcgggcctcctccccacctcccacgccccagcccctccctccttggtctccttttcgatatgccaaaccaattttgggtcgagtgcatttaacgagaacaaaacaaaaggctcataacaacaagaacgtttcagaaaaaaacaaaaagttttaaaaaaattgttgagtcaaaaagtcaaacaataaagaaattaagatttcttggaaaaaaaaaa

SEQ ID NO: 356275 - DNA, 7655 bp, Homo sapiens
  misc_feature (5620)..(5620): n is a, c, g, or t
gggtttggccctggacggccttgcctttcccgccaaacccggtttaagggaactcctcaaatgctgtgggctccttttccccatgggtatatatcggcggatccctttttttttttttttcctaatttttggtcggcggcggtgctgggccaggggaaggaagggacacggaggccgccctcgtcccgccacctcctacccgcttccccccagccccggctccgggagatgtgccgggcggggggcccgggttcgccgagccgcaggagagacacgctgggccgaccccagagaggcgctggacaggctggtggtccaggccgtggtgcctgccaggtgatgtggggcaaagccccccgcacaggccactgagagctccggacacgcacccggctgccaccatggcccgcctagccgcagtgctctggaatctgtgtgtcaccgccgtcctggtcacctcggccacccaaggcctgagccgggccgggctcccgttcgggctgatgcgccgggagctggcgtgtgaaggctaccccatcgagctgcggtgccccggcagcgacgtcatcatggtggagaatgccaactacgggcgcacggacgacaagatttgcgatgctgaccctttccagatggagaatgtgcagtgctacctgccggacgccttcaagatcatgtcacagaggtgtaacaaccgcacccagtgcgtggtggtcgccggctcggatgcctttcctgacccctgtcctgggacctacaagtacctggaggtgcagtacgactgtgtcccctacaaagtggagcagaaagggattgggggggtggggcggggccccccacctttctgacatcagcgctgccttggtccctcttcccgagccggggatggtcgcagagtcttcgtgtgcccagggaccctgcagaaggtgctggagcccacctcgacacacgagtcagagcaccagtctggcgcatggtgcaaggacccgctgcaggcgggtgaccgcatctacgtgatgccctggatcccctaccgcacggacacactgactgagtatgcctcgtgggaggactacgtggccgcccgccacaccaccacctaccgcctgcccaaccgcgtggatggcacaggctttgtggtctacgatggtgccgtcttctacaacaaggagcgcacgcgcaacatcgtcaagtatgacctacggacgcgcatcaagagcggggagacggtcatcaataccgccaactaccatgacacctcgccctaccgctggggcggaaagaccgacattgacctggcggtggacgagaacgggctgtgggtcatctacgccactgagggcaacaacgggcggctggtggtgagccagctgaacccctacacactgcgctttgagggcacgtgggagacgggttacgacaagcgctcggcatccaacgccttcatggtgtgtggggtcctgtacgtcctgcgttccgtgtacgtggatgatgacagcgaggcggctggcaaccgcgtggactatgccttcaacaccaatgccaaccgcgaggagcctgtcagcctcaccttccccaacccctaccagttcatctcctccgttgactacaaccctcgcgacaaccagctgtacgtctggaacaactatttcgtggtgcgctacagcctggagttcgggccgcccgaccccagtgctggcccagccacttccccacccctcagcacgaccaccacagccaggcccacgcccctcaccagcacagcctcgcccgcagccaccaccccgctccgccgggcacccctcaccacgcacccagtgggtgccatcaaccagctgggacctgatctgcctccagccacagccccagtccccagcacccggcggcccccagccccgaatctacacgtgtcccctgagctcttctgcgagccccgagaggtacggcgggtccagtggccggccacccagcagggcatgctggtggagaggccctgccccaaggggactcgaggaattgcctccttccagtgtctaccagccttggggctctggaacccccggggccctgacctcagcaactgcacctccccctgggtcaaccaggtggcccagaagatcaagagtggggagaacgcggccaacatcgccagcgagctggcccgacacacccggggctccatctacgcgggggacgtctcctcctctgtgaagctgatggagcagctgctggacatcctggatgcccagctgcaggccctgcggcccatcgagcgcgagtcagccggcaagaactacaacaagatgcacaagcgagagagaacttgtaaggattatatcaaggccgtggtggagacagtggacaatctgctccggccagaagctctggagtcctggaaggacatgaatgccacggagcaggtgcacacggccaccatgctcctcgacgtcctggaggagggcgccttcctgctggccgacaatgtcagggagcctgcccgcttcctggctgccaaggagaacgtggtcctggaggtcacagtcctgaacacagagggccaggtgcaggagctggtgttcccccaggaggagtacccgagaaagaactccatccagctgtctgccaaaaccatcaagcagaacagccgcaatggggtggtcaaagttgtcttcatcctctacaacaacctgggcctcttcctgtccacggagaatgccacagtgaagctggccggcgaagcaggcccgggtggccctgggggcgcctctctagtggtgaactcacaggtcatcgcagcatccatcaacaaggagtccagccgcgtcttcctcatggaccctgtcatcttcaccgtggcccacctggaggacaagaaccacttcaatgctaactgctccttctggaactactcggagcgttccatgctgggctactggtcgacccaaggctgccgcctggtggagtccaacaagacccataccacgtgtgcctgcagccacctcaccaacttcgctgtgctcatggctcaccgtgagatctaccagggccgcatcaacgagctgctgctgtcggtcatcacctgggtgggcattgtgatctccctggtctgcttggccatctgcatctccaccttctgcttcctgcgggggctgcagaccgaccgcaacaccatccacaagaacctgtgcatcaacctcttcctggctgagctgctcttcctggtcgggatcgacaagactcagtatgagattgcctgccccatcttcgccggcctgctgcactatttcttcctggctgccttctcctggctgtgcctggagggcgtgcacctctacctgctactagtggaggtgtttgagagcgagtattcccgcaccaagtactactacctgggtggctactgcttcccggccctggtggtgggcatcgcggctgccattgactaccgcagctacggcaccgagaaggcctgctggctccgagtggacaattacttcatctggagtttcatcgggccagtctccttcgttatcgtggtcaacctggtgttcctcatggtgaccctgcacaagatgatccgaagctcatctgtgctcaagcccgactccagccgcctggacaacattaaatcctgggcgctgggggccatcgcgctgctgttcctgctgggcctcacctgggctttcggcctcctcttcatcaacaaggagtcggtggtcatggcctatctcttcaccaccttcaacgccttccagggggtcttcatcttcgtctttcactgcgccttacagaagaaggtgcacaaggagtacagcaagtgcctgcgtcactcctactgctgcatccgctccccacccgggggcactcacggatccctcaagacctcagccatgcgaagcaacacccgctactacacagggacccagagccgaattcggaggatgtggaatgacactgtgaggaaacagacggagtcctccttcatggcgggtgacatcaacagcacccccaccctgaaccgaggtaccatggggaaccacctgctgaccaaccccgtgctgcagccccgtgggggcaccagtccctacaacaccctcatcgccgagtcagtgggcttcaatccctcctcgccccctgtcttcaactccccagggagctaccgggaacccaagcaccccttgggaggccgggaagcctgtggcatggacaccctgcccctgaacggcaacttcaataacagttactccttgcgaagtggggatttccctcccggggatgggggccctgagccgccccgaggccggaacctagccgatgcggcggcctttgagaagatgatcatctcagagctggtgcacaacaacctgcgggggagcagcagcgcggccaagggccctccaccgcctgagccccctgtgccacctgtgccagggggcgggggcgaggaagaggcgggcgggcccgggggtgctgaccgggccgagattgaacttctctataaggccctggaggagcctctgctgctgccccgggcccagtcggtgctgtaccagagcgatctggacgagtcggagagctgcacggccgaggacggcgccaccagccggcccctctcctcccctcctggccgggactccctctatgccagcggggccaacctgcgggactcaccctcctacccggacagcagccctgaggggcccagtgaggccctgcccccaccccctcccgcaccccccggcccccccgaaatctactacacctcgcgcccgccagccctggtggcccggaatcccctgcagggctactaccaggtgcggcgtcctagccacgagggctacctggcagccccaggccttgaggggccagggcccgatggggacgggcagatgcagctggtcaccagtctctgagggcacctcatggaccaggggctggtggcccaggccagggagggaaccctgggcagggctctggtgggagagggagacagatggaggcagtggctggtgggccactctctccaggtgcccctcagccatgggccctacagtcccctcaggggactctaacctgggggcctgaggtgccagggttcacagacagggtttcccaccagccacacgcaccagctctatttgggggaagtgtagtgaggaggagcccagaggaccccaggggagtgaggagggagaacttggaagggtgcagcccacttccagactctgcagggcccccagcccacaggggtggccatatttgggcagttcccagtcctgtgggctcggctatctggggagcagattttgggtctggatctccctggggagtgggtcctgggcttggatctttccctagggggccctcttactccttcctctctcctcctccttccccattgctgtaaatatttcaacgaaatggaaaagaaaaaaaaagacaaaaaaaaaaaaaaagaaaagaaaaaaatctcatcacttgaagccaccgggagcctgcggcccgggccagcccgggctttctccggagcagagcagcgctgctggcctggcagccaggacttctccgtgtacgtgcatccccagtccccgccggggcgggcgggccgccagagcagctntttacaatccagagacagaaaacaaaatctagatgcaacagcgaaacaaagaacccatttccttcctggcacccgtttctgtcccctcctttcctgctccgcctgcccggcatcatcagcccttctggggcgtgtacctctcactgcctgccccaggaccagaggcctgtctcccccttccctccccaccggcccgggggagacctcttcacacccaaagatgctttgtcaagatggctgcgctgtccctttgagttcctgcttcttgtatattgctctggggactctcgccggggaagatggggctgatttcccacctagagaggttgatggcagaaggaaaatggggaggcactggggttgtggagggcatgggtatggctgaggagggtgctgggaacggcaaggcggtctgggggatggggaggggcaaaggtgagagatcaccttccctatcctccaccttcccgcagggaagacgaagccaggtgccagggctggggtcgggacacccatgttctgggcggcttgaccccaaatcccagaccccggaagctccaggctcgggatgtgtcctgagcacctgtcccggccccctcctctccagcctgtcaggccagcctccccagcccccttccctcaactctaggggcagcatagccccaggccaccctagcccagcccctgcattgccgtttccccagaggtggcccctccacctctgctctgacctctccccatctctctgcccctccttttctcacaagtgccatgagttttcaaacatcttcgggtctcagcctgctgctgccatgaactttgttgggttaagggggaggggctctaggaaggaactggggggaaggggacaggtaggtggctggagggaccctttttgctgctagaaagcccctcccttctcccggggagctggggctggcttgtccccatcaattaggggagaaggggtcagaccaaagatggtggtttgtcccgtgtaagggaacaggtgtggggaagaggtggggttgggttccaactctggctttttctggtagaaaggcctaacccattacaccagaagaccatgggtgaagtctagatggggaggagaagtgaggccagggacagtcttgccagacgactctgaggagggcaagggacagttccatggcccttcccggactgcactaggctgggagctctgttgtgtggaggggtggtcagaggtctgtgaagagcgggcaggaggcatgagcaggcgaggagctggcctgtcccgggaagcagcccagcctgtggctgcccccgacaccaggaggagggccaggagagttccagggggctgaggcacacagagaggccaacttcctccctgcccagccttccttgtatctctccagactcggacaatcaaagggagagagggtgtatcgggtcctgttccagccggcatcgccgggtggcttccaggcctcagagctgtgtggcagggccccctgctggggctggacatcactgcagtccagtgcaaagccgcccccagagcccaggtgtccccccaacctaaccagacctggtgccttgacgcccccaccccagctgggacggtacagagaagggtcttggtttcctctcctactcccttccttaggctcctgaactcgtttgctcctaaatcttgttaattctttttctctggattttggtttcttttggctttcccttgccttcccctttctctgtctccaacactctttccccatgtctttctggctgtctctatgttcctcttctcttatcctcaactttctgtccattcgggcctcctccccacctcccacgccccagcccctccctccttggtctccttttcgatatgccaaaccaattttgggtcgagtgcatttaacgagaacaaaacaaaaggctcataacaacaagaacgtttcagaaaaaaacaaaaagttttaaaaaaattgttgagtcaaaaagtcaaacaataaagaaattaagatttcttggaaaaaaaaaa

SEQ ID NO: 356276 - DNA, 1850 bp, Homo sapiens
gggtttggccctggacggccttgcctttcccgccaaacccggtttaagggaactcctcaaatgctgtgggctccttttccccatgggtatatatcggcggatccctttttttttttttttcctaatttttggtcggcggcggtgctgggccaggggaaggaagggacacggaggccgccctcgtcccgccacctcctacccgcttccccccagccccggctccgggagatgtgccgggcggggggcccgggttcgccgagccgcaggagagacacgctgggccgaccccagagaggcgctggacaggctggtggtccaggccgtggtgcctgccaggtgatgtggggcaaagccccccgcacaggccactgagagctccggacacgcacccggctgccaccatggcccgcctagccgcagtgctctggaatctgtgtgtcaccgccgtcctggtcacctcggccacccaaggcctgagccgggccgggctcccgttcgggctgatgcgccgggagctggcgtgtgaaggctaccccatcgagctgcggtgccccggcagcgacgtcatcatggtggagaatgccaactacgggcgcacggacgacaagatttgcgatgctgaccctttccagatggagaatgtgcagtgctacctgccggacgccttcaagatcatgtcacagaggtgtaacaaccgcacccagtgcgtggtggtcgccggctcggatgcctttcctgacccctgtcctgggacctacaagtacctggaggtgcagtacgactgtgtcccctacaaagtggagcagaaagggattgggggggtggggcggggccccccacctttctgacatcagcgctgccttggtccctcttcccgagccggggatggtcgcagagtcttcgtgtgcccagggaccctgcagaaggtgctggagcccacctcgacacacgagtcagagcaccagtctggcgcatggtgcaaggacccgctgcaggcgggtgaccgcatctacgtgatgccctggatcccctaccgcacggacacactgactgagtatgcctcgtgggaggactacgtggccgcccgccacaccaccacctaccgcctgcccaaccgcgtggatggcacaggctttgtggtctacgatggtgccgtcttctacaacaaggagcgcacgcgcaacatcgtcaagtatgacctacggacgcgcatcaagagcggggagacggtcatcaataccgccaactaccatgacacctcgccctaccgctggggcggaaagaccgacattgacctggcggtggacgagaacgggctgtgggtcatctacgccactgagggcaacaacgggcggctggtggtgagccagctgaacccctacacactgcgctttgagggcacgtgggagacgggttacgacaagcgctcggcatccaacgccttcatggtgtgtggggtcctgtacgtcctgcgttccgtgtacgtggatgatgacagcgaggcggctggcaaccgcgtggactatgccttcaacaccaatgccaaccgcgaggagcctgtcagcctcaccttccccaacccctaccagttcatctcctccgttgactacaaccctcgcgacaaccagctgtacgtctggaacaactatttcgtggtgcgctacagcctggagttcgggccgcccgaccccagtgctggtgaggacgactcacttccaggcatggagcctgcttgcctttgtcccctccacccccacccacccctgggtcccagagtggggagccccatcctgtgagctcttggggatcgggaggtaaaggaaattcacagcatgtgacagacgctgttc

SEQ ID NO: 356277 - DNA, 3535 bp, Homo sapiens
tgcgctgaacgcatgcgtgctgtggtcgcctagtaaacggggctgctggtgggccgcgtcgaagacatggaccagggctacggaggctacggggcgtggagtgctggacctgccaacacccagggtgcatatggaactggtgtggccagctggcaaggttatgaaaactacaattactatggcgcccagaacaccagtgtcaccacaggcgcaacctacagctacggcccagcctcgtgggaggccgccaaggccaatgatggcggcctggcggccggggcccctgccatgcacatggcctcttacggcccagagccatgcaccgacaattccgactccctcattgccaagatcaaccagcgtttggacatgatgtccaaggaaggaggcaggggcgggagcggcggcggtggggagggcatacaggaccgggagagctccttccgcttccagccgttcgagtcctatgactccaggccctgcctgccggagcacaacccctaccgccccagctacagctacgactatgagttcgacctggggtccgaccgcaatggcagctttggggggcagtacagtgaatgccgagacccagcccgggagcggggctcccttgatggcttcatgcggggccggggccagggccgcttccaggaccggagcaaccctggcaccttcatgcgcagcgaccccttcgtgccccccgctgcgtcctctgagcccctgtccacgccctggaacgagctgaactacgtgggtggacggggcctgggagggccctcccccagccggccacctccgtccctcttctcccagtccatggctcccgactacggcgtgatgggcatgcagggggcgggcggctatgacagcaccatgccctacggatgtggccgctcgcagcctcggatgcgggatcgggatcggcccaagaggagagggtttgaccgcttcggaccagatggcacgggcaggaaacggaagcagttccaactttacgaggagccagacaccaaactggcccgggttgacagtgaaggagatttctccgaaaatgatgacgcagctggtgacttccgctcaggagatgaagaattcaagggtgaggatgaactctgcgactctgggaggcaaagaggagagaaggaggacgaggacgaggatgtgaagaagagaagggaaaagcaaaggagaagagacaggacgcgggaccgtgcagccgacagaattcagtttgcctgttctgtatgcaagttccgtagctttgatgacgaagagatccagaagcatctgcaaagcaaatttcacaaagagaccctgcggttcataagcaccaagctgcccgacaagaccgtggagttcctccaggaatacattgtaaacagaaataagaaaattgagaagcggcgtcaggaattgatggagaaagaaaccgcaaaaccaaaaccagatcctttcaaagggattggccaggagcacttcttcaagaagatcgaggctgctcactgcctggcctgcgacatgctaattcctgcacagccgcagctcctccagcggcacctgcactccgtggaccacaatcacaaccgcaggttggctgctgaacagttcaagaaaaccagtctccatgtggctaagagtgttttgaacaacagacatatagtgaagatgctggaaaaatacctcaagggtgaggaccctttcaccagtgaaactgttgatccagaaatggaaggagatgacaatttaggaggtgaggataagaaagagacacctgaggaggtggccgcggacgtcttagcagaggtgattacagcagcagtgagggccgtagatggggaaggagcgcccgctccagagagcagcggggagccggctgaggacgaaggccccacggacacagcggaggccggtagtgatcctcaagccgaacagctgctggaagagcaggtgccctgtggaacggcacatgagaagggcgtccccaaggccagaagtgaggctgcagaggctggaaatggcgccgagacaatggcagcagaggcagaaagtgcccaaaccagagttgctcctgccccagctgccgcggatgctgaagtggaacaaactgatgcagagtctaaagacgctgttcccacagaatgatgctcatttccctgttccagggaaggcgttgggatgatggatgcgttggtctttctcccttggtttgtaagcagtacaagggcgtgtgctcccagaatatgctgtaatctaattttggtgaagagacccagcgtttcctcctgagcagtgcctctcacggcttgtctcatgcagtcgtgtggcttcttgcccaggtttcaaagctgaagtacattgtccttagcggctgtaacatgtctcttgacagtagtgcacttggaataataaaggttgggtgattatatcttgatgatacattacttgttcaatacagccactgatggaatgcttccttttttatttttttccttaatttttttttttatttggttgggaacagctgaatactaggaatatatcttgctctatagaggatttttttttgtatgtttcaagcttcagcctttaacctatacctttgtagtgcaccatatggtgtgtgactttcacaggacttcgcagcacctggttcacatgtggcactgaccgcgtcacatccacgcactcccaaaggccagaagtatctgaccgacctacgccactggaaacacacccaccgcaacctcaagaaccagactgtgcagagggcattgcgtcccaatctttagtccttgctgaatcagttctctaatattttacctcatttgtgttccacctctagattacttcaggtttttttcctttaaaattagttactaccactcaaatgtatttacaaagagaatttggccaggcacggtgatgcatacctataatcccagcacttggggaggccgtggtgagaggatagcttaagcccaggagttcaagaccaacctggacaacatagcaagaccccatctcttaaaaaaaaaggaaagaaaacttgatgtgattgccataggtggaataatccaacataaattgccatagatagaaggtatctgtaatatatatatatatataaaatgaaatatatgtttcattttagagaaataactattactttagatctttccaaatctgagaaagggaggctagcatgtgttcaaggttagcacgcaacagaatttcctaaaatcagaagaattggaagatcctccccttttgaaatggccctgctgtgtcagtttccctgtggccttttgaactgtacatctcacatgttgggaaacgctggccactgggaaatcattagaaaggaggctgtagaatatttgccgagcctctactgtataccaggggctaactcaccaagcacattctaggaattgggccctgctcatgaggagccttagtggagattccaggtgaatatttatgaaaaagtcaacattagaactgaaaatggaaataaactgcttgaaaagac

SEQ ID NO: 356278 - DNA, 2428 bp, Homo sapiens
tgcgctgaacgcatgcgtgctgtggtcgcctagtaaacggggctgctggtgggccgcgtcgaagacatggaccagggctacggaggctacggggcgtggagtgctggacctgccaacacccagggtgcatatggaactggtgtggccagctggcaaggttatgaaaactacaattactatggcgcccagaacaccagtgtcaccacaggcgcaacctacagctacggcccagcctcgtgggaggccgccaaggccaatgatggcggcctggcggccggggcccctgccatgcacatggcctcttacggcccagagccatgcaccgacaattccgactccctcattgccaagatcaaccagcgtttggacatgatgtccaaggaaggaggcaggggcgggagcggcggcggtggggagggcatacaggaccgggagagctccttccgcttccagccgttcgagtcctatgactccaggccctgcctgccggagcacaacccctaccgccccagctacagctacgactatgagttcgacctggggtccgaccgcaatggcagctttggggggcagtacagtgaatgccgagacccagcccgggagcggggctcccttgatggcttcatgcggggccggggccagggccgcttccaggaccggagcaaccctggcaccttcatgcgcagcgaccccttcgtgccccccgctgcgtcctctgagcccctgtccacgccctggaacgagctgaactacgtgggtggacggggcctgggagggccctcccccagccggccacctccgtccctcttctcccagtccatggctcccgactacggcgtgatgggcatgcagggggcgggcggctatgacagcaccatgccctacggatgtggccgctcgcagcctcggatgcgggatcgggatcggcccaagaggagagggtttgaccgcttcggaccagatggcacgggcaggaaacggaagcagttccaactttacgaggagccagacaccaaactggcccgggttgacagtgaaggagatttctccgaaaatgatgacgcagctggtgacttccgctcaggagatgaagaattcaagggtgaggatgaactctgcgactctgggaggcaaagaggagagaaggaggacgaggacgaggatgtgaagaagagaagggaaaagcaaaggagaagagacaggacgcgggaccgtgcagccgacagaattcagtttgcctgttctgtatgcaagttccgtagctttgatgacgaagagatccagaagcatctgcaaagcaaatttcacaaagagaccctgcggttcataagcaccaagctgcccgacaagaccgtggagttcctccaggaatacattgtaaacagaaataagaaaattgagaagcggcgtcaggaattgatggagaaagaaaccgcaaaaccaaaaccagatcctttcaaagggattggccaggagcacttcttcaagaagatcgaggctgctcactgcctggcctgcgacatgctaattcctgcacagccgcagctcctccagcggcacctgcactccgtggaccacaatcacaaccgcaggttggctgctgaacagttcaagaaaaccagtctccatgtggctaagagtgttttgaacaacagacatatagtgaagatgctggaaaaatacctcaagggtgaggaccctttcaccagtgaaactgttgatccagaaatggaaggagatgacaatttaggaggtgaggataagaaagagacacctgaggaggtggccgcggacgtcttagcagaggtgattacagcagcagtgagggccgtagatggggaaggagcgcccgctccagagagcagcggggagccggctgaggacgaaggccccacggacacagcggaggccggtagtgatcctcaagccgaacagctgctggaagagcaggtgccctgtggaacggcacatgagaagggcgtccccaaggccagaagtgaggctgcagaggctggaaatggcgccgagacaatggcagcagaggcagaaagtgcccaaaccagagttgctcctgccccagctgccgcggatgctgaagtggaacaaactgatgcagagtctaaagacgctgttcccacagaatgatgctcatttccctgttccagggaaggcgttgggatgatggatgcgttggtctttctcccttggtttgtaagcagtacaagggcgtgtgctcccagaatatgctgtaatctaattttggtgaagagacccagcgtttcctcctgagcagtgcctctcacggcttgtctcatgcagtcgtgtggcttcttgcccaggtttcaaagctgaagtacattgtccttagcggctgtaacatgtctcttgacagtagtgcacttggaataataaaggttgggtgattata

SEQ ID NO: 356279 - DNA, 345 bp, Homo sapiens
cgcagcctcggatgcgggatcgggatcgggtaagccctcgcaaggttccttccggccgccttcgcttctctttttagcagctttattgaggtaaaatttccccatctcaacattcacttaaatgtttttaagtgcgcagttcgacttttagttaatttacaggattgtgcaaccatccccaccatcacagtctaatcttagcatttatgtcaaccagaagagaaacttcttctcattagtcacccctgtctcttccccgcccccaccagcccccgacaaccaccactggtctctggatttgtgtgttctagacattttgcacaaatggagtcgcgaaacgtgtgg

SEQ ID NO: 356280 - DNA, 781 bp, Homo sapiens
tgggggcgcgcggaagtagtgacgtgtgcgcctggtcttccagtagtcgatggcggaggtgcgctgaacgcatgcgtgctgtggtcgcctagtaaacggggctgctggtgggccgcgtcgaagacatggaccagggctacggaggtttgtgttggctgctgggtgcggagcggggagggaaggctctgtgcgggcgacgcagccgctgcgcagactgccgccggccgggccttcgtcccgagcgtggttgccccagctgggccctccggagaggcggccagggcgcgcgcgcgccgctcattgggctttggcgccgtcgctcccggggctctgcgtgcggattggccgccaggccccgaggaggcgggcgggactcggggttggggcagacgccgcggtgggcttcgtgggggcgtcttagacagtgtgggccgtttttgcccctcaccttcggcggagtccttccggcccccagcgaccccggggtttgcactcccggcttcctcttccgaagacgccacaaaatggcggcgctaggggggcggagctacagcgtggggttgtgaggtcggacccggggagctgggtctggggccgcgggcggaccgcgggggccgcctctctcccgacctgccctaggcccgcggggccgtgtagggtctccgctgggctcacgtggcccagggcgcctgtcccggaagccgtcgggctgcgcggggtcgggcctttagtccccggtgcagcgcggtggggccgagtgctgccggcgcgagagtcagcc

SEQ ID NO: 356281 - DNA, 1421 bp, Homo sapiens
tgcgctgaacgcatgcgtgctgtggtcgcctagtaaacggggctgctggtgggccgcgtcgaagacatggaccagggctacggaggctacggggcgtggagtgctggacctgccaacacccagggtgcatatggaactggtgtggccagctggcaaggttatgaaaactacaattactatggcgcccagaacaccagtgtcaccacaggcgcaacctacagctacggcccagcctcgtgggaggccgccaaggccaatgatggcggcctggcggccggggcccctgccatgcacatggcctcttacggcccagagccatgcaccgacaattccgactccctcattgccaagatcaaccagcgtttggacatgatgtccaaggaaggaggcaggggcgggagcggcggcggtggggagggcatacaggaccgggagagctccttccgcttccagccgttcgagtcctatgactccaggccctgcctgccggagcacaacccctaccgccccagctacagctacgactatgagttcgacctggggtccgaccgcaatggcagctttggggggcagtacagtgaatgccgagacccagcccgggagcggggctcccttgatggcttcatgcggggccggggccagggccgcttccaggaccggagcaaccctggcaccttcatgcgcagcgaccccttcgtgccccccgctgcgtcctctgagcccctgtccacgccctggaacgagctgaactacgtgggtggacggggcctgggagggccctcccccagccggccacctccgtccctcttctcccagtccatggctcccgactacggcgtgatgggcatgcagggggcgggcggctatgacagcaccatgccctacggatgtggccgctcgcagcctcggatgcgggatcgggatcggcccaagaggagagggtttgaccgcttcggaccagatggcacgggcaggaaacggaagcagttccaactttacgaggagccagacaccaaactggcccgggttgacagtgaaggagatttctccgaaaatgatgacgcagctggtgacttccgctcaggagatgaagaattcaagggtgaggatgaactctgcgactctgggaggcaaagaggagagaaggaggacgaggacgaggatgtgaagaagagaagggaaaagcaaaggagaagagacaggacgcgggaccgtgcagccgacagaattcagtttgcctgttctgtatgcaagttccgtagctttgatgacgaagagatccagaagcatctgcaaagcaaatttcacaaagagaccctgcggttcataagcaccaagctgcccgacaagaccgtggagttcctccaggatacattgtaaacagaaataagaaattgagacggctccacgctgccagtggc

SEQ ID NO: 356282 - DNA, 2717 bp, Homo sapiens
  misc_feature (189)..(189): n is a, c, g, or t
tggaagagatcacagggagtccagaaacgcctgtcatcccaagcttatgctgtttttctaaaagctctttatgggggcttgatattgggttggtggtctttgtccagaaatatgaagggacaaaggcgggccataaccctcccttctagagtccaggagcttcccctgccactgccacaacccccgatnccaccacagccatcgccactgccacctgcctcccgctgaatcttggctcttgtcttctctttccagcccaggtgaagcctctgggcttcctgaagcccttctccttgatgaaggcttccagccgcttcaaggcacaccaggatgcactgccacggctgcccgtgccccctctccagcagtccctggaccactacctgaaggcgctgcagcccatcgtgagtgaggaggagtgggcccacaccaagcagctggtggatgagtttcaggcctcaggaggtgtaggggagcgcctgcagaaggggctggagcgtcgggccaggaagacggagaactggctgtctgagtggtggctcaagaccgcctacctccagtaccgccagcctgtggtcatctactcgagcccaggcgtgatgctacccaagcaggacttcgtggacctgcagggtcagctccgatttgctgccaaactcattgagggtgtgttggatttcaaggtcatgattgacaacgagaccctgcccgtggagtacctgggggggaagccactgtgcatgaaccagtactatcagatcttgtcctcctgccgagtgccgggccccaagcaggacacagtcagcaacttcagcaagaccaagaagcctcccacgcacatcaccgtggtacacaactaccagttttttgagctggatgtgtaccacagtgacgggacacccctcactgcggatcagatctttgtgcagctggagaagatctggaactcatccctacagaccaacaaggagcctgtgggcatcctcacctccaaccaccgcaactcctgggccaaggcatacaacaccctcatcaaagacaaggtgaaccgggattccgtgcgctccatccagaagagcatcttcaccgtgtgcctagatgcaaccatgcccagggtctcagaagacgtgtaccgcagccacgtggcaggccagatgctgcatgggggcggcagcaggctcaacagcggcaaccgctggttcgacaagacgctgcagttcatcgtggcagaagatggctcctgtgggcttgtgtacgagcatgctgcagcggaggggccccctattgtcacccttctggactatgtcatcgagtacacgaagaaacccgagcttgtgcggtctcccatggtgcccctgcccatgcccaagaagctgcggttcaacatcacccccgagatcaagagcgacatcgagaaggccaagcagaacctcagcatcatgatccaggacctggatatcaccgtgatggtgttccaccattttggaaaagacttccccaagtcggagaagctaagcccagatgccttcatccagatggctttgcagctggcctactacaggatctacggacaggcatgtgccacctatgaaagtgcctccctgcgcatgtttcacctgggccgcaccgacaccatccgctcggcttccatggactcactcacctttgtcaaggccatggatgactccagcgtcacggagcaccagaaggtggagctgctgcggaaggccgtgcaggcccaccgaggctacaccgaccgggccatccgcggggaggcctttgatcgacacctgctgggcctgaagctgcaggccatcgaggacctggtgagcatgcccgacatcttcatggacacctcctacgccatcgccatgcacttccacctctccaccagccaggtccctgccaagacagactgtgtcatgttcttcgggcccgtggtccccgacggctacggtgtctgctataaccccatggaggcccacatcaacttctccctgtcggcctacaacagctgcgcggagaccaacgccgcccgcctggcgcattacctggagaaggcgctcctggacatgcgtgccctgctgcagagccacccccgggccaagctctgagcccctaggactcaggcctgccaatgccacagccaagcccaccctgggatgggccacccaccagggctcagctccttggttccctcttccttggttccctcttccctggtccccccaaatctactgagccacggaccgcatcctccagggggcctgcaggccccagccaagtgccttccgtgggtcatcccagcacctgccagggcccgacctggggctgagtgcagaggctgagcaggacgttaggcccgggcccctggcacgtcctccaccggtgcctcctctggggaagggaaccagccctccagagcaggagactggcaagagctctttgtctcaccagctcagccccggccactccctgccaactccatgaccaggccaccatctgtaccctgcttcccaaactcccaggacctggagacaggattgtctggggccgaggggccagggtgtgaggtttcacctccgttgcggctgtgctcctgtggataacattgctagcgagccgcctctggttccactcagcttggttcctgcccccgccctgctgtatgatattaatgtggaaggtcatcaataaaggggaattgtgttggtgaa

SEQ ID NO: 356283 - DNA, 3342 bp, Homo sapiens
cgccccacagccaacctcccgggcaccgttgcccgcccggggcccgctaccggcccaggccccgcctcgcgagtcctcctccccgggtgcctgcccgcagcccgctcggcccagagggtgggcgcggggctgcctctaccggctggcggctgtaactcagcgaccttggcccgaaggctctagcaaggacccaccgaccccagccgcggcggcggcggcgcggactttgcccggtgtgtggggcggagcggactgcgtgtccgcggacgggcagcgaagatgttagccttcgctgccaggaccgtggtgaagcctctgggcttcctgaagcccttctccttgatgaaggcttccagccgcttcaaggcacaccaggatgcactgccacggctgcccgtgccccctctccagcagtccctggaccactacctgaaggcgctgcagcccatcgtgagtgaggaggagtgggcccacaccaagcagctggtggatgagtttcaggcctcaggaggtgtaggggagcgcctgcagaaggggctggagcgtcgggccaggaagacggagaactggctgtctgagtggtggctcaagaccgcctacctccagtaccgccagcctgtggtcatctactcgagcccaggcgtgatgctacccaagcaggacttcgtggacctgcagggtcagctccgatttgctgccaaactcattgagggtgtgttggatttcaaggtcatgattgacaacgagaccctgcccgtggagtacctgggggggaagccactgtgcatgaaccagtactatcagatcttgtcctcctgccgagtgccgggccccaagcaggacacagtcagcaacttcagcaagaccaagaagcctcccacgcacatcaccgtggtacacaactaccagttttttgagctggatgtgtaccacagtgacgggacacccctcactgcggatcagatctttgtgcagctggagaagatctggaactcatccctacagaccaacaaggagcctgtgggcatcctcacctccaaccaccgcaactcctgggccaaggcatacaacaccctcatcaaagacaaggtgaaccgggattccgtgcgctccatccagaagagcatcttcaccgtgtgcctagatgcaaccatgcccagggtctcagaagacgtgtaccgcagccacgtggcaggccagatgctgcatgggggcggcagcaggctcaacagcggcaaccgctggttcgacaagacgctgcagttcatcgtggcagaagatggctcctgtgggcttgtgtacgagcatgctgcagcggaggggccccctattgtcacccttctggactatgtcatcgagtacacgaagaaacccgagcttgtgcggtctcccatggtgcccctgcccatgcccaagaagctgcggttcaacatcacccccgagatcaagagcgacatcgagaaggccaagcagaacctcagcatcatgatccaggacctggatatcaccgtgatggtgttccaccattttggaaaagacttccccaagtcggagaagctaagcccagatgccttcatccagatggctttgcagctggcctactacaggatctacggacaggcatgtgccacctatgaaagtgcctccctgcgcatgtttcacctgggccgcaccgacaccatccgctcggcttccatggactcactcacctttgtcaaggccatggatgactccagcgtcacggagcaccagaaggtggagctgctgcggaaggccgtgcaggcccaccgaggctacaccgaccgggccatccgcggggaggcctttgatcgacacctgctgggcctgaagctgcaggccatcgaggacctggtgagcatgcccgacatcttcatggacacctcctacgccatcgccatgcacttccacctctccaccagccaggtccctgccaagacagactgtgtcatgttcttcgggcccgtggtccccgacggctacggtgtctgctataaccccatggaggcccacatcaacttctccctgtcggcctacaacagctgcgcggagaccaacgccgcccgcctggcgcattacctggagaaggcgctcctggacatgcgtgccctgctgcagagccacccccgggccaagctctgagcccctaggactcaggcctgccaatgccacagccaagcccaccctgggatgggccacccaccagggctcagctccttggttccctcttccttggttccctcttccctggtccccccaaatctactgagccacggaccgcatcctccagggggcctgcaggccccagccaagtgccttccgtgggtcatcccagcacctgccagggcccgacctggggctgagtgcagaggctgagcaggacgttaggcccgggcccctggcacgtcctccaccggtgcctcctctggggaagggaaccagccctccagagcaggagactggcaagagctctttgtctcaccagctcagccccggccactccctgccaactccatgaccaggccaccatctgtaccctgcttcccaaactcccaggacctggagacaggattgtctggggccgaggggccagggtgtgaggtttcacctccgttgcggctgtgctcctgtggataacattgctagcgagccgcctctggttccactcagcttggttcctgcccccgccctgctgtatgatattaatgtggaaggtcatcaataaaggggaattgtgttggtgaaaaaaaaaaaaaaaaaaaaaaaaacaaaaaaaaaaaaaacaaaacaaaaaaagggggggcgcgcgcccaaagaagaacaccccccgggggggcccgagaacagacggccacccccacgtgcggagaagcaaacggggggccccacagaagaggaggagcacacactaattataagagccgagagcgagcggcggcgaggaggaaagaaaaaagcacggaaagagggcgaaacaaacggagcacacagcagggaacaaactgggagaagagagagaaaccaaaacagccagaggcgggcagaggcgacaacatagaggagcgcagacacacacaacaaaaacggaacaactacagcacgctaccaagaagcgagccaaacaatccccacccaatataagcagcgcgggtgacaacagggacggggagagaccacgcacgcgagagacaccaagactacgcagggtagcaagtcgggaacgacgcgaggggcgcaacgaccgtgaaaaaatgaaaagacaaaacgacaacacaattataacaacaagagaaagacgcagacaggcaaaacaccacggacggt

SEQ ID NO: 356284 - DNA, 3441 bp, Homo sapiens
cgccccacagccaacctcccgggcaccgttgcccgcccggggcccgctaccggcccaggccccgcctcgcgagtcctcctccccgggtgcctgcccgcagcccgctcggcccagagggtgggcgcggggctgcctctaccggctggcggctgtaactcagcgaccttggcccgaaggctctagcaaggacccaccgaccccagccgcggcggcggcggcgcggactttgcccggtgtgtggggcggagcggactgcgtgtccgcggacgggcagcgaagatgttagccttcgctgccaggaccgtggaccgatcccagggctgtggtgtaacctcagcggccaggcagtctctgtcctccagccaagttttccctcatcaaaacgatcttcgcagattctgacaggtgaagcctctgggcttcctgaagcccttctccttgatgaaggcttccagccgcttcaaggcacaccaggatgcactgccacggctgcccgtgccccctctccagcagtccctggaccactacctgaaggcgctgcagcccatcgtgagtgaggaggagtgggcccacaccaagcagctggtggatgagtttcaggcctcaggaggtgtaggggagcgcctgcagaaggggctggagcgtcgggccaggaagacggagaactggctgtctgagtggtggctcaagaccgcctacctccagtaccgccagcctgtggtcatctactcgagcccaggcgtgatgctacccaagcaggacttcgtggacctgcagggtcagctccgatttgctgccaaactcattgagggtgtgttggatttcaaggtcatgattgacaacgagaccctgcccgtggagtacctgggggggaagccactgtgcatgaaccagtactatcagatcttgtcctcctgccgagtgccgggccccaagcaggacacagtcagcaacttcagcaagaccaagaagcctcccacgcacatcaccgtggtacacaactaccagttttttgagctggatgtgtaccacagtgacgggacacccctcactgcggatcagatctttgtgcagctggagaagatctggaactcatccctacagaccaacaaggagcctgtgggcatcctcacctccaaccaccgcaactcctgggccaaggcatacaacaccctcatcaaagacaaggtgaaccgggattccgtgcgctccatccagaagagcatcttcaccgtgtgcctagatgcaaccatgcccagggtctcagaagacgtgtaccgcagccacgtggcaggccagatgctgcatgggggcggcagcaggctcaacagcggcaaccgctggttcgacaagacgctgcagttcatcgtggcagaagatggctcctgtgggcttgtgtacgagcatgctgcagcggaggggccccctattgtcacccttctggactatgtcatcgagtacacgaagaaacccgagcttgtgcggtctcccatggtgcccctgcccatgcccaagaagctgcggttcaacatcacccccgagatcaagagcgacatcgagaaggccaagcagaacctcagcatcatgatccaggacctggatatcaccgtgatggtgttccaccattttggaaaagacttccccaagtcggagaagctaagcccagatgccttcatccagatggctttgcagctggcctactacaggatctacggacaggcatgtgccacctatgaaagtgcctccctgcgcatgtttcacctgggccgcaccgacaccatccgctcggcttccatggactcactcacctttgtcaaggccatggatgactccagcgtcacggagcaccagaaggtggagctgctgcggaaggccgtgcaggcccaccgaggctacaccgaccgggccatccgcggggaggcctttgatcgacacctgctgggcctgaagctgcaggccatcgaggacctggtgagcatgcccgacatcttcatggacacctcctacgccatcgccatgcacttccacctctccaccagccaggtccctgccaagacagactgtgtcatgttcttcgggcccgtggtccccgacggctacggtgtctgctataaccccatggaggcccacatcaacttctccctgtcggcctacaacagctgcgcggagaccaacgccgcccgcctggcgcattacctggagaaggcgctcctggacatgcgtgccctgctgcagagccacccccgggccaagctctgagcccctaggactcaggcctgccaatgccacagccaagcccaccctgggatgggccacccaccagggctcagctccttggttccctcttccttggttccctcttccctggtccccccaaatctactgagccacggaccgcatcctccagggggcctgcaggccccagccaagtgccttccgtgggtcatcccagcacctgccagggcccgacctggggctgagtgcagaggctgagcaggacgttaggcccgggcccctggcacgtcctccaccggtgcctcctctggggaagggaaccagccctccagagcaggagactggcaagagctctttgtctcaccagctcagccccggccactccctgccaactccatgaccaggccaccatctgtaccctgcttcccaaactcccaggacctggagacaggattgtctggggccgaggggccagggtgtgaggtttcacctccgttgcggctgtgctcctgtggataacattgctagcgagccgcctctggttccactcagcttggttcctgcccccgccctgctgtatgatattaatgtggaaggtcatcaataaaggggaattgtgttggtgaaaaaaaaaaaaaaaaaaaaaaaaacaaaaaaaaaaaaaacaaaacaaaaaaagggggggcgcgcgcccaaagaagaacaccccccgggggggcccgagaacagacggccacccccacgtgcggagaagcaaacggggggccccacagaagaggaggagcacacactaattataagagccgagagcgagcggcggcgaggaggaaagaaaaaagcacggaaagagggcgaaacaaacggagcacacagcagggaacaaactgggagaagagagagaaaccaaaacagccagaggcgggcagaggcgacaacatagaggagcgcagacacacacaacaaaaacggaacaactacagcacgctaccaagaagcgagccaaacaatccccacccaatataagcagcgcgggtgacaacagggacggggagagaccacgcacgcgagagacaccaagactacgcagggtagcaagtcgggaacgacgcgaggggcgcaacgaccgtgaaaaaatgaaaagacaaaacgacaacacaattataacaacaagagaaagacgcagacaggcaaaacaccacggacggt

SEQ ID NO: 356285 - DNA, 3512 bp, Homo sapiens
cgccccacagccaacctcccgggcaccgttgcccgcccggggcccgctaccggcccaggccccgcctcgcgagtcctcctccccgggtgcctgcccgcagcccgctcggcccagagggtgggcgcggggctgcctctaccggctggcggctgtaactcagcgaccttggcccgaaggctctagcaaggacccaccgaccccagccgcggcggcggcggcgcggactttgcccggtgtgtggggcggagcggactgcgtgtccgcggacgggcagcgaagatgttagccttcgctgccaggaccgtggaccgatcccagggctgtggtgtaacctcagcggccaggcagtctctgtcctccagccaagttttccctcatcaaaacgatcttcgcagattctgacagggtgggagaaaaggacgtggggacctccaagagggacagtcaccactctgctggctggctcctcttccagggtgaagcctctgggcttcctgaagcccttctccttgatgaaggcttccagccgcttcaaggcacaccaggatgcactgccacggctgcccgtgccccctctccagcagtccctggaccactacctgaaggcgctgcagcccatcgtgagtgaggaggagtgggcccacaccaagcagctggtggatgagtttcaggcctcaggaggtgtaggggagcgcctgcagaaggggctggagcgtcgggccaggaagacggagaactggctgtctgagtggtggctcaagaccgcctacctccagtaccgccagcctgtggtcatctactcgagcccaggcgtgatgctacccaagcaggacttcgtggacctgcagggtcagctccgatttgctgccaaactcattgagggtgtgttggatttcaaggtcatgattgacaacgagaccctgcccgtggagtacctgggggggaagccactgtgcatgaaccagtactatcagatcttgtcctcctgccgagtgccgggccccaagcaggacacagtcagcaacttcagcaagaccaagaagcctcccacgcacatcaccgtggtacacaactaccagttttttgagctggatgtgtaccacagtgacgggacacccctcactgcggatcagatctttgtgcagctggagaagatctggaactcatccctacagaccaacaaggagcctgtgggcatcctcacctccaaccaccgcaactcctgggccaaggcatacaacaccctcatcaaagacaaggtgaaccgggattccgtgcgctccatccagaagagcatcttcaccgtgtgcctagatgcaaccatgcccagggtctcagaagacgtgtaccgcagccacgtggcaggccagatgctgcatgggggcggcagcaggctcaacagcggcaaccgctggttcgacaagacgctgcagttcatcgtggcagaagatggctcctgtgggcttgtgtacgagcatgctgcagcggaggggccccctattgtcacccttctggactatgtcatcgagtacacgaagaaacccgagcttgtgcggtctcccatggtgcccctgcccatgcccaagaagctgcggttcaacatcacccccgagatcaagagcgacatcgagaaggccaagcagaacctcagcatcatgatccaggacctggatatcaccgtgatggtgttccaccattttggaaaagacttccccaagtcggagaagctaagcccagatgccttcatccagatggctttgcagctggcctactacaggatctacggacaggcatgtgccacctatgaaagtgcctccctgcgcatgtttcacctgggccgcaccgacaccatccgctcggcttccatggactcactcacctttgtcaaggccatggatgactccagcgtcacggagcaccagaaggtggagctgctgcggaaggccgtgcaggcccaccgaggctacaccgaccgggccatccgcggggaggcctttgatcgacacctgctgggcctgaagctgcaggccatcgaggacctggtgagcatgcccgacatcttcatggacacctcctacgccatcgccatgcacttccacctctccaccagccaggtccctgccaagacagactgtgtcatgttcttcgggcccgtggtccccgacggctacggtgtctgctataaccccatggaggcccacatcaacttctccctgtcggcctacaacagctgcgcggagaccaacgccgcccgcctggcgcattacctggagaaggcgctcctggacatgcgtgccctgctgcagagccacccccgggccaagctctgagcccctaggactcaggcctgccaatgccacagccaagcccaccctgggatgggccacccaccagggctcagctccttggttccctcttccttggttccctcttccctggtccccccaaatctactgagccacggaccgcatcctccagggggcctgcaggccccagccaagtgccttccgtgggtcatcccagcacctgccagggcccgacctggggctgagtgcagaggctgagcaggacgttaggcccgggcccctggcacgtcctccaccggtgcctcctctggggaagggaaccagccctccagagcaggagactggcaagagctctttgtctcaccagctcagccccggccactccctgccaactccatgaccaggccaccatctgtaccctgcttcccaaactcccaggacctggagacaggattgtctggggccgaggggccagggtgtgaggtttcacctccgttgcggctgtgctcctgtggataacattgctagcgagccgcctctggttccactcagcttggttcctgcccccgccctgctgtatgatattaatgtggaaggtcatcaataaaggggaattgtgttggtgaaaaaaaaaaaaaaaaaaaaaaaaacaaaaaaaaaaaaaacaaaacaaaaaaagggggggcgcgcgcccaaagaagaacaccccccgggggggcccgagaacagacggccacccccacgtgcggagaagcaaacggggggccccacagaagaggaggagcacacactaattataagagccgagagcgagcggcggcgaggaggaaagaaaaaagcacggaaagagggcgaaacaaacggagcacacagcagggaacaaactgggagaagagagagaaaccaaaacagccagaggcgggcagaggcgacaacatagaggagcgcagacacacacaacaaaaacggaacaactacagcacgctaccaagaagcgagccaaacaatccccacccaatataagcagcgcgggtgacaacagggacggggagagaccacgcacgcgagagacaccaagactacgcagggtagcaagtcgggaacgacgcgaggggcgcaacgaccgtgaaaaaatgaaaagacaaaacgacaacacaattataacaacaagagaaagacgcagacaggcaaaacaccacggacggt

SEQ ID NO: 356286 - DNA, 3140 bp, Homo sapiens
gtaccacctgtcatctttgtgggtggtactgaccctaacccaaggaatattagaggacattccccggtcaacatggttgtgttttcctatcactctaagagttaggctcaaggacaccagacggagttggaaaggtgcacaccactacctccaacagcttagaagacatgtggggacaggggagagacagctggacggtgacctcctccttcctcctccacaggtgaagcctctgggcttcctgaagcccttctccttgatgaaggcttccagccgcttcaaggcacaccaggatgcactgccacggctgcccgtgccccctctccagcagtccctggaccactacctgaaggcgctgcagcccatcgtgagtgaggaggagtgggcccacaccaagcagctggtggatgagtttcaggcctcaggaggtgtaggggagcgcctgcagaaggggctggagcgtcgggccaggaagacggagaactggatttgctgccaaactcattgagggtgtgttggatttcaaggtcatgattgacaacgagaccctgcccgtggagtacctgggggggaagccactgtgcatgaaccagtactatcagatcttgtcctcctgccgagtgccgggccccaagcaggacacagtcagcaacttcagcaagaccaagaagcctcccacgcacatcaccgtggtacacaactaccagttttttgagctggatgtgtaccacagtgacgggacacccctcactgcggatcagatctttgtgcagctggagaagatctggaactcatccctacagaccaacaaggagcctgtgggcatcctcacctccaaccaccgcaactcctgggccaaggcatacaacaccctcatcaaagacaaggtgaaccgggattccgtgcgctccatccagaagagcatcttcaccgtgtgcctagatgcaaccatgcccagggtctcagaagacgtgtaccgcagccacgtggcaggccagatgctgcatgggggcggcagcaggctcaacagcggcaaccgctggttcgacaagacgctgcagttcatcgtggcagaagatggctcctgtgggcttgtgtacgagcatgctgcagcggaggggccccctattgtcacccttctggactatgtcatcgagtacacgaagaaacccgagcttgtgcggtctcccatggtgcccctgcccatgcccaagaagctgcggttcaacatcacccccgagatcaagagcgacatcgagaaggccaagcagaacctcagcatcatgatccaggacctggatatcaccgtgatggtgttccaccattttggaaaagacttccccaagtcggagaagctaagcccagatgccttcatccagatggctttgcagctggcctactacaggatctacggacaggcatgtgccacctatgaaagtgcctccctgcgcatgtttcacctgggccgcaccgacaccatccgctcggcttccatggactcactcacctttgtcaaggccatggatgactccagcgtcacggagcaccagaaggtggagctgctgcggaaggccgtgcaggcccaccgaggctacaccgaccgggccatccgcggggaggcctttgatcgacacctgctgggcctgaagctgcaggccatcgaggacctggtgagcatgcccgacatcttcatggacacctcctacgccatcgccatgcacttccacctctccaccagccaggtccctgccaagacagactgtgtcatgttcttcgggcccgtggtccccgacggctacggtgtctgctataaccccatggaggcccacatcaacttctccctgtcggcctacaacagctgcgcggagaccaacgccgcccgcctggcgcattacctggagaaggcgctcctggacatgcgtgccctgctgcagagccacccccgggccaagctctgagcccctaggactcaggcctgccaatgccacagccaagcccaccctgggatgggccacccaccagggctcagctccttggttccctcttccttggttccctcttccctggtccccccaaatctactgagccacggaccgcatcctccagggggcctgcaggccccagccaagtgccttccgtgggtcatcccagcacctgccagggcccgacctggggctgagtgcagaggctgagcaggacgttaggcccgggcccctggcacgtcctccaccggtgcctcctctggggaagggaaccagccctccagagcaggagactggcaagagctctttgtctcaccagctcagccccggccactccctgccaactccatgaccaggccaccatctgtaccctgcttcccaaactcccaggacctggagacaggattgtctggggccgaggggccagggtgtgaggtttcacctccgttgcggctgtgctcctgtggataacattgctagcgagccgcctctggttccactcagcttggttcctgcccccgccctgctgtatgatattaatgtggaaggtcatcaataaaggggaattgtgttggtgaaaaaaaaaaaaaaaaaaaaaaaaacaaaaaaaaaaaaaacaaaacaaaaaaagggggggcgcgcgcccaaagaagaacaccccccgggggggcccgagaacagacggccacccccacgtgcggagaagcaaacggggggccccacagaagaggaggagcacacactaattataagagccgagagcgagcggcggcgaggaggaaagaaaaaagcacggaaagagggcgaaacaaacggagcacacagcagggaacaaactgggagaagagagagaaaccaaaacagccagaggcgggcagaggcgacaacatagaggagcgcagacacacacaacaaaaacggaacaactacagcacgctaccaagaagcgagccaaacaatccccacccaatataagcagcgcgggtgacaacagggacggggagagaccacgcacgcgagagacaccaagactacgcagggtagcaagtcgggaacgacgcgaggggcgcaacgaccgtgaaaaaatgaaaagacaaaacgacaacacaattataacaacaagagaaagacgcagacaggcaaaacaccacggacggt

SEQ ID NO: 356287 - DNA, 2625 bp, Homo sapiens
cgccccacagccaacctcccgggcaccgttgcccgcccggggcccgctaccggcccaggccccgcctcgcgagtcctcctccccgggtgcctgcccgcagcccgctcggcccagagggtgggcgcggggctgcctctaccggctggcggctgtaactcagcgaccttggcccgaaggctctagcaaggacccaccgaccccagccgcggcggcggcggcgcggactttgcccggtgtgtggggcggagcggactgcgtgtccgcggacgggcagcgaagatgttagccttcgctgccaggaccgtggtgaagcctctgggcttcctgaagcccttctccttgatgaaggcttccagccgcttcaaggcacaccaggatgcactgccacggctgcccgtgccccctctccagcagtccctggaccactacctgaaggcgctgcagcccatcgtgagtgaggaggagtgggcccacaccaagcagctggtggatgagtttcaggcctcaggaggtgtaggggagcgcctgcagaaggggctggagcgtcgggccaggaagacggagaactggctgtctgagtggtggctcaagaccgcctacctccagtaccgccagcctgtggtcatctactcgagcccaggcgtgatgctacccaagcaggacttcgtggacctgcagggtcagctccgatttgctgccaaactcattgagggtgtgttggatttcaaggtcatgattgacaacgagaccctgcccgtggagtacctgggggggaagccactgtgcatgaaccagtactatcagatcttgtcctcctgccgagtgccgggccccaagcaggacacagtcagcaacttcagcaagaccaagaagcctcccacgcacatcaccgtggtacacaactaccagttttttgagctggatgtgtaccacagtgacgggacacccctcactgcggatcagatctttgtgcagctggagaagatctggaactcatccctacagaccaacaaggagcctgtgggcatcctcacctccaaccaccgcaactcctgggccaaggcatacaacaccctcatcaaagacaaggtgaaccgggattccgtgcgctccatccagaagagcatcttcaccgtgtgcctagatgcaaccatgcccagggtctcagaagacgtgtaccgcagccacgtggcaggccagatgctgcatgggggcggcagcaggctcaacagcggcaaccgctggttcgacaagacgctgcagttcatcgtggcagaagatggctcctgtgggcttgtgtacgagcatgctgcagcggaggggccccctattgtcacccttctggactatgtcatcgagtacacgaagaaacccgagcttgtgcggtctcccatggtgcccctgcccatgcccaagaagctgcggttcaacatcacccccgagatcaagagcgacatcgagaaggccaagcagaacctcagcatcatgatccaggacctggatatcaccgtgatggtgttccaccattttggaaaagacttccccaagtcggagaagctaagcccagatgccttcatccagatggctttgcagctggcctactacaggatctacggacaggcatgtgccacctatgaaagtgcctccctgcgcatgtttcacctgggccgcaccgacaccatccgctcggcttccatggactcactcacctttgtcaaggccatggatgactccagcgtcacggagcaccagaaggtggagctgctgcggaaggccgtgcaggcccaccgaggctacaccgaccgggccatccgcggggaggcctttgatcgacacctgctgggcctgaagctgcaggccatcgaggacctggtccctgccaagacagactgtgtcatgttcttcgggcccgtggtccccgacggctacggtgtctgctataaccccatggaggcccacatcaacttctccctgtcggcctacaacagctgcgcggagaccaacgccgcccgcctggcgcattacctggagaaggcgctcctggacatgcgtgccctgctgcagagccacccccgggccaagctctgagcccctaggactcaggcctgccaatgccacagccaagcccaccctgggatgggccacccaccagggctcagctccttggttccctcttccttggttccctcttccctggtccccccaaatctactgagccacggaccgcatcctccagggggcctgcaggccccagccaagtgccttccgtgggtcatccctggcacgtcctccaccggtgcctcctctggggaagggaaccagccctccagagcaggagactggcaagagctctttgtctcaccagctcagccccggccactccctgccaactccatgaccaggccaccatctgtaccctgcttcccaaactcccaggacctggagacaggattgtctggggccgaggggccagggtgtgaggtttcacctccgttgcggctgtgctcctgtggataacattgctagcgagccgcctctggttccactcagcttggttcctgcccccgccctgctgtatgatattaatgtggaaggtcatcaataaaggggaattgtgttggtgaa

SEQ ID NO: 356288 - DNA, 1178 bp, Homo sapiens
cgccccacagccaacctcccgggcaccgttgcccgcccggggcccgctaccggcccaggccccgcctcgcgagtcctcctccccgggtgcctgcccgcagcccgctcggcccagagggtgggcgcggggctgcctctaccggctggcggctgtaactcagcgaccttggcccgaaggctctagcaaggacccaccgaccccagccgcggcggcggcggcgcggactttgcccggtgtgtggggcggagcggactgcgtgtccgcggacgggcagcgaagatgttagccttcgctgccaggaccgtggtgaagcctctgggcttcctgaagcccttctccttgatgaaggcttccagccgcttcaaggcacaccaggatgcactgccacggctgcccgtgccccctctccagcagtccctggaccactacctgaaggcgctgcagcccatcgtgagtgaggaggagtgggcccacaccaagcagctggtggatgagtttcaggcctcaggaggtgtaggggagcgcctgcagaaggggctggagcgtcgggccaggaagacggagaactggctgtctgagtggtggctcaagaccgcctacctccagtaccgccagcctgtggtcatctactcgagcccaggcgtgatgctacccaagcaggacttcgtggacctgcagggtcagctccgatttgctgccaaactcattgagggtgtgttggatttcaaggtcatgattgacaacgagaccctgcccgtggagtacctgggggggaagccactgtgcatgaaccagtactatcagatcttgtcctcctgccgagtgccgggccccaagcaggacacagtcagcaacttcagcaagaccaagaagcctcccacgcacatcaccgtggtacacaactaccagttttttgagctggatgtgtaccacagtgacgggacacccctcactgcggatcagatctttgtgcagctggagaagatctggaactcatccctacagaccaacaaggagcctgtgggcatcctcacctccaaccaccgcaactcctgggccaaggcatacaacaccctcatcaaaggtgcctcttgggggccgtgctggggctgcacacccaggcctcttcccctgttggggaccagcctcaactccacctgtagggtacccgaagtctg

SEQ ID NO: 356289 - DNA, 411 bp, Homo sapiens
atgccccgtccccgccccacagccaacctcccgggcaccgttgcccgcccggggcccgctaccggcccaggccccgcctcgcgagtcctcctccccgggtgcctgcccgcagcccgctcggcccagagggtgggcgcggggctgcctctaccggctggcggctgtaactcagcgaccttggcccgaaggctctagcaaggacccaccgaccccagccgcggcggcggcggcgcggactttgcccggtgtgtggggcggagcggactgcgtgtccgcggacgggcagcgaagatgttagccttcgctgccaggaccgtggtgagtgcggcggatcccgggcctgagggccctggacggcctgggcgggccgtgcggttgcgtccgggaacggagaccgcgtcctgcggccgc

SEQ ID NO: 356290 - DNA, 2763 bp, Homo sapiens
cgccccacagccaacctcccgggcaccgttgcccgcccggggcccgctaccggcccaggccccgcctcgcgagtcctcctccccgggtgcctgcccgcagcccgctcggcccagagggtgggcgcggggctgcctctaccggctggcggctgtaactcagcgaccttggcccgaaggctctagcaaggacccaccgaccccagccgcggcggcggcggcgcggactttgcccggtgtgtggggcggagcggactgcgtgtccgcggacgggcagcgaagatgttagccttcgctgccaggaccgtggtgaagcctctgggcttcctgaagcccttctccttgatgaaggcttccagccgcttcaaggcacaccaggatgcactgccacggctgcccgtgccccctctccagcagtccctggaccactacctgaaggcgctgcagcccatcgtgagtgaggaggagtgggcccacaccaagcagctggtggatgagtttcaggcctcaggaggtgtaggggagcgcctgcagaaggggctggagcgtcgggccaggaagacggagaactggctgtctgagtggtggctcaagaccgcctacctccagtaccgccagcctgtggtcatctactcgagcccaggcgtgatgctacccaagcaggacttcgtggacctgcagggtcagctccgatttgctgccaaactcattgagggtgtgttggatttcaaggtcatgattgacaacgagaccctgcccgtggagtacctgggggggaagccactgtgcatgaaccagtactatcagatcttgtcctcctgccgagtgccgggccccaagcaggacacagtcagcaacttcagcaagaccaagaagcctcccacgcacatcaccgtggtacacaactaccagttttttgagctggatgtgtaccacagtgacgggacacccctcactgcggatcagatctttgtgcagctggagaagatctggaactcatccctacagaccaacaaggagcctgtgggcatcctcacctccaaccaccgcaactcctgggccaaggcatacaacaccctcatcaaagacaaggtgaaccgggattccgtgcgctccatccagaagagcatcttcaccgtgtgcctagatgcaaccatgcccagggtctcagaagacgtgtaccgcagccacgtggcaggccagatgctgcatgggggcggcagcaggctcaacagcggcaaccgctggttcgacaagacgctgcagttcatcgtggcagaagatggctcctgtgggcttgtgtacgagcatgctgcagcggaggggccccctattgtcacccttctggactatgtcatcgagtacacgaagaaacccgagcttgtgcggtctcccatggtgcccctgcccatgcccaagaagctgcggttcaacatcacccccgagatcaagagcgacatcgagaaggccaagcagaacctcagcatcatgatccaggacctggatatcaccgtgatggtgttccaccattttggaaaagacttccccaagtcggagaagctaagcccagatgccttcatccagatggctttgcagctggcctactacaggatctacggacaggcatgtgccacctatgaaagtgcctccctgcgcatgtttcacctgggccgcaccgacaccatccgctcggcttccatggactcactcacctttgtcaaggccatggatgactccagcgtcacggagcaccagaaggtggagctgctgcggaaggccgtgcaggcccaccgaggctacaccgaccgggccatccgcggggaggcctttgatcgacacctgctgggcctgaagctgcaggccatcgaggacctggtgagcatgcccgacatcttcatggacacctcctacgccatcgccatgcacttccacctctccaccagccaggtccctgccaagacagactgtgtcatgttcttcgggcccgtggtccccgacggctacggtgtctgctataaccccatggaggcccacatcaacttctccctgtcggcctacaacagctgcgcggagaccaacgccgcccgcctggcgcattacctggagaaggcgctcctggacatgcgtgccctgctgcagagccacccccgggccaagctctgagcccctaggactcaggcctgccaatgccacagccaagcccaccctgggatgggccacccaccagggctcagctccttggttccctcttccttggttccctcttccctggtccccccaaatctactgagccacggaccgcatcctccagggggcctgcaggccccagccaagtgccttccgtgggtcatcccagcacctgccagggcccgacctggggctgagtgcagaggctgagcaggacgttaggcccgggcccctggcacgtcctccaccggtgcctcctctggggaagggaaccagccctccagagcaggagactggcaagagctctttgtctcaccagctcagccccggccactccctgccaactccatgaccaggccaccatctgtaccctgcttcccaaactcccaggacctggagacaggattgtctggggccgaggggccagggtgtgaggtttcacctccgttgcggctgtgctcctgtggataacattgctagcgagccgcctctggttccactcagcttggttcctgcccccgccctgctgtatgatattaatgtggaaggtcatcaataaaggggaattgtgttggtgaa

SEQ ID NO: 356291 - DNA, 2517 bp, Homo sapiens
cgccccacagccaacctcccgggcaccgttgcccgcccggggcccgctaccggcccaggccccgcctcgcgagtcctcctccccgggtgcctgcccgcagcccgctcggcccagagggtgggcgcggggctgcctctaccggctggcggctgtaactcagcgaccttggcccgaaggctctagcaaggacccaccgaccccagccgcggcggcggcggcgcggactttgcccggtgtgtggggcggagcggactgcgtgtccgcggacgggcagcgaagatgttagccttcgctgccaggaccgtggtgaagcctctgggcttcctgaagcccttctccttgatgaaggcttccagccgcttcaaggcacaccaggatgcactgccacggctgcccgtgccccctctccagcagtccctggaccactacctgaaggcgctgcagcccatcgtgagtgaggaggagtgggcccacaccaagcagctggtggatgagtttcaggcctcaggaggtgtaggggagcgcctgcagaaggggctggagcgtcgggccaggaagacggagaactggctgtctgagtggtggctcaagaccgcctacctccagtaccgccagcctgtggtcatctactcgagcccaggcgtgatgctacccaagcaggacttcgtggacctgcagggtcagctccgatttgctgccaaactcattgagggtgtgttggatttcaaggtcatgattgacaacgagaccctgcccgtggagtacctgggggggaagccactgtgcatgaaccagtactatcagatcttgtcctcctgccgagtgccgggccccaagcaggacacagtcagcaacttcagcaagaccaagaagcctcccacgcacatcaccgtggtacacaactaccagttttttgagctggatgtgtaccacagtgacgggacacccctcactgcggatcagatctttgtgcagctggagaagatctggaactcatccctacagaccaacaaggagcctgtgggcatcctcacctccaaccaccgcaactcctgggccaaggcatacaacaccctcatcaaagacaaggtgaaccgggattccgtgcgctccatccagaagaaacccgagcttgtgcggtctcccatggtgcccctgcccatgcccaagaagctgcggttcaacatcacccccgagatcaagagcgacatcgagaaggccaagcagaacctcagcatcatgatccaggacctggatatcaccgtgatggtgttccaccattttggaaaagacttccccaagtcggagaagctaagcccagatgccttcatccagatggctttgcagctggcctactacaggatctacggacaggcatgtgccacctatgaaagtgcctccctgcgcatgtttcacctgggccgcaccgacaccatccgctcggcttccatggactcactcacctttgtcaaggccatggatgactccagcgtcacggagcaccagaaggtggagctgctgcggaaggccgtgcaggcccaccgaggctacaccgaccgggccatccgcggggaggcctttgatcgacacctgctgggcctgaagctgcaggccatcgaggacctggtgagcatgcccgacatcttcatggacacctcctacgccatcgccatgcacttccacctctccaccagccaggtccctgccaagacagactgtgtcatgttcttcgggcccgtggtccccgacggctacggtgtctgctataaccccatggaggcccacatcaacttctccctgtcggcctacaacagctgcgcggagaccaacgccgcccgcctggcgcattacctggagaaggcgctcctggacatgcgtgccctgctgcagagccacccccgggccaagctctgagcccctaggactcaggcctgccaatgccacagccaagcccaccctgggatgggccacccaccagggctcagctccttggttccctcttccttggttccctcttccctggtccccccaaatctactgagccacggaccgcatcctccagggggcctgcaggccccagccaagtgccttccgtgggtcatcccagcacctgccagggcccgacctggggctgagtgcagaggctgagcaggacgttaggcccgggcccctggcacgtcctccaccggtgcctcctctggggaagggaaccagccctccagagcaggagactggcaagagctctttgtctcaccagctcagccccggccactccctgccaactccatgaccaggccaccatctgtaccctgcttcccaaactcccaggacctggagacaggattgtctggggccgaggggccagggtgtgaggtttcacctccgttgcggctgtgctcctgtggataacattgctagcgagccgcctctggttccactcagcttggttcctgcccccgccctgctgtatgatattaatgtggaaggtcatcaataaaggggaattgtgttggtgaa

SEQ ID NO: 356292 - DNA, 3085 bp, Homo sapiens
gggctccagagccggggagggaatgaacaggatgttctgctacctgcaggtgaagcctctgggcttcctgaagcccttctccttgatgaaggcttccagccgcttcaaggcacaccaggatgcactgccacggctgcccgtgccccctctccagcagtccctggaccactacctgaaggcgctgcagcccatcgtgagtgaggaggagtgggcccacaccaagcagctggtggatgagtttcaggcctcaggaggtgtaggggagcgcctgcagaaggggctggagcgtcgggccaggaagacggagaactggctgtctgagtggtggctcaagaccgcctacctccagtaccgccagcctgtggtcatctactcgagcccaggcgtgatgctacccaagcaggacttcgtggacctgcagggtcagctccgatttgctgccaaactcattgagggtgtgttggatttcaaggtcatgattgacaacgagaccctgcccgtggagtacctgggggggaagccactgtgcatgaaccagtactatcagatcttgtcctcctgccgagtgccgggccccaagcaggacacagtcagcaacttcagcaagaccaagaagcctcccacgcacatcaccgtggtacacaactaccagttttttgagctggatgtgtaccacagtgacgggacacccctcactgcggatcagatctttgtgcagctggagaagatctggaactcatccctacagaccaacaaggagcctgtgggcatcctcacctccaaccaccgcaactcctgggccaaggcatacaacaccctcatcaaagacaaggtgaaccgggattccgtgcgctccatccagaagagcatcttcaccgtgtgcctagatgcaaccatgcccagggtctcagaagacgtgtaccgcagccacgtggcaggccagatgctgcatgggggcggcagcaggctcaacagcggcaaccgctggttcgacaagacgctgcagttcatcgtggcagaagatggctcctgtgggcttgtgtacgagcatgctgcagcggaggggccccctattgtcacccttctggactatgtcatcgagtacacgaagaaacccgagcttgtgcggtctcccatggtgcccctgcccatgcccaagaagctgcggttcaacatcacccccgagatcaagagcgacatcgagaaggccaagcagaacctcagcatcatgatccaggacctggatatcaccgtgatggtgttccaccattttggaaaagacttccccaagtcggagaagctaagcccagatgccttcatccagatggctttgcagctggcctactacaggatctacggacaggcatgtgccacctatgaaagtgcctccctgcgcatgtttcacctgggccgcaccgacaccatccgctcggcttccatggactcactcacctttgtcaaggccatggatgactccagcgtcacggagcaccagaaggtggagctgctgcggaaggccgtgcaggcccaccgaggctacaccgaccgggccatccgcggggaggcctttgatcgacacctgctgggcctgaagctgcaggccatcgaggacctggtgagcatgcccgacatcttcatggacacctcctacgccatcgccatgcacttccacctctccaccagccaggtccctgccaagacagactgtgtcatgttcttcgggcccgtggtccccgacggctacggtgtctgctataaccccatggaggcccacatcaacttctccctgtcggcctacaacagctgcgcggagaccaacgccgcccgcctggcgcattacctggagaaggcgctcctggacatgcgtgccctgctgcagagccacccccgggccaagctctgagcccctaggactcaggcctgccaatgccacagccaagcccaccctgggatgggccacccaccagggctcagctccttggttccctcttccttggttccctcttccctggtccccccaaatctactgagccacggaccgcatcctccagggggcctgcaggccccagccaagtgccttccgtgggtcatcccagcacctgccagggcccgacctggggctgagtgcagaggctgagcaggacgttaggcccgggcccctggcacgtcctccaccggtgcctcctctggggaagggaaccagccctccagagcaggagactggcaagagctctttgtctcaccagctcagccccggccactccctgccaactccatgaccaggccaccatctgtaccctgcttcccaaactcccaggacctggagacaggattgtctggggccgaggggccagggtgtgaggtttcacctccgttgcggctgtgctcctgtggataacattgctagcgagccgcctctggttccactcagcttggttcctgcccccgccctgctgtatgatattaatgtggaaggtcatcaataaaggggaattgtgttggtgaaaaaaaaaaaaaaaaaaaaaaaaacaaaaaaaaaaaaaacaaaacaaaaaaagggggggcgcgcgcccaaagaagaacaccccccgggggggcccgagaacagacggccacccccacgtgcggagaagcaaacggggggccccacagaagaggaggagcacacactaattataagagccgagagcgagcggcggcgaggaggaaagaaaaaagcacggaaagagggcgaaacaaacggagcacacagcagggaacaaactgggagaagagagagaaaccaaaacagccagaggcgggcagaggcgacaacatagaggagcgcagacacacacaacaaaaacggaacaactacagcacgctaccaagaagcgagccaaacaatccccacccaatataagcagcgcgggtgacaacagggacggggagagaccacgcacgcgagagacaccaagactacgcagggtagcaagtcgggaacgacgcgaggggcgcaacgaccgtgaaaaaatgaaaagacaaaacgacaacacaattataacaacaagagaaagacgcagacaggcaaaacaccacggacggt

SEQ ID NO: 356293 - DNA, 2697 bp, Homo sapiens
cgccccacagccaacctcccgggcaccgttgcccgcccggggcccgctaccggcccaggccccgcctcgcgagtcctcctccccgggtgcctgcccgcagcccgctcggcccagagggtgggcgcggggctgcctctaccggctggcggctgtaactcagcgaccttggcccgaaggctctagcaaggacccaccgaccccagccgcggcggcggcggcgcggactttgcccggtgtgtggggcggagcggactgcgtgtccgcggacgggcagcgaagatgttagccttcgctgccaggaccgtggtgaagcctctgggcttcctgaagcccttctccttgatgaaggcttccagccgcttcaaggcacaccaggatgcactgccacggctgcccgtgccccctctccagcagtccctggaccactacctgaaggcgctgcagcccatcgtgagtgaggaggagtgggcccacaccaagcagctggtggatgagtttcaggcctcaggaggtgtaggggagcgcctgcagaaggggctggagcgtcgggccaggaagacggagaactggctgtctgagtggtggctcaagaccgcctacctccagtaccgccagcctgtggtcatctactcgagcccaggcgtgatgctacccaagcaggacttcgtggacctgcagggtcagctccgatttgctgccaaactcattgagggtgtgttggatttcaaggtcatgattgacaacgagaccctgcccgtggagtacctgggggggaagccactgtgcatgaaccagtactatcagatcttgtcctcctgccgagtgccgggccccaagcaggacacagtcagcaacttcagcaagaccaagaagcctcccacgcacatcaccgtggtacacaactaccagttttttgagctggatgtgtaccacagtgacgggacacccctcactgcggatcagatctttgtgcagctggagaagatctggaactcatccctacagaccaacaaggagcctgtgggcatcctcacctccaaccaccgcaactcctgggccaaggcatacaacaccctcatcaaagacaaggtgaaccgggattccgtgcgctccatccagaagagcatcttcaccgtgtgcctagatgcaaccatgcccagggtctcagaagacgtgtaccgcagccacgtggcaggccagatgctgcatgggggcggcagcaggctcaacagcggcaaccgctggttcgacaagacgctgcagttcatcgtggcagaagatggctcctgtgggcttgtgtacgagcatgctgcagcggaggggccccctattgtcacccttctggactatgtcatcgagtacacgaagaaacccgagcttgtgcggtctcccatggtgcccctgcccatgcccaagaagctgcggttcaacatcacccccgagatcaagagcgacatcgagaaggccaagcagaacctcagcatcatgatccaggacctggatatcaccgtgatggtgttccaccattttggaaaagacttccccaagtcggagaagctaagcccagatgccttcatccagatggctttgcagctggcctactacaggatctacggacaggcatgtgccacctatgaaagtgcctccctgcgcatgtttcacctgggccgcaccgacaccatccgctcggcttccatggactcactcacctttgtcaaggccatggatgactccagcgtcacggagcaccagaaggtggagctgctgcggaaggccgtgcaggcccaccgaggctacaccgaccgggccatccgcggggaggcctttgatcgacacctgctgggcctgaagctgcaggccatcgaggacctggtgagcatgcccgacatcttcatggacacctcctacgccatcgccatgcacttccacctctccaccagccaggtccctgccaagacagactgtgtcatgttcttcgggcccgtggtccccgacggctacggtgtctgctataaccccatggaggcccacatcaacttctccctgtcggcctacaacagctgcgcggagaccaacgccgcccgcctggcgcattacctggagaaggcgctcctggacatgcgtgccctgctgcagagccacccccgggccaagctctgagcccctaggactcaggcctgccaatgccacagccaagcccaccctgggatgggccacccaccagggctcagctccttggttccctcttccttggttccctcttccctggtccccccaaatctactgagccacggaccgcatcctccagggggcctgcaggccccagccaagtgccttccgtgggtcatccctggcacgtcctccaccggtgcctcctctggggaagggaaccagccctccagagcaggagactggcaagagctctttgtctcaccagctcagccccggccactccctgccaactccatgaccaggccaccatctgtaccctgcttcccaaactcccaggacctggagacaggattgtctggggccgaggggccagggtgtgaggtttcacctccgttgcggctgtgctcctgtggataacattgctagcgagccgcctctggttccactcagcttggttcctgcccccgccctgctgtatgatattaatgtggaaggtcatcaataaaggggaattgtgttggtgaa

SEQ ID NO: 356294 - DNA, 2759 bp, Homo sapiens
gtcctagttgaggacacctcatggttagggtagtttctctcagctaaatagcaagttaggattagagtccaagtcctctggctgagaagcccacccgcctccacaccccctgtgcccccaagtaccagcagtcctccaaagcatgtcttgctcaggggcattgaccccaaagtcagaccacctgtgtgggttccccggctgccacaccagctcccatgtgacccctgggcttcggtttcctgtgtctaaagtgggccaggtgttgggccctgcctcgaggagtgctgtgggcctgcagggtcctgttgagttcgaagctctgaacccacaccctgcacttggtgaatgccctggagggccggcgaggtggggggtctcctcatcccagagaggtacaaatgggtcagaagagcccagggcaggaggctgcggaggggctggtccatctctcccacaccatgagaccccattttgcgtctccccgccccatgccacctgcagacaaggtgaaccgggattccgtgcgctccatccagaagagcatcttcaccgtgtgcctagatgcaaccatgcccagggtctcagaagacgtgtaccgcagccacgtggcaggccagatgctgcatgggggcggcagcaggctcaacagcggcaaccgctggttcgacaagacgctgcagttcatcgtggcagaagatggctcctgtgggcttgtgtacgagcatgctgcagcggaggggccccctattgtcacccttctggactatgtcatcgagtacacgaagaaacccgagcttgtgcggtctcccatggtgcccctgcccatgcccaagaagctgcggttcaacatcacccccgagatcaagagcgacatcgagaaggccaagcagaacctcagcatcatgatccaggacctggatatcaccgtgatggtgttccaccattttggaaaagacttccccaagtcggagaagctaagcccagatgccttcatccagatggctttgcagctggcctactacaggatctacggacaggcatgtgccacctatgaaagtgcctccctgcgcatgtttcacctgggccgcaccgacaccatccgctcggcttccatggactcactcacctttgtcaaggccatggatgactccagcgtcacggagcaccagaaggtggagctgctgcggaaggccgtgcaggcccaccgaggctacaccgaccgggccatccgcggggaggcctttgatcgacacctgctgggcctgaagctgcaggccatcgaggacctggtgagcatgcccgacatcttcatggacacctcctacgccatcgccatgcacttccacctctccaccagccaggtccctgccaagacagactgtgtcatgttcttcgggcccgtggtccccgacggctacggtgtctgctataaccccatggaggcccacatcaacttctccctgtcggcctacaacagctgcgcggagaccaacgccgcccgcctggcgcattacctggagaaggcgctcctggacatgcgtgccctgctgcagagccacccccgggccaagctctgagcccctaggactcaggcctgccaatgccacagccaagcccaccctgggatgggccacccaccagggctcagctccttggttccctcttccttggttccctcttccctggtccccccaaatctactgagccacggaccgcatcctccagggggcctgcaggccccagccaagtgccttccgtgggtcatcccagcacctgccagggcccgacctggggctgagtgcagaggctgagcaggacgttaggcccgggcccctggcacgtcctccaccggtgcctcctctggggaagggaaccagccctccagagcaggagactggcaagagctctttgtctcaccagctcagccccggccactccctgccaactccatgaccaggccaccatctgtaccctgcttcccaaactcccaggacctggagacaggattgtctggggccgaggggccagggtgtgaggtttcacctccgttgcggctgtgctcctgtggataacattgctagcgagccgcctctggttccactcagcttggttcctgcccccgccctgctgtatgatattaatgtggaaggtcatcaataaaggggaattgtgttggtgaaaaaaaaaaaaaaaaaaaaaaaaacaaaaaaaaaaaaaacaaaacaaaaaaagggggggcgcgcgcccaaagaagaacaccccccgggggggcccgagaacagacggccacccccacgtgcggagaagcaaacggggggccccacagaagaggaggagcacacactaattataagagccgagagcgagcggcggcgaggaggaaagaaaaaagcacggaaagagggcgaaacaaacggagcacacagcagggaacaaactgggagaagagagagaaaccaaaacagccagaggcgggcagaggcgacaacatagaggagcgcagacacacacaacaaaaacggaacaactacagcacgctaccaagaagcgagccaaacaatccccacccaatataagcagcgcgggtgacaacagggacggggagagaccacgcacgcgagagacaccaagactacgcagggtagcaagtcgggaacgacgcgaggggcgcaacgaccgtgaaaaaatgaaaagacaaaacgacaacacaattataacaacaagagaaagacgcagacaggcaaaacaccacggacggt

SEQ ID NO: 356295 - DNA, 1597 bp, Homo sapiens
cgccccacagccaacctcccgggcaccgttgcccgcccggggcccgctaccggcccaggccccgcctcgcgagtcctcctccccgggtgcctgcccgcagcccgctcggcccagagggtgggcgcggggctgcctctaccggctggcggctgtaactcagcgaccttggcccgaaggctctagcaaggacccaccgaccccagccgcggcggcggcggcgcggactttgcccggtgtgtggggcggagcggactgcgtgtccgcggacgggcagcgaagatgttagccttcgctgccaggaccgtggtgaagcctctgggcttcctgaagcccttctccttgatgaaggcttccagccgcttcaaggcacaccaggatgcactgccacggctgcccgtgccccctctccagcagtccctggaccactacctgaaggcgctgcagcccatcgtgagtgaggaggagtgggcccacaccaagcagctggtggatgagtttcaggcctcaggaggtgtaggggagcgcctgcagaaggggctggagcgtcgggccaggaagacggagaactggctgtctgagtggtggctcaagaccgcctacctccagtaccgccagcctgtggtcatctactcgagcccaggcgtgatgctacccaagcaggacttcgtggacctgcagggtcagctccgatttgctgccaaactcattgagggtgtgttggatttcaaggtcatgattgacaacgagaccctgcccgtggagtacctgggggggaagccactgtgcatgaaccagtactatcagatcttgtcctcctgccgagtgccgggccccaagcaggacacagtcagcaacttcagcaagaccaagaagcctcccacgcacatcaccgtggtacacaactaccagttttttgagctggatgtgtaccacagtgacgggacacccctcactgcggatcagatctttgtgcagctggagaagatctggaactcatccctacagaccaacaaggagcctgtgggcatcctcacctccaaccaccgcaactcctgggccaaggcatacaacaccctcatcaaagacaaggtgaaccgggattccgtgcgctccatccagaagagcatcttcaccgtgtgcctagatgcaaccatgcccagggtctcagaagacgtgtaccgcagccacgtggcaggccagatgctgcatgggggcggcagcaggctcaacagcggcaaccgctggttcgacaagacgctgcagttcatcgtggcagaagatggctcctgtgggcttgtgtacgagcatgctgcagcggaggggccccctattgtcacccttctggactatgtcatcgagtacacgaagaaacccgagcttgtgcggtctcccatggtgcccctgcccatgcccaagaagctgcggttcaacatcacccctcgctgcttgccctgcgtcgccttgctgcatgtccgctcctctgtgtgctctcactttccactgtaaccttaagcctgcttagcttggaataagacttaggagaaaatggtgcttcactaacccgcttccggtccagtcacaatcatcatgtcactgt

SEQ ID NO: 356296 - DNA, 1476 bp, Homo sapiens
cgccccacagccaacctcccgggcaccgttgcccgcccggggcccgctaccggcccaggccccgcctcgcgagtcctcctccccgggtgcctgcccgcagcccgctcggcccagagggtgggcgcggggctgcctctaccggctggcggctgtaactcagcgaccttggcccgaaggctctagcaaggacccaccgaccccagccgcggcggcggcggcgcggactttgcccggtgtgtggggcggagcggactgcgtgtccgcggacgggcagcgaagatgttagccttcgctgccaggaccgtggaccgatcccagggctgtggtgtaacctcagcggccaggcagtctctgtcctccagccaagttttccctcatcaaaacgatcttcgcagattctgacaggtgaagcctctgggcttcctgaagcccttctccttgatgaaggcttccagccgcttcaaggcacaccaggatgcactgccacggctgcccgtgccccctctccagcagtccctggaccactacctgaaggcgctgcagcccatcgtgagtgaggaggagtgggcccacaccaagcagctggtggatgagtttcaggcctcaggaggtgtaggggagcgcctgcagaaggggctggagcgtcgggccaggaagacggagaactgggtgagtgagggcatcctcactgtgacctgctgctggctgcacatgcacagttctccagtgcccactgctctggcacggccgttcgtttgctgcccagagtttcgtgagcacatactctgtgtctggcacttggcagggtgctgggtgatcaagaaggacacagtcaccagctccttggagctaacattcaagtagggaggagagaaaggtaatgaacaggatacaggttgtggacaaggtttcatgttccaggacagaggcaggagtggggtgcacggcaggtacaaccagatagaagatgcccttgtgcttggtgggacagcctcaggcaggggatatgtgtcactcagtgaccgatcgcccaggttctgtatctgatctatgacacaggtgtacccagtttggcaaatatgtctacaccaatgtttggtgtgcttttctatttgcatctcatacttcaatacacagatttaaaaagtgaaaaaaaaaaaaaaaaaaaaaaacaaaaaaaaaaaaaacaaaacaaaaaaaggggggcgggcgggctatataataatctcgccagggggggccaccactaatggccgcgcagcgcacatatatggttgcgaaaagggggcccccacgagaaagggccgcgctaacaagaagacgtcaggactaaggagcaagatgtcacataacaacggtgtgcgaggggaggaacgaggtcacaggcgggcccgtgggcagaagacaaccacgcggtgggggggggcacacaaagggaacaactcctcccaacagatggaaacggcggggaaaaag

SEQ ID NO: 356297 - DNA, 1486 bp, Homo sapiens
cgagtgtggccaagggtgccggaggcagggttcgggtgcgtagtcgttgcgtgggcgctgcccaaaaggcgcagagcatcaagtgtgcgtgggcagaaccggcgcgggcgcccgccgcgggtctgcgcggggcgggggcgcagcaagtgcatccgagcgagcggagactagcgcaccggcgtcggtggcgagggtggtgcagaggagtccggctgggcggagggaggaaggatgggtgcgggtaactttttgaccgccttggaagtaccagtagccgcgctcgcaggggctgcctccgaccgccgggcgagctgcgagcgagtgagcccgccaccgcccctcccccacttccgcctcccgagcctcttcctcgttcccggctcccagggccgtcggtcccgtccaggccggagccaggggccccactgttgggatgctggctgcagtggggcgccccaagcccaggtcccctctgtcttctctttcgactttgcagctgtacttgttttgctcctctacccgcaggagctgacatggacccaaatcctcgggccgccctggagcgccagcagctccgccttcgggagcggcaaaaattcttcgaggacattttacagccagagacagagtttgtctttcctctgtcccatctgcatctcgagtcgcagagaccccccataggtagtatctcatccatggaagtgaatgtggacacactggagcaagtagaacttattgaccttggggacccggatgcagcagatgtgttcttgccttgcgaagatcctccaccaaccccccagtcgtctggggtggacaaccatttggaggagctgagcctgccggtgcctacatcagacaggaccacatctaggacctcctcctcctcctcctccgactcctccaccaacctgcatagcccaaatccaagtgatgatggagcagatacgcccttggcacagtcggatgaagaggaggaaaggggtgatggaggggcagagcctggagcctgcagctagcagtgggcccctgcctacagactgaccacgctggctattctccacatgagaccacaggcccagccagagcctgtcgggagaagaccagactctttacttgcagtaggcaccagaggtgggaaggatggtgggattgtgtacctttctaagaattaaccctctcctgctttactgctaattttttcctgctgcaaccctcccaccagtttttggcttactcctgagatatgatttgcaaatgaggagagagaagatgaggttggacaagatgccactgcttttcttagcactcttccctcccctaaaccatcccgtagtcttctaatacagtctctcagacaagtgtctctagatggatgtgaactccttaactcatcaagtaaggtggtactcaagccatgctgcctccttacatcctttttggaacagagcacggtataaataataaactaataataatatgccaa

SEQ ID NO: 356298 - DNA, 948 bp, Homo sapiens
catgtgctcagttcgctatccggcaggtcttgtacctggttcaggaggttcaggcagaggttgcacccactacgcctgcgcaacctcagccccgcccctccgctgctttccccggaaacgtttctttcctgttctttcctacgcagccgctcctgccgccgtggtcgctggagctttgcctctctaggccggcagcgcctctcctccatggtcctgtctgtcagcgctgttttgggagcccgccggtgaggccgggccacgctcagacacttcgatcgtcgagtctgtcactgggcatggcgggtcagttccgcagctacgtgtgggacccgctgctgatcctgtcgcagatcgtcctcatgcagaccgtgtattacggctcgctgggcctgtggctggcgctggtggacgggctagtgcgaagcagcccctcgctggaccagatgttcgacgccgagatcctgggcttttccacccctccaggccggctctccatgatgtccttcatcctcaacgccctcacctgacagggtcttgctctcttgcccaggctggagtgcagtggcgaagtcacagctcactgcagcctcgactcctgggcttaagcgatcctccgacctcagcctcctgagtagctgatactacaagcgcaaggcaccacatctggctaatttttaaattttttgtagagacagtgtctcattatgttgcccaggatggtcttgaactcctggcctcaagcagtcttcctgcctcgacctcccaaggtgctgggattacaggcgtgagccaccatgcctagcctgttcagagtaaatcttatttgaggcatgaatcaatcaaacataaatagagagttgaattgatcttagagggaatgggatgcagcaaagccctacttgaccatctcccccctcccacatttggaaatccttaaacccacttatg

SEQ ID NO: 356299 - DNA, 1273 bp, Homo sapiens
  misc_feature (1221)..(1221): n is a, c, g, or t
cgagtgtggccaagggtgccggaggcagggttcgggtgcgtagtcgttgcgtgggcgctgcccaaaaggcgcagagcatcaagtgtgcgtgggcagaaccggcgcgggcgcccgccgcgggtctgcgcggggcgggggcgcagcaagtgcatccgagcgagcggagactagcgcaccggcgtcggtggcgagggtggtgcagaggagtccggctgggcggagggaggaaggatgggtgcgggtaactttttgaccgccttggaagtaccagtagccgcgctcgcaggggctgcctccgaccgccgggcgagctgcgagcgagtgagcccgccaccgcccctcccccacttccgcctcccgagcctcttcctcgttcccggctcccagggccgtcggtcccccgggagccctggaggcgcagccccaccccggccggcgcggctcgctcccacgcccccgccgcggcctcgctggagcggacggactgagtcagagggggcgccagcgctgcaggagctgacatggacccaaatcctcgggccgccctggagcgccagcagctccgccttcgggagcggcaccatctgcatctcgagtcgcagagaccccccataggtagtatctcatccatggaagtgaatgtggacacactggagcaagtagaacttattgaccttggggacccggatgcagcagatgtgttcttgccttgcgaagatcctccaccaaccccccagtcgtctggggtggacaaccatttggaggagctgagcctgccggtgcctacatcagacaggaccacatctaggactgatgatggagcagatacgcccttggcacagtcggatgaagaggaggaaaggggtgatggaggggcagagcctggagcctgcagctagcagtgggcccctgcctacagactgaccacgctggctattctccacatgagaccacaggcccagccagagcctgtcgggagaagaccagactctttacttgcagtaggcaccagaggtgggaaggatggtgggattgtgtacctttctaagaattaaccctctcctgctttactgctaattttttcctgctgcaaccctcccaccagtttttggcttactcctgagatatgatttgcaaagccatgacggaagaatatagttgcaggtgcactgtttctagaccttcttcctaacatccgaagcttaacaagttagcaaggtntaaagatggactccattataagaggggctaaccagtgctctaacctttgaat

SEQ ID NO: 356300 - DNA, 1474 bp, Homo sapiens
cgagtgtggccaagggtgccggaggcagggttcgggtgcgtagtcgttgcgtgggcgctgcccaaaaggcgcagagcatcaagtgtgcgtgggcagaaccggcgcgggcgcccgccgcgggtctgcgcggggcgggggcgcagcaagtgcatccgagcgagcggagactagcgcaccggcgtcggtggcgagggtggtgcagaggagtccggctgggcggagggaggaaggatgggtgcgggtaactttttgaccgccttggaagtaccagtagccgcgctcgcaggggctgcctccgaccgccgggcgagctgcgagcgagtgagcccgccaccgcccctcccccacttccgcctcccgagcctcttcctcgttcccggctcccagggccgtcggtcccccgggagccctggaggcgcagccccaccccggccggcgcggctcgctcccacgcccccgccgcggcctcgctggagcggacggactgagtcagagggggcgccagcgctgcaggagctgacatggacccaaatcctcgggccgccctggagcgccagcagctccgccttcgggagcggcaaaaattcttcgaggacattttacagccagagacagagtttgtctttcctctgtcccatctgcatctcgagtcgcagagaccccccataggtagtatctcatccatggaagtgaatgtggacacactggagcaagtagaacttattgaccttggggacccggatgcagcagatgtgttcttgccttgcgaagatcctccaccaaccccccagtcgtctggggtggacaaccatttggaggagctgagcctgccggtgcctacatcagacaggaccacatctaggacctcctcctcctcctcctccgactcctccaccaacctgcatagcccaaatccaagtgatgatggagcagatacgcccttggcacagtcggatgaagaggaggaaaggggtgatggaggggcagagcctggagcctgcagctagcagtgggcccctgcctacagactgaccacgctggctattctccacatgagaccacaggcccagccagagcctgtcgggagaagaccagactctttacttgcagtaggcaccagaggtgggaaggatggtgggattgtgtacctttctaagaattaaccctctcctgctttactgctaattttttcctgctgcaaccctcccaccagtttttggcttactcctgagatatgatttgcaaatgaggagagagaagatgaggttggacaagatgccactgcttttcttagcactcttccctcccctaaaccatcccgtagtcttctaatacagtctctcagacaagtgtctctagatggatgtgaactccttaactcatcaagtaaggtggtactcaagccatgctgcctccttacatcctttttggaacagagcacggtataaataataaactaataataatatgccaa

SEQ ID NO: 356301 - DNA, 2879 bp, Homo sapiens
catgtgctcagttcgctatccggcaggtcttgtacctggttcaggaggttcaggcagaggttgcacccactacgcctgcgcaacctcagccccgcccctccgctgctttccccggaaacgtttctttcctgttctttcctacgcagccgctcctgccgccgtggtcgctggagctttgcctctctaggccggcagcgcctctcctccatggtcctgtctgtcagcgctgttttgggagcccgccggtgaggccgggccacgctcagacacttcgatcgtcgagtctgtcactgggcatggcgggtcagttccgcagctacgtgtgggacccgctgctgatcctgtcgcagatcgtcctcatgcagaccgtgtattacggctcgctgggcctgtggctggcgctggtggacgggctagtgcgaagcagcccctcgctggaccagatgttcgacgccgagatcctgggcttttccacccctccaggccggctctccatgatgtccttcatcctcaacgccctcacctgtgccctgggcttgctgtacttcatccggcgaggaaagcagtgtctggatttcactgtcactgtccatttctttcacctcctgggctgctggttctacagctcccgtttcccctcggcgctgacctggtggctggtccaagccgtgtgcattgcactcatggctgtcatcggggagtacctgtgcatgcggacggagctcaaggagatacccctcaactcagcccctaaatccaatgtctagaatcaggccctttggacatcctgctgacacttgggccccttaacaccttgggctgctcagaccctccagatgaggtccagcccagatctgagaggaaccctggaaatgtgaagtctctgttggtgtgggagagatagtgagggcctgtcaaagaaggcaggtagcagtcagcatgacagctgcaagaatgacctctgtctgttgaagccttggtatctgagaggtcaggaaggggacctctttgagggtaataacagaattggaaccatgccactcttgagccacaatacctgtcaccagcctgttgttttaagagagaaaaaaaatcaaggatatctgattggagcaaaccacttctttagtcatctgtcttacccccctgggacagctgttacctttgcagtgttgccgaatcacagcagttacctttgcagtgttgccgaatcacagcagttctgttggagaaacgcttggtttccggatccagagccacagaaagaaatgtaggtgtgaagtattaggctgctgtcagggagaggatggcagatggaggcatcaagcacaaggaaaatgcacaacctgtgccctgttatacacacgttcatgtgcacccaagaacctatgactttcttccagttccttctaccaggtccccatcctgctgccagctctcaacatagcaggccataggacccagagaagaatcccagcgttgctcaaagtctaaccatcataaagacactgcctgtcttctaggaatgaccaggcacccagctcccactggactccaattttttttcctgccttatttagaattctttggcgggaagggtatgatgggttcccagagacaagaagcccaaccttctggcctgggctgtgctgatagtgctgagggagataggaatttgctgctaagatttttctttggggtggagtttcctctgtgaggggcttgcagctatccttcctgtgtatacaaatacagtattttccatggttctgcctgcacttactttgtaatgccacggttgagattgagagagatcagcgcagccaggcaagggaactttaaagaattattaggccaccttctccctttcctggaccccagagtcattcctccatttggttaaaatactcagtgcagggaactcttacatcctgtctccttcacttgcagcgtcccctgctatgcctcaggtgaaccacataattcttgggtttccgttcctacttgctagtgatttctgaacatgttcaatggagcggcacacagtctagacccacttccgcattgaaaccttcactgttcctctttggtttcttcagagctttcccaagagagctgtcagttttcagctgtcagtaacacaaatgagtttatggtaacacaaatgagttttgctatctctctgagaagctcatctgacctcctgactctcagccctacagagtagggagttgatgctgacaggatgaaggtttaggaataaatatgcctgggaagagactgggaaggttctagggtgaggcacctcagtaactcatggtaccttggccaagttggaaggaagcagtttgttaatgaggcacagtaatcctggctgcagggtctaggaggtaagaccagctgggatgaccttccctgggttaatcaatttccctctagacaacacaaactgcaggcatgtgactaactttgaaagaacacccatcatgtggctgctgtcacccttgaccagccgtggtggtggttactccatctgtggttggagcgcctctttgggattcacttcaaggtcttgtgcctatttttctgcatatcttctgtgatgacaaatctctgtcccctgagtgttaatttgatttttagaaatggccaaaagtaacgtgatccaaactttttttcagtaatatggagactgagctgcatggtagttggggatcaaaaatatgtgaccttaatgagatttttatgatttctaaagtaacaataaaagcagtttttagagttgagttccagagagggcagggcaatggcagtgacatgtttgtcattttaataataaataacatctattgagtgcttaagaggtgtccagcagtgtg

SEQ ID NO: 356302 - DNA, 1600 bp, Homo sapiens
ttttgaaggatgggaaggggtgggctgcagcactggaggaagggaaccctccaccctgagatctctgtctctatcctatcctgtccctggccttctgaggcaagcggggccaattaaggggaaaacgtacctcctccatttgtgctgaaccaatccctccaacccctctcaggagggcatgatatggagagttgggcattggctgtgttccctgaatacagagtatctctcttgtggtgcctggaactggcatcccctttgtggagcttagggcaagccccgcctctgcatgagacttggtttgtgggacacacttggtttcagggaaggggaaagaggtcaccaagggcagaggtgtccaggccggagccaggggccccactgttgggatgctggctgcagtggggcgccccaagcccaggtcccctctgtcttctctttcgactttgcagctgtacttgttttgctcctctacccgcaggagctgacatggacccaaatcctcgggccgccctggagcgccagcagctccgccttcgggagcggcaaaaattcttcgaggacattttacagccagagacagagtttgtctttcctctgtcccatctgcatctcgagtcgcagagaccccccataggtagtatctcatccatggaagtgaatgtggacacactggagcaagtagaacttattgaccttggggacccggatgcagcagatgtgttcttgccttgcgaagatcctccaccaaccccccagtcgtctggggtggacaaccatttggaggagctgagcctgccggtgcctacatcagacaggaccacatctaggacctcctcctcctcctcctccgactcctccaccaacctgcatagcccaaatccaagtgatgatggagcagatacgcccttggcacagtcggatgaagaggaggaaaggggtgatggaggggcagagcctggagcctgcagctagcagtgggcccctgcctacagactgaccacgctggctattctccacatgagaccacaggcccagccagagcctgtcgggagaagaccagactctttacttgcagtaggcaccagaggtgggaaggatggtgggattgtgtacctttctaagaattaaccctctcctgctttactgctaattttttcctgctgcaaccctcccaccagtttttggcttactcctgagatatgatttgcaaatgaggagagagaagatgaggttggacaagatgccactgcttttcttagcactcttccctcccctaaaccatcccgtagtcttctaatacagtctctcagacaagtgtctctagatggatgtgaactccttaactcatcaagtaaggtggtactcaagccatgctgcctccttacatcctttttggaacagagcacggtataaataataaactaataataatatgccaaaaaaaaacaaaagacaaaacccgccacacaccccacagaccccacacgacgcgcctgacacagccaccagaactccaacagaccaaacaaacccagcacgagggggggcccgccaaaagaaaactccccgggcggggcgcccaacagagccacccacc

SEQ ID NO: 356303 - DNA, 1741 bp, Homo sapiens
ctggaacaacttacttcccgtctttccacttcagagagggggaacctaggatcaatgaagttgatgggttttcgtctgctggagtaggaataagttctttcctacgcagccgctcctgccgccgtggtcgctggagctttgcctctctaggccggcagcgcctctcctccatggtcctgtctgtcagcgctgttttgggagcccgccggtgaggccgggccacgctcagacacttcgatcgtcgagtctgtcactgggcatggcgggtcagttccgcagctacgtgtgggacccgctgctgatcctgtcgcagatcgtcctcatgcagaccgtgtattacggctcgctgggcctgtggctggcgctggtggacgggctagtgcgaagcagcccctcgctggaccagatgttcgacgccgagatcctgggcttttccacccctccaggccggctctccatgatgtccttcatcctcaacgccctcacctgtgccctgggcttgctgtacttcatccggcgaggaaagcagtgtctggatttcactgtcactgtccatttctttcacctcctgggctgctggttctacagctcccgtttcccctcggcgctgacctggtggctggtccaagccgtgtgcattgcactcatggctgtcatcggggagtacctgtgcatgcggacggagctcaaggagatacccctcaactcagcccctaaatccaatgtctagaatcaggccctttggacatcctgctgacacttgggccccttaacaccttgggctgctcagaccctccagatgaggtccagcccagatctgagaggaaccctggaaatgtgaagtctctgttggtgtgggagagatagtgagggcctgtcaaagaaggcaggtagcagtcagcatgacagctgcaagaatgacctctgtctgttgaagccttggtatctgagaggtcaggaaggggacctctttgagggtaataacagaattggaaccatgccactcttgagccacaatacctgtcaccagcctgttgttttaagagagaaaaaaaatcaaggatatctgattggagcaaaccacttctttagtcatctgtcttacccccctgggacagctgttacctttgcagtgttgccgaatcacagcagttacctttgcagtgttgccgaatcacagcagttctgttggagaaacgcttggtttccggatccagagccacagaaagaaatgtaggtgtgaagtattaggctgctgtcagggagaggatggcagatggaggcatcaagcacaaggaaaatgcacaacctgtgccctgttatacacacgttcatgtgcacccaagaacctatgactttcttccagttccttctaccaggtccccatcctgctgccagctctcaacatagcaggccataggacccagagaagaatcccagcgttgctcaaagtctaaccatcataaagacactgcctgtcttctaggaatgaccaggcacccagctcccactggactccaattttttttcctgccttatttagaattctttggcgggaagggtatgatgggttcccagagacaagaagcccaaccttctggcctgggctgtgctgatagtgctgagggagataggaatttgctgctaagatttttctttggggtggagtttcctctgtgaggggcttgcagctatccttcctgtgtatacaaatacagtattttccatggttctgcctgca

SEQ ID NO: 356304 - DNA, 1346 bp, Homo sapiens
  misc_feature (2)..(2): n is a, c, g, or t
  misc_feature (20)..(20): n is a, c, g, or t
  misc_feature (25)..(25): n is a, c, g, or t
  misc_feature (38)..(38): n is a, c, g, or t
gntaggctaggtagaggccngtgtnaatcggccgaggnctctctaggccggcagcgcctctcctccatggtcctgtctgtcagcgctgttttgggagcccgccggtgaggccgggccacgctcagacacttcgatcgtcgagtctgtcactgggcatggcgggtcagttccgcagctacgtgtgggacccgctgctgatcctgtcgcagatcgtcctcatgcagaccgtgtattacggctcgctgggcctgtggctggcgctggtggacgggctagtgcgaagcagcccctcgctggaccagatgttcgacgccgagatcctgggcttttccacccctccaggccggctctccatgatgtccttcatcctcaacgccctcacctggagctgacatggacccaaatcctcgggccgccctggagcgccagcagctccgccttcgggagcggcaaaaattcttcgaggacattttacagccagagacagagtttgtctttcctctgtcccatctgcatctcgagtcgcagagaccccccataggtagtatctcatccatggaagtgaatgtggacacactggagcaagtagaacttattgaccttggggacccggatgcagcagatgtgttcttgccttgcgaagatcctccaccaaccccccagtcgtctggggtggacaaccatttggaggagctgagcctgccggtgcctacatcagacaggaccacatctaggacctcctcctcctcctcctccgactcctccaccaacctgcatagcccaaatccaagtgatgatggagcagatacgcccttggcacagtcggatgaagaggaggaaaggggtgatggaggggcagagcctggagcctgcagctagcagtgggcccctgcctacagactgaccacgctggctattctccacatgagaccacaggcccagccagagcctgtcgggagaagaccagactctttacttgcagtaggcaccagaggtgggaaggatggtgggattgtgtacctttctaagaattaaccctctcctgctttactgctaattttttcctgctgcaaccctcccaccagtttttggcttactcctgagatatgatttgcaaatgaggagagagaagatgaggttggacaagatgccactgcttttcttagcactcttccctcccctaaaccatcccgtagtcttctaatacagtctctcagacaagtgtctctagatggatgtgaactccttaactcatcaagtaaggtggtactcaagccatgctgcctccttacatcctttttggaacagagcacggtataaataataaactaataataatatgccaa

SEQ ID NO: 356305 - DNA, 1322 bp, Homo sapiens
catgtgctcagttcgctatccggcaggtcttgtacctggttcaggaggttcaggcagaggttgcacccactacgcctgcgcaacctcagccccgcccctccgctgctttccccggaaacgtttctttcctgttctttcctacgcagccgctcctgccgccgtggtcgctggagctttgcctctctaggccggcagcgcctctcctccatggtcctgtctgtcagcgctgttttgggagcccgccggtgaggccgggccacgctcagacacttcgatcgtcgagtctgtcactgatcctgggcttttccacccctccaggccggctctccatgatgtccttcatcctcaacgccctcacctggagctgacatggacccaaatcctcgggccgccctggagcgccagcagctccgccttcgggagcggcaaaaattcttcgaggacattttacagccagagacagagtttgtctttcctctgtcccatctgcatctcgagtcgcagagaccccccataggtagtatctcatccatggaagtgaatgtggacacactggagcaagtagaacttattgaccttggggacccggatgcagcagatgtgttcttgccttgcgaagatcctccaccaaccccccagtcgtctggggtggacaaccatttggaggagctgagcctgccggtgcctacatcagacaggaccacatctaggacctcctcctcctcctcctccgactcctccaccaacctgcatagcccaaatccaagtgatgatggagcagatacgcccttggcacagtcggatgaagaggaggaaaggggtgatggaggggcagagcctggagcctgcagctagcagtgggcccctgcctacagactgaccacgctggctattctccacatgagaccacaggcccagccagagcctgtcgggagaagaccagactctttacttgcagtaggcaccagaggtgggaaggatggtgggattgtgtacctttctaagaattaaccctctcctgctttactgctaattttttcctgctgcaaccctcccaccagtttttggcttactcctgagatatgatttgcaaatgaggagagagaagatgaggttggacaagatgccactgcttttcttagcactcttccctcccctaaaccatcccgtagtcttctaatacagtctctcagacaagtgtctctagatggatgtgaactccttaactcatcaagtaaggtggtactcaagccatgctgcctccttacatcctttttggaacagagcacggtataaataataaactaataataatatgccaa

SEQ ID NO: 356306 - DNA, 1122 bp, Homo sapiens
ccagagccaggaatcaggggcagccgggcgagtcccagggcaggggtcctccgccgccttgcacctgccctgctgggcggcaccgggtcagtgccctgccccctcctgcgggtcccaactctctctttcccatcgtgcgtcctctggagaagtgcgcgcgtgagctgacatggacccaaatcctcgggccgccctggagcgccagcagctccgccttcgggagcggcaaaaattcttcgaggacattttacagccagagacagagtttgtctttcctctgtcccatctgcatctcgagtcgcagagaccccccataggtagtatctcatccatggaagtgaatgtggacacactggagcaagtagaacttattgaccttggggacccggatgcagcagatgtgttcttgccttgcgaagatcctccaccaaccccccagtcgtctggggtggacaaccatttggaggagctgagcctgccggtgcctacatcagacaggaccacatctaggacctcctcctcctcctcctccgactcctccaccaacctgcatagcccaaatccaagtgatgatggagcagatacgcccttggcacagtcggatgaagaggaggaaaggggtgatggaggggcagagcctggagcctgcagctagcagtgggcccctgcctacagactgaccacgctggctattctccacatgagaccacaggcccagccagagcctgtcgggagaagaccagactctttacttgcagtaggcaccagaggtgggaaggatggtgggattgtgtacctttctaagaattaaccctctcctgctttactgctaattttttcctgctgcaaccctcccaccagtttttggcttactcctgagatatgatttgcaaatgaggagagagaagatgaggttggacaagatgccactgcttttcttagcactcttccctcccctaaaccatcccgtagtcttctaatacagtctctcagacaagtgtctctagatggatgtgaactccttaactcatcaagtaaggtggtactcaagccatgctgcctccttacatcctttttggaacagagcacggtataaataataaactaataataatatgccaa

SEQ ID NO: 356307 - DNA, 1357 bp, Homo sapiens
ttttgaaggatgggaaggggtgggctgcagcactggaggaagggaaccctccaccctgagatctctgtctctatcctatcctgtccctggccttctgaggcaagcggggccaattaaggggaaaacgtacctcctccatttgtgctgaaccaatccctccaacccctctcaggagggcatgatatggagagttgggcattggctgtgttccctgaatacagagtatctctcttgtggtgcctggaactggcatcccctttgtggagcttagggcaagccccgcctctgcatgagacttggtttgtgggacacacttggtttcagggaaggggaaagaggtcaccaagggcagaggtgtccaggccggagccaggggccccactgttgggatgctggctgcagtggggcgccccaagcccaggtcccctctgtcttctctttcgactttgcagctgtacttgttttgctcctctacccgcaggagctgacatggacccaaatcctcgggccgccctggagcgccagcagctccgccttcgggagcggcaaaaattcttcgaggacattttacagccagagacagagtttgtctttcctctgtcccatctgcatctcgagtcgcagagaccccccataggtagtatctcatccatggaagtgaatgtggacacactggagcaagtagaacttattgaccttggggacccggatgcagcagatgtgttcttgccttgcgaagatcctccaccaaccccccagtcgtctggggtggacaaccatttggaggagctgagcctgccggtgcctacatcagacaggaccacatctaggacctcctcctcctcctcctccgactcctccaccaacctgcatagcccaaatccaagtgatgatggagcagatacgcccttggcacagtcggatgaagaggaggaaaggggtgatggaggggcagagcctggagcctgcagctagcagtgggcccctgcctacagactgaccacgctggctattctccacatgagaccacaggcccagccagagcctgtcgggagaagaccagactctttacttgcagtaggcaccagaggtgggaaggatggtgggattgtgtacctttctaagaattaaccctctcctgctttactgctaattttttcctgctgcaaccctcccaccagtttttggcttactcctgagatatgatttgcaaatgaggagagagaagatgaggttggacaagatgccactgcttttcttagcactcttccctcccctaaaccatcccgtagtcttctaatacagtctctcagacaagtgtctctagatggaagcgtcgcgcatggggatcctctag

SEQ ID NO: 356308 - DNA, 887 bp, Homo sapiens
  misc_feature (73)..(73): n is a, c, g, or t
atggggtaaccgttcgtacgagaatcgctgtcctctccttgcggccgccagtgtggtggaattcgacgccgancccccataggtagtatctcatccatggaagtgaatgtggacacactggagcaagtagaacttattgaccttggggacccggatgcagcagatgtgttcttgccttgcgaagatcctccaccaaccccccagtcgtctggggtggacaaccatttggaggagctgagcctgccggtgcctacatcagacaggaccacatctaggacctcctcctcctcctcctccgactcctccaccaacctgcatagcccaaatccaagtgatgatggagcagatacgcccttggcacagtcggatgaagaggaggaaaggggtgatggaggggcagagcctggagcctgcagctagcagtgggcccctgcctacagactgaccacgctggctattctccacatgagaccacaggcccagccagagcctgtcgggagaagaccagactctttacttgcagtaggcaccagaggtgggaaggatggtgggattgtgtacctttctaagaattaaccctctcctgctttactgctaattttttcctgctgcaaccctcccaccagtttttggcttactcctgagatatgatttgcaaatgaggagagagaagatgaggttggacaagatgccactgcttttcttagcactcttccctcccctaaaccatcccgtagtcttctaatacagtctctcagacaagtgtctctagatggatgtgaactccttaactcatcaagtaaggtggtactcaagccatgctgcctccttacatcctttttggaacagagcacggtataaataataaactaataataatatgccaa

SEQ ID NO: 356309 - DNA, 1540 bp, Homo sapiens
ttttgaaggatgggaaggggtgggctgcagcactggaggaagggaaccctccaccctgagatctctgtctctatcctatcctgtccctggccttctgaggcaagcggggccaattaaggggaaaacgtacctcctccatttgtgctgaaccaatccctccaacccctctcaggagggcatgatatggagagttgggcattggctgtgttccctgaatacagagtatctctcttgtggtgcctggaactggcatcccctttgtggagcttagggcaagccccgcctctgcatgagacttggtttgtgggacacacttggtttcagggaaggggaaagaggtcaccaagggcagaggtgtccaggccggagccaggggccccactgttgggatgctggctgcagtggggcgccccaagcccaggtcccctctgtcttctctttcgactttgcagctgtacttgttttgctcctctacccgcaggagctgacatggacccaaatcctcgggccgccctggagcgccagcagctccgccttcgggagcggcaaaaattcttcgaggacattttacagccagagacagagtttgtctttcctctgtcccatctgcatctcgagtcgcagagaccccccataggtagtatctcatccatggaagtgaatgtggacacactggagcaagtagaacttattgaccttggggacccggatgcagcagatgtgttcttgccttgcgaagatcctccaccaaccccccagtcgtctggtatgcccctctgctttggggacttcagtgccagtcagccagagccggatgtcaggctctgaaacgaggctacaaggctgggctggggaagtacacaagggtggacaaccatttggaggagctgagcctgccggtgcctacatcagacaggaccacatctaggacctcctcctcctcctcctccgactcctccaccaacctgcatagcccaaatccaagtgatgatggagcagatacgcccttggcacagtcggatgaagaggaggaaaggggtgatggaggggcagagcctggagcctgcagctagcagtgggcccctgcctacagactgaccacgctggctattctccacatgagaccacaggcccagccagagcctgtcgggagaagaccagactctttacttgcagtaggcaccagaggtgggaaggatggtgggattgtgtacctttctaagaattaaccctctcctgctttactgctaattttttcctgctgcaaccctcccaccagtttttggcttactcctgagatatgatttgcaaatgaggagagagaagatgaggttggacaagatgccactgcttttcttagcactcttccctcccctaaaccatcccgtagtcttctaatacagtctctcagacaagtgtctctagatggatgtgaactccttaactcatcaagtaaggtggtactcaagccatgctgcctccttacatcctttttggaacagagcacggtataaataataaactaataataatatgccaa

SEQ ID NO: 356310 - DNA, 1572 bp, Homo sapiens
cgagtgtggccaagggtgccggaggcagggttcgggtgcgtagtcgttgcgtgggcgctgcccaaaaggcgcagagcatcaagtgtgcgtgggcagaaccggcgcgggcgcccgccgcgggtctgcgcggggcgggggcgcagcaagtgcatccgagcgagcggagactagcgcaccggcgtcggtggcgagggtggtgcagaggagtccggctgggcggagggaggaaggatgggtgcgggtaactttttgaccgccttggaagtaccagtagccgcgctcgcaggggctgcctccgaccgccgggcgagctgcgagcgagtgagcccgccaccgcccctcccccacttccgcctcccgagcctcttcctcgttcccggctcccagggccgtcggtcccccgggagccctggaggcgcagccccaccccggccggcgcggctcgctcccacgcccccgccgcggcctcgctggagcggacggactgagtcagagggggcgccagcgctgcaggagctgacatggacccaaatcctcgggccgccctggagcgccagcagctccgccttcgggagcggcaaaaattcttcgaggacattttacagccagagacagagtttgtctttcctctgtcccatctgcatctcgagtcgcagagaccccccataggtagtatctcatccatggaagtgaatgtggacacactggagcaagtagaacttattgaccttggggacccggatgcagcagatgtgttcttgccttgcgaagatcctccaccaaccccccagtcgtctggtatgcccctctgctttggggacttcagtgccagtcagccagagccggatgtcaggctctgaaacgaggctacaaggctgggctggggaagtacacaagggtggacaaccatttggaggagctgagcctgccggtgcctacatcagacaggaccacatctaggacctcctcctcctcctcctccgactcctccaccaacctgcatagcccaaatccaagtgatgatggagcagatacgcccttggcacagtcggatgaagaggaggaaaggggtgatggaggggcagagcctggagcctgcagctagcagtgggcccctgcctacagactgaccacgctggctattctccacatgagaccacaggcccagccagagcctgtcgggagaagaccagactctttacttgcagtaggcaccagaggtgggaaggatggtgggattgtgtacctttctaagaattaaccctctcctgctttactgctaattttttcctgctgcaaccctcccaccagtttttggcttactcctgagatatgatttgcaaatgaggagagagaagatgaggttggacaagatgccactgcttttcttagcactcttccctcccctaaaccatcccgtagtcttctaatacagtctctcagacaagtgtctctagatggatgtgaactccttaactcatcaagtaaggtggtactcaagccatgctgcctccttacatcctttttggaacagagcacggtataaataataaactaataataatatgccaa

SEQ ID NO: 356311 - DNA, 715 bp, Homo sapiens
gccctgtttgtggcctgaccagcttttctctctgggcaggggtggacaaccatttggaggagctgagcctgccggtgcctacatcagacaggaccacatctaggacctcctcctcctcctcctccgactcctccaccaacctgcatagcccaaatccaagtgatgatggagcagatacgcccttggcacagtcggatgaagaggaggaaaggggtgatggaggggcagagcctggagcctgcagctagcagtgggcccctgcctacagactgaccacgctggctattctccacatgagaccacaggcccagccagagcctgtcgggagaagaccagactctttacttgcagtaggcaccagaggtgggaaggatggtgggattgtgtacctttctaagaattaaccctctcctgctttactgctaattttttcctgctgcaaccctcccaccagtttttggcttactcctgagatatgatttgcaaatgaggagagagaagatgaggttggacaagatgccactgcttttcttagcactcttccctcccctaaaccatcccgtagtcttctaatacagtctctcagacaagtgtctctagatggatgtgaactccttaactcatcaagtaaggtggtactcaagccatgctgcctccttacatcctttttggaacagagcacggtataaataataaactaataataatatgccaa

SEQ ID NO: 356312 - DNA, 2650 bp, Homo sapiens
ccgggcggggcgacgttgccatggagacaggccgctggctgaggcccggctcgtgtccctgcagggcatggcgggtcagttccgcagctacgtgtgggacccgctgctgatcctgtcgcagatcgtcctcatgcagaccgtgtattacggctcgctgggcctgtggctggcgctggtggacgggctagtgcgaagcagcccctcgctggaccagatgttcgacgccgagatcctgggcttttccacccctccaggccggctctccatgatgtccttcatcctcaacgccctcacctgtgccctgggcttgctgtacttcatccggcgaggaaagcagtgtctggatttcactgtcactgtccatttctttcacctcctgggctgctggttctacagctcccgtttcccctcggcgctgacctggtggctggtccaagccgtgtgcattgcactcatggctgtcatcggggagtacctgtgcatgcggacggagctcaaggagatacccctcaactcagcccctaaatccaatgtctagaatcaggccctttggacatcctgctgacacttgggccccttaacaccttgggctgctcagaccctccagatgaggtccagcccagatctgagaggaaccctggaaatgtgaagtctctgttggtgtgggagagatagtgagggcctgtcaaagaaggcaggtagcagtcagcatgacagctgcaagaatgacctctgtctgttgaagccttggtatctgagaggtcaggaaggggacctctttgagggtaataacagaattggaaccatgccactcttgagccacaatacctgtcaccagcctgttgttttaagagagaaaaaaaatcaaggatatctgattggagcaaaccacttctttagtcatctgtcttacccccctgggacagctgttacctttgcagtgttgccgaatcacagcagttacctttgcagtgttgccgaatcacagcagttctgttggagaaacgcttggtttccggatccagagccacagaaagaaatgtaggtgtgaagtattaggctgctgtcagggagaggatggcagatggaggcatcaagcacaaggaaaatgcacaacctgtgccctgttatacacacgttcatgtgcacccaagaacctatgactttcttccagttccttctaccaggtccccatcctgctgccagctctcaacatagcaggccataggacccagagaagaatcccagcgttgctcaaagtctaaccatcataaagacactgcctgtcttctaggaatgaccaggcacccagctcccactggactccaattttttttcctgccttatttagaattctttggcgggaagggtatgatgggttcccagagacaagaagcccaaccttctggcctgggctgtgctgatagtgctgagggagataggaatttgctgctaagatttttctttggggtggagtttcctctgtgaggggcttgcagctatccttcctgtgtatacaaatacagtattttccatggttctgcctgcacttactttgtaatgccacggttgagattgagagagatcagcgcagccaggcaagggaactttaaagaattattaggccaccttctccctttcctggaccccagagtcattcctccatttggttaaaatactcagtgcagggaactcttacatcctgtctccttcacttgcagcgtcccctgctatgcctcaggtgaaccacataattcttgggtttccgttcctacttgctagtgatttctgaacatgttcaatggagcggcacacagtctagacccacttccgcattgaaaccttcactgttcctctttggtttcttcagagctttcccaagagagctgtcagttttcagctgtcagtaacacaaatgagtttatggtaacacaaatgagttttgctatctctctgagaagctcatctgacctcctgactctcagccctacagagtagggagttgatgctgacaggatgaaggtttaggaataaatatgcctgggaagagactgggaaggttctagggtgaggcacctcagtaactcatggtaccttggccaagttggaaggaagcagtttgttaatgaggcacagtaatcctggctgcagggtctaggaggtaagaccagctgggatgaccttccctgggttaatcaatttccctctagacaacacaaactgcaggcatgtgactaactttgaaagaacacccatcatgtggctgctgtcacccttgaccagccgtggtggtggttactccatctgtggttggagcgcctctttgggattcacttcaaggtcttgtgcctatttttctgcatatcttctgtgatgacaaatctctgtcccctgagtgttaatttgatttttagaaatggccaaaagtaacgtgatccaaactttttttcagtaatatggagactgagctgcatggtagttggggatcaaaaatatgtgaccttaatgagatttttatgatttctaaagtaacaataaaagcagtttttagagttgagttccagagagggcagggcaatggcagtgacatgtttgtcattttaataataaataacatctattgagtgcttaagaggtgtccagcagtgtg

SEQ ID NO: 356313 - DNA, 2822 bp, Homo sapiens
catgtgctcagttcgctatccggcaggtcttgtacctggttcaggaggttcaggcagaggttgcacccactacgcctgcgcaacctcagccccgcccctccgctgctttccccggaaacgtttctttcctgttctttcctacgcagccgctcctgccgccgtggtcgctggagctttgcctctctaggccggcagcgcctctcctccatggtcctgtctgtcagcgctgttttgggagcccgccggtgaggccgggccacgctcagacacttcgatcgtcgagtctgtcactgatcgtcctcatgcagaccgtgtattacggctcgctgggcctgtggctggcgctggtggacgggctagtgcgaagcagcccctcgctggaccagatgttcgacgccgagatcctgggcttttccacccctccaggccggctctccatgatgtccttcatcctcaacgccctcacctgtgccctgggcttgctgtacttcatccggcgaggaaagcagtgtctggatttcactgtcactgtccatttctttcacctcctgggctgctggttctacagctcccgtttcccctcggcgctgacctggtggctggtccaagccgtgtgcattgcactcatggctgtcatcggggagtacctgtgcatgcggacggagctcaaggagatacccctcaactcagcccctaaatccaatgtctagaatcaggccctttggacatcctgctgacacttgggccccttaacaccttgggctgctcagaccctccagatgaggtccagcccagatctgagaggaaccctggaaatgtgaagtctctgttggtgtgggagagatagtgagggcctgtcaaagaaggcaggtagcagtcagcatgacagctgcaagaatgacctctgtctgttgaagccttggtatctgagaggtcaggaaggggacctctttgagggtaataacagaattggaaccatgccactcttgagccacaatacctgtcaccagcctgttgttttaagagagaaaaaaaatcaaggatatctgattggagcaaaccacttctttagtcatctgtcttacccccctgggacagctgttacctttgcagtgttgccgaatcacagcagttacctttgcagtgttgccgaatcacagcagttctgttggagaaacgcttggtttccggatccagagccacagaaagaaatgtaggtgtgaagtattaggctgctgtcagggagaggatggcagatggaggcatcaagcacaaggaaaatgcacaacctgtgccctgttatacacacgttcatgtgcacccaagaacctatgactttcttccagttccttctaccaggtccccatcctgctgccagctctcaacatagcaggccataggacccagagaagaatcccagcgttgctcaaagtctaaccatcataaagacactgcctgtcttctaggaatgaccaggcacccagctcccactggactccaattttttttcctgccttatttagaattctttggcgggaagggtatgatgggttcccagagacaagaagcccaaccttctggcctgggctgtgctgatagtgctgagggagataggaatttgctgctaagatttttctttggggtggagtttcctctgtgaggggcttgcagctatccttcctgtgtatacaaatacagtattttccatggttctgcctgcacttactttgtaatgccacggttgagattgagagagatcagcgcagccaggcaagggaactttaaagaattattaggccaccttctccctttcctggaccccagagtcattcctccatttggttaaaatactcagtgcagggaactcttacatcctgtctccttcacttgcagcgtcccctgctatgcctcaggtgaaccacataattcttgggtttccgttcctacttgctagtgatttctgaacatgttcaatggagcggcacacagtctagacccacttccgcattgaaaccttcactgttcctctttggtttcttcagagctttcccaagagagctgtcagttttcagctgtcagtaacacaaatgagtttatggtaacacaaatgagttttgctatctctctgagaagctcatctgacctcctgactctcagccctacagagtagggagttgatgctgacaggatgaaggtttaggaataaatatgcctgggaagagactgggaaggttctagggtgaggcacctcagtaactcatggtaccttggccaagttggaaggaagcagtttgttaatgaggcacagtaatcctggctgcagggtctaggaggtaagaccagctgggatgaccttccctgggttaatcaatttccctctagacaacacaaactgcaggcatgtgactaactttgaaagaacacccatcatgtggctgctgtcacccttgaccagccgtggtggtggttactccatctgtggttggagcgcctctttgggattcacttcaaggtcttgtgcctatttttctgcatatcttctgtgatgacaaatctctgtcccctgagtgttaatttgatttttagaaatggccaaaagtaacgtgatccaaactttttttcagtaatatggagactgagctgcatggtagttggggatcaaaaatatgtgaccttaatgagatttttatgatttctaaagtaacaataaaagcagtttttagagttgagttccagagagggcagggcaatggcagtgacatgtttgtcattttaataataaataacatctattgagtgcttaagaggtgtccagcagtgtg

SEQ ID NO: 356314 - DNA, 2494 bp, Homo sapiens
  misc_feature (73)..(73): n is a, c, g, or t
atggggtaaccgttcgtacgagaatcgctgtcctctccttgcggccgccagtgtggtggaattcgacgccganatcctgggcttttccacccctccaggccggctctccatgatgtccttcatcctcaacgccctcacctgtgccctgggcttgctgtacttcatccggcgaggaaagcagtgtctggatttcactgtcactgtccatttctttcacctcctgggctgctggttctacagctcccgtttcccctcggcgctgacctggtggctggtccaagccgtgtgcattgcactcatggctgtcatcggggagtacctgtgcatgcggacggagctcaaggagatacccctcaactcagcccctaaatccaatgtctagaatcaggccctttggacatcctgctgacacttgggccccttaacaccttgggctgctcagaccctccagatgaggtccagcccagatctgagaggaaccctggaaatgtgaagtctctgttggtgtgggagagatagtgagggcctgtcaaagaaggcaggtagcagtcagcatgacagctgcaagaatgacctctgtctgttgaagccttggtatctgagaggtcaggaaggggacctctttgagggtaataacagaattggaaccatgccactcttgagccacaatacctgtcaccagcctgttgttttaagagagaaaaaaaatcaaggatatctgattggagcaaaccacttctttagtcatctgtcttacccccctgggacagctgttacctttgcagtgttgccgaatcacagcagttacctttgcagtgttgccgaatcacagcagttctgttggagaaacgcttggtttccggatccagagccacagaaagaaatgtaggtgtgaagtattaggctgctgtcagggagaggatggcagatggaggcatcaagcacaaggaaaatgcacaacctgtgccctgttatacacacgttcatgtgcacccaagaacctatgactttcttccagttccttctaccaggtccccatcctgctgccagctctcaacatagcaggccataggacccagagaagaatcccagcgttgctcaaagtctaaccatcataaagacactgcctgtcttctaggaatgaccaggcacccagctcccactggactccaattttttttcctgccttatttagaattctttggcgggaagggtatgatgggttcccagagacaagaagcccaaccttctggcctgggctgtgctgatagtgctgagggagataggaatttgctgctaagatttttctttggggtggagtttcctctgtgaggggcttgcagctatccttcctgtgtatacaaatacagtattttccatggttctgcctgcacttactttgtaatgccacggttgagattgagagagatcagcgcagccaggcaagggaactttaaagaattattaggccaccttctccctttcctggaccccagagtcattcctccatttggttaaaatactcagtgcagggaactcttacatcctgtctccttcacttgcagcgtcccctgctatgcctcaggtgaaccacataattcttgggtttccgttcctacttgctagtgatttctgaacatgttcaatggagcggcacacagtctagacccacttccgcattgaaaccttcactgttcctctttggtttcttcagagctttcccaagagagctgtcagttttcagctgtcagtaacacaaatgagtttatggtaacacaaatgagttttgctatctctctgagaagctcatctgacctcctgactctcagccctacagagtagggagttgatgctgacaggatgaaggtttaggaataaatatgcctgggaagagactgggaaggttctagggtgaggcacctcagtaactcatggtaccttggccaagttggaaggaagcagtttgttaatgaggcacagtaatcctggctgcagggtctaggaggtaagaccagctgggatgaccttccctgggttaatcaatttccctctagacaacacaaactgcaggcatgtgactaactttgaaagaacacccatcatgtggctgctgtcacccttgaccagccgtggtggtggttactccatctgtggttggagcgcctctttgggattcacttcaaggtcttgtgcctatttttctgcatatcttctgtgatgacaaatctctgtcccctgagtgttaatttgatttttagaaatggccaaaagtaacgtgatccaaactttttttcagtaatatggagactgagctgcatggtagttggggatcaaaaatatgtgaccttaatgagatttttatgatttctaaagtaacaataaaagcagtttttagagttgagttccagagagggcagggcaatggcagtgacatgtttgtcattttaataataaataacatctattgagtgcttaagaggtgtccagcagtgtg

SEQ ID NO: 356315 - DNA, 1066 bp, Homo sapiens
ctggaacaacttacttcccgtctttccacttcagagagggggaacctaggatcaatgaagttgatgggttttcgtctgctggagtaggaataagttctttcctacgcagccgctcctgccgccgtggtcgctggagctttgcctctctaggccggcagcgcctctcctccatggtcctgtctgtcagcgctgttttgggagcccgccggtgaggccgggccacgctcagacacttcgatcgtcgagtctgtcactgggcatggcgggtcagttccgcagctacgtgtgggacccgctgctgatcctgtcgcagatcgtcctcatgcagaccgtgtattacggctcgctgggcctgtggctggcgctggtggacgggctagtgcgaagcagcccctcgctggaccagatgttcgacgccgagatcctgggcttttccacccctccaggccggctctccatgatgtccttcatcctcaacgccctcacctgtgccctgggcttgctgtacttcatccggcgaggaaagcagtgtctggatttcactgtcactgtccatttctttcacctcctgggctgctggttctacagctcccgtttcccctcggcgctgacctggtggctggtccaagccgtgtgcattgcactcatggctgtcatcggggagtacctgtgcatgcggacggagctcaaggagatacccctcaactcagcccctaaatccaatgtctagaatcaggccctttggacatcctgctgacacttgggccccttaacaccttgggctgctcagaccctccagatgaggtccagcccagatctgagaggaaccctggaaatgtgaagtctctgttggtgtgggagagatagtgagggcctgtcaaagaaggcaggtagcagtcagcatgacagctgcaagaatgacctctgtctgttgaagccttggtatctgagaggtcaggaaggggacctctttgagggtaataacagaattggaaccatgccactcttgagccacaatacctgtcaccagcctgcaccgcacgattcccttagcaccagcacgagt

SEQ ID NO: 356316 - DNA, 1943 bp, Homo sapiens
catgtgctcagttcgctatccggcaggtcttgtacctggttcaggaggttcaggcagaggttgcacccactacgcctgcgcaacctcagccccgcccctccgctgctttccccggaaacgtttctttcctgttctttcctacgcagccgctcctgccgccgtggtcgctggagctttgcctctctaggccggcagcgcctctcctccatggtcctgtctgtcagcgctgttttgggagcccgccggtgaggccgggccacgctcagacacttcgatcgtcgagtctgtcactgggcatggcgggtcagttccgcagctacgtgtgggacccgctgctgatcctgtcgcagatcgtcctcatgcagaccgtgtattacggctcgctgggcctgtggctggcgctggtggacgggctagtgcgaagcagcccctcgctggaccagatgttcgacgccgagatcctgggcttttccacccctccaggccggctctccatgatgtccttcatcctcaacgccctcacctgtgccctgggcttgctgtacttcatccggcgaggaaagcagtgtctggatttcactgtcactgtccatttctttcacctcctgggctgctggttctacagctcccgtttcccctcggcgctgacctggtggctggtccaagccgtgtgcattgcactcatggctgtcatcggggagtacctgtgcatgcggacggagctcaaggagataggaatttgctgctaagatttttctttggggtggagtttcctctgtgaggggcttgcagctatccttcctgtgtatacaaatacagtattttccatggttctgcctgcacttactttgtaatgccacggttgagattgagagagatcagcgcagccaggcaagggaactttaaagaattattaggccaccttctccctttcctggaccccagagtcattcctccatttggttaaaatactcagtgcagggaactcttacatcctgtctccttcacttgcagcgtcccctgctatgcctcaggtgaaccacataattcttgggtttccgttcctacttgctagtgatttctgaacatgttcaatggagcggcacacagtctagacccacttccgcattgaaaccttcactgttcctctttggtttcttcagagctttcccaagagagctgtcagttttcagctgtcagtaacacaaatgagtttatggtaacacaaatgagttttgctatctctctgagaagctcatctgacctcctgactctcagccctacagagtagggagttgatgctgacaggatgaaggtttaggaataaatatgcctgggaagagactgggaaggttctagggtgaggcacctcagtaactcatggtaccttggccaagttggaaggaagcagtttgttaatgaggcacagtaatcctggctgcagggtctaggaggtaagaccagctgggatgaccttccctgggttaatcaatttccctctagacaacacaaactgcaggcatgtgactaactttgaaagaacacccatcatgtggctgctgtcacccttgaccagccgtggtggtggttactccatctgtggttggagcgcctctttgggattcacttcaaggtcttgtgcctatttttctgcatatcttctgtgatgacaaatctctgtcccctgagtgttaatttgatttttagaaatggccaaaagtaacgtgatccaaactttttttcagtaatatggagactgagctgcatggtagttggggatcaaaaatatgtgaccttaatgagatttttatgatttctaaagtaacaataaaagcagtttttagagttgagttccagagagggcagggcaatggcagtgacatgtttgtcattttaataataaataacatctattgagtgcttaagaggtgtccagcagtgtg

SEQ ID NO: 356317 - DNA, 1843 bp, Homo sapiens
catgtgctcagttcgctatccggcaggtcttgtacctggttcaggaggttcaggcagaggttgcacccactacgcctgcgcaacctcagccccgcccctccgctgctttccccggaaacgtttctttcctgttctttcctacgcagccgctcctgccgccgtggtcgctggagctttgcctctctaggccggcagcgcctctcctccatggtcctgtctgtcagcgctgttttgggagcccgccggtgaggccgggccacgctcagacacttcgatcgtcgagtctgtcactgggcatggcgggtcagttccgcagctacgtgtgggacccgctgctgatcctgtcgcagatcgtcctcatgcagaccgtgtattacggctcgctgggcctgctgccagctctcaacatagcaggccataggacccagagaagaatcccagcgttgctcaaagtctaaccatcataaagacactgcctgtcttctaggaatgaccaggcacccagctcccactggactccaattttttttcctgccttatttagaattctttggcgggaagggtatgatgggttcccagagacaagaagcccaaccttctggcctgggctgtgctgatagtgctgagggagataggaatttgctgctaagatttttctttggggtggagtttcctctgtgaggggcttgcagctatccttcctgtgtatacaaatacagtattttccatggttctgcctgcacttactttgtaatgccacggttgagattgagagagatcagcgcagccaggcaagggaactttaaagaattattaggccaccttctccctttcctggaccccagagtcattcctccatttggttaaaatactcagtgcagggaactcttacatcctgtctccttcacttgcagcgtcccctgctatgcctcaggtgaaccacataattcttgggtttccgttcctacttgctagtgatttctgaacatgttcaatggagcggcacacagtctagacccacttccgcattgaaaccttcactgttcctctttggtttcttcagagctttcccaagagagctgtcagttttcagctgtcagtaacacaaatgagtttatggtaacacaaatgagttttgctatctctctgagaagctcatctgacctcctgactctcagccctacagagtagggagttgatgctgacaggatgaaggtttaggaataaatatgcctgggaagagactgggaaggttctagggtgaggcacctcagtaactcatggtaccttggccaagttggaaggaagcagtttgttaatgaggcacagtaatcctggctgcagggtctaggaggtaagaccagctgggatgaccttccctgggttaatcaatttccctctagacaacacaaactgcaggcatgtgactaactttgaaagaacacccatcatgtggctgctgtcacccttgaccagccgtggtggtggttactccatctgtggttggagcgcctctttgggattcacttcaaggtcttgtgcctatttttctgcatatcttctgtgatgacaaatctctgtcccctgagtgttaatttgatttttagaaatggccaaaagtaacgtgatccaaactttttttcagtaatatggagactgagctgcatggtagttggggatcaaaaatatgtgaccttaatgagatttttatgatttctaaagtaacaataaaagcagtttttagagttgagttccagagagggcagggcaatggcagtgacatgtttgtcattttaataataaataacatctattgagtgcttaagaggtgtccagcagtgtg

SEQ ID NO: 356318 - DNA, 1639 bp, Homo sapiens
ctctcttaccgccatcttggctcctgtggaggcctgctgggaacgggacttctaaaaggaactatgtctggaaggctgtggtccaaggccatttttgctggctataagcggggtctccggaaccaaagggagcacacagctcttcttaaaattgaaggtgtttacgcccgagatgaaacagaattctatttgggcaagagatgcgcttatgtatataaagcaaagaacaacacagtcactcctggcggcaaaccaaacaaaaccagagtcatctggggaaaagtaactcgggcccatggaaacagtggcatggttcgtgccaaattccgaagcaatcttcctgctaaggccattggacacagaatccgagtgatgctgtacccctcaaggatttaaactaacgaaaaatcaataaataaatgtggatttgtgctcttgtatttttaagtggattaaaaaacttactaccttaaaaaaaaaaaaaaaaaaaaaaaaaaaaaaaaaaaaaaaaaaaaaaaaaaaaaaaaaaaaaaaaaaaaaaaaaaaaaaaaaaaaaaacggtcccccgggagccctggaggcgcagccccaccccggccggcgcggctcgctcccacgcccccgccgcggcctcgctggagcggacggactgagtcagagggggcgccagcgctgcaggagctgacatggacccaaatcctcgggccgccctggagcgccagcagctccgccttcgggagcggcaaaaattcttcgaggacattttacagccagagacagagtttgtctttcctctgtcccatctgcatctcgagtcgcagagaccccccataggtagtatctcatccatggaagtgaatgtggacacactggagcaagtagaacttattgaccttggggacccggatgcagcagatgtgttcttgccttgcgaagatcctccaccaaccccccagtcgtctggggtggacaaccatttggaggagctgagcctgccggtgcctacatcagacaggaccacatctaggacctcctcctcctcctcctccgactcctccaccaacctgcatagcccaaatccaagtgatgatggagcagatacgcccttggcacagtcggatgaagaggaggaaaggggtgatggaggggcagagcctggagcctgcagctagcagtgggcccctgcctacagactgaccacgctggctattctccacatgagaccacaggcccagccagagcctgtcgggagaagaccagactctttacttgcagtaggcaccagaggtgggaaggatggtgggattgtgtacctttctaagaattaaccctctcctgctttactgctaattttttcctgctgcaaccctcccaccagtttttggcttactcctgagatatgatttgcaaatgaggagagagaagatgaggttggacaagatgccactgcttttcttagcactcttccctcccctaaaccatcccgtagtcttctaatacagtctctcagacaagtgtctctagatggatgtgaactccttaactcatcaagtaaggtggtactcaagccatgctgcctccttacatcctttttggaacagagcacggtataaataataaactaataataatatgccaa

SEQ ID NO: 356319 - DNA, 1260 bp, Homo sapiens
ttttgaaggatgggaaggggtgggctgcagcactggaggaagggaaccctccaccctgagatctctgtctctatcctatcctgtccctggccttctgaggcaagcggggccaattaaggggaaaacgtacctcctccatttgtgctgaaccaatccctccaacccctctcaggagggcatgatatggagagttgggcattggctgtgttccctgaatacagagtatctctcttgtggtgcctggaactggcatcccctttgtggagcttagggcaagccccgcctctgcatgagacttggagctgacatggacccaaatcctcgggccgccctggagcgccagcagctccgccttcgggagcggcaaaaattcttcgaggacattttacagccagagacagagtttgtctttcctctgtcccatctgcatctcgagtcgcagagaccccccataggtagtatctcatccatggaagtgaatgtggacacactggagcaagtagaacttattgaccttggggacccggatgcagcagatgtgttcttgccttgcgaagatcctccaccaaccccccagtcgtctggggtggacaaccatttggaggagctgagcctgccggtgcctacatcagacaggaccacatctaggacctcctcctcctcctcctccgactcctccaccaacctgcatagcccaaatccaagtgatgatggagcagatacgcccttggcacagtcggatgaagaggaggaaaggggtgatggaggggcagagcctggagcctgcagctagcagtgggcccctgcctacagactgaccacgctggctattctccacatgagaccacaggcccagccagagcctgtcgggagaagaccagactctttacttgcagtaggcaccagaggtgggaaggatggtgggattgtgtacctttctaagaattaaccctctcctgctttactgctaattttttcctgctgcaaccctcccaccagtttttggcttactcctgagatatgatttgcaaatgaggagagagaagatgaggttggacaagatgccactgcttttcttagcactcttccctcccctaaaccatcccgtagtcttctaatacagtctctcagacaagtgtctctagatggatgtgaactccttaactcatcaagtaaggtggtactcaagccatgctgcctccttacatcctttttggaacagagcacggtataaataataaactaataataatatgccaa

SEQ ID NO: 356320 - DNA, 1442 bp, Homo sapiens
ttttgaaggatgggaaggggtgggctgcagcactggaggaagggaaccctccaccctgagatctctgtctctatcctatcctgtccctggccttctgaggcaagcggggccaattaaggggaaaacgtacctcctccatttgtgctgaaccaatccctccaacccctctcaggagggcatgatatggagagttgggcattggctgtgttccctgaatacagagtatctctcttgtggtgcctggaactggcatcccctttgtggagcttagggcaagccccgcctctgcatgagacttggtttgtgggacacacttggtttcagggaaggggaaagaggtcaccaagggcagaggtgtccaggccggagccaggggccccactgttgggatgctggctgcagtggggcgccccaagcccaggtcccctctgtcttctctttcgactttgcagctgtacttgttttgctcctctacccgcaggagctgacatggacccaaatcctcgggccgccctggagcgccagcagctccgccttcgggagcggcaaaaattcttcgaggacattttacagccagagacagagtttgtctttcctctgtcccatctgcatctcgagtcgcagagaccccccataggtagtatctcatccatggaagtgaatgtggacacactggagcaagtagaacttattgaccttggggacccggatgcagcagatgtgttcttgccttgcgaagatcctccaccaaccccccagtcgtctggggtggacaaccatttggaggagctgagcctgccggtgcctacatcagacaggaccacatctaggacctcctcctcctcctcctccgactcctccaccaacctgcatagcccaaatccaagtgatgatggagcagatacgcccttggcacagtcggatgaagaggaggaaaggggtgatggaggggcagagcctggagcctgcagctagcagtgggcccctgcctacagactgaccacgctggctattctccacatgagaccacaggcccagccagagcctgtcgggagaagaccagactctttacttgcagtaggcaccagaggtgggaaggatggtgggattgtgtacctttctaagaattaaccctctcctgctttactgctaattttttcctgctgcaaccctcccaccagtttttggcttactcctgagatatgatttgcaaatgaggagagagaagatgaggttggacaagatgccactgcttttcttagcactcttccctcccctaaaccatcccgtagtcttctaatacagtctctcagacaagtgtctctagatggatgtgaactccttaactcatcaagtaaggtggtactcaagccatgctgcctccttacatcctttttggaacagagcacggtataaataataaactaataataatatgccaa

SEQ ID NO: 356321 - DNA, 2842 bp, Homo sapiens
ctggaacaacttacttcccgtctttccacttcagagagggggaacctaggatcaatgaagttgatgggttttcgtctgctggagtaggaataagttctttcctacgcagccgctcctgccgccgtggtcgctggagctttgcctctctaggccggcagcgcctctcctccatggtcctgtctgtcagcgctgttttgggagcccgccggtgaggccgggccacgctcagacacttcgatcgtcgagtctgtcactgggcatggcgggtcagttccgcagctacgtgtgggacccgctgctgatcctgtcgcagatcgtcctcatgcagaccgtgtattacggctcgctgggcctgtggctggcgctggtggacgggctagtgcgaagcagcccctcgctggaccagatgttcgacgccgagatcctgggcttttccacccctccaggccggctctccatgatgtccttcatcctcaacgccctcacctgtgccctgggcttgctgtacttcatccggcgaggaaagcagtgtctggatttcactgtcactgtccatttctttcacctcctgggctgctggttctacagctcccgtttcccctcggcgctgacctggtggctggtccaagccgtgtgcattgcactcatggctgtcatcggggagtacctgtgcatgcggacggagctcaaggagatacccctcaactcagcccctaaatccaatgtctagaatcaggccctttggacatcctgctgacacttgggccccttaacaccttgggctgctcagaccctccagatgaggtccagcccagatctgagaggaaccctggaaatgtgaagtctctgttggtgtgggagagatagtgagggcctgtcaaagaaggcaggtagcagtcagcatgacagctgcaagaatgacctctgtctgttgaagccttggtatctgagaggtcaggaaggggacctctttgagggtaataacagaattggaaccatgccactcttgagccacaatacctgtcaccagcctgttgttttaagagagaaaaaaaatcaaggatatctgattggagcaaaccacttctttagtcatctgtcttacccccctgggacagctgttacctttgcagtgttgccgaatcacagcagttacctttgcagtgttgccgaatcacagcagttctgttggagaaacgcttggtttccggatccagagccacagaaagaaatgtaggtgtgaagtattaggctgctgtcagggagaggatggcagatggaggcatcaagcacaaggaaaatgcacaacctgtgccctgttatacacacgttcatgtgcacccaagaacctatgactttcttccagttccttctaccaggtccccatcctgctgccagctctcaacatagcaggccataggacccagagaagaatcccagcgttgctcaaagtctaaccatcataaagacactgcctgtcttctaggaatgaccaggcacccagctcccactggactccaattttttttcctgccttatttagaattctttggcgggaagggtatgatgggttcccagagacaagaagcccaaccttctggcctgggctgtgctgatagtgctgagggagataggaatttgctgctaagatttttctttggggtggagtttcctctgtgaggggcttgcagctatccttcctgtgtatacaaatacagtattttccatggttctgcctgcacttactttgtaatgccacggttgagattgagagagatcagcgcagccaggcaagggaactttaaagaattattaggccaccttctccctttcctggaccccagagtcattcctccatttggttaaaatactcagtgcagggaactcttacatcctgtctccttcacttgcagcgtcccctgctatgcctcaggtgaaccacataattcttgggtttccgttcctacttgctagtgatttctgaacatgttcaatggagcggcacacagtctagacccacttccgcattgaaaccttcactgttcctctttggtttcttcagagctttcccaagagagctgtcagttttcagctgtcagtaacacaaatgagtttatggtaacacaaatgagttttgctatctctctgagaagctcatctgacctcctgactctcagccctacagagtagggagttgatgctgacaggatgaaggtttaggaataaatatgcctgggaagagactgggaaggttctagggtgaggcacctcagtaactcatggtaccttggccaagttggaaggaagcagtttgttaatgaggcacagtaatcctggctgcagggtctaggaggtaagaccagctgggatgaccttccctgggttaatcaatttccctctagacaacacaaactgcaggcatgtgactaactttgaaagaacacccatcatgtggctgctgtcacccttgaccagccgtggtggtggttactccatctgtggttggagcgcctctttgggattcacttcaaggtcttgtgcctatttttctgcatatcttctgtgatgacaaatctctgtcccctgagtgttaatttgatttttagaaatggccaaaagtaacgtgatccaaactttttttcagtaatatggagactgagctgcatggtagttggggatcaaaaatatgtgaccttaatgagatttttatgatttctaaagtaacaataaaagcagtttttagagttgagttccagagagggcagggcaatggcagtgacatgtttgtcattttaataataaataacatctattgagtgcttaagaggtgtccagcagtgtg

SEQ ID NO: 356322 - DNA, 2787 bp, Homo sapiens
  misc_feature (2)..(2): n is a, c, g, or t
  misc_feature (20)..(20): n is a, c, g, or t
  misc_feature (25)..(25): n is a, c, g, or t
  misc_feature (38)..(38): n is a, c, g, or t
gntaggctaggtagaggccngtgtnaatcggccgaggngttctttcctacgcagccgctcctgccgccgtggtcgctggagctttgcctctctaggccggcagcgcctctcctccatggtcctgtctgtcagcgctgttttgggagcccgccggtgaggccgggccacgctcagacacttcgatcgtcgagtctgtcactgggcatggcgggtcagttccgcagctacgtgtgggacccgctgctgatcctgtcgcagatcgtcctcatgcagaccgtgtattacggctcgctgggcctgtggctggcgctggtggacgggctagtgcgaagcagcccctcgctggaccagatgttcgacgccgagatcctgggcttttccacccctccaggccggctctccatgatgtccttcatcctcaacgccctcacctgtgccctgggcttgctgtacttcatccggcgaggaaagcagtgtctggatttcactgtcactgtccatttctttcacctcctgggctgctggttctacagctcccgtttcccctcggcgctgacctggtggctggtccaagccgtgtgcattgcactcatggctgtcatcggggagtacctgtgcatgcggacggagctcaaggagatacccctcaactcagcccctaaatccaatgtctagaatcaggccctttggacatcctgctgacacttgggccccttaacaccttgggctgctcagaccctccagatgaggtccagcccagatctgagaggaaccctggaaatgtgaagtctctgttggtgtgggagagatagtgagggcctgtcaaagaaggcaggtagcagtcagcatgacagctgcaagaatgacctctgtctgttgaagccttggtatctgagaggtcaggaaggggacctctttgagggtaataacagaattggaaccatgccactcttgagccacaatacctgtcaccagcctgttgttttaagagagaaaaaaaatcaaggatatctgattggagcaaaccacttctttagtcatctgtcttacccccctgggacagctgttacctttgcagtgttgccgaatcacagcagttacctttgcagtgttgccgaatcacagcagttctgttggagaaacgcttggtttccggatccagagccacagaaagaaatgtaggtgtgaagtattaggctgctgtcagggagaggatggcagatggaggcatcaagcacaaggaaaatgcacaacctgtgccctgttatacacacgttcatgtgcacccaagaacctatgactttcttccagttccttctaccaggtccccatcctgctgccagctctcaacatagcaggccataggacccagagaagaatcccagcgttgctcaaagtctaaccatcataaagacactgcctgtcttctaggaatgaccaggcacccagctcccactggactccaattttttttcctgccttatttagaattctttggcgggaagggtatgatgggttcccagagacaagaagcccaaccttctggcctgggctgtgctgatagtgctgagggagataggaatttgctgctaagatttttctttggggtggagtttcctctgtgaggggcttgcagctatccttcctgtgtatacaaatacagtattttccatggttctgcctgcacttactttgtaatgccacggttgagattgagagagatcagcgcagccaggcaagggaactttaaagaattattaggccaccttctccctttcctggaccccagagtcattcctccatttggttaaaatactcagtgcagggaactcttacatcctgtctccttcacttgcagcgtcccctgctatgcctcaggtgaaccacataattcttgggtttccgttcctacttgctagtgatttctgaacatgttcaatggagcggcacacagtctagacccacttccgcattgaaaccttcactgttcctctttggtttcttcagagctttcccaagagagctgtcagttttcagctgtcagtaacacaaatgagtttatggtaacacaaatgagttttgctatctctctgagaagctcatctgacctcctgactctcagccctacagagtagggagttgatgctgacaggatgaaggtttaggaataaatatgcctgggaagagactgggaaggttctagggtgaggcacctcagtaactcatggtaccttggccaagttggaaggaagcagtttgttaatgaggcacagtaatcctggctgcagggtctaggaggtaagaccagctgggatgaccttccctgggttaatcaatttccctctagacaacacaaactgcaggcatgtgactaactttgaaagaacacccatcatgtggctgctgtcacccttgaccagccgtggtggtggttactccatctgtggttggagcgcctctttgggattcacttcaaggtcttgtgcctatttttctgcatatcttctgtgatgacaaatctctgtcccctgagtgttaatttgatttttagaaatggccaaaagtaacgtgatccaaactttttttcagtaatatggagactgagctgcatggtagttggggatcaaaaatatgtgaccttaatgagatttttatgatttctaaagtaacaataaaagcagtttttagagttgagttccagagagggcagggcaatggcagtgacatgtttgtcattttaataataaataacatctattgagtgcttaagaggtgtccagcagtgtg

SEQ ID NO: 356323 - DNA, 1258 bp, Homo sapiens
ccgggcggggcgacgttgccatggagacaggccgctggctgaggcccggctcgtgtccctgcagggcatggcgggtcagttccgcagctacgtgtgggacccgctgctgatcctgtcgcagatcgtcctcatgcagaccgtgtattacggctcgctgggcctgtggctggcgctggtggacgggctagtgcgaagcagcccctcgctggaccagatgttcgacgccgagatcctgggcttttccacccctccaggccggctctccatgatgtccttcatcctcaacgccctcacctggagctgacatggacccaaatcctcgggccgccctggagcgccagcagctccgccttcgggagcggcaaaaattcttcgaggacattttacagccagagacagagtttgtctttcctctgtcccatctgcatctcgagtcgcagagaccccccataggtagtatctcatccatggaagtgaatgtggacacactggagcaagtagaacttattgaccttggggacccggatgcagcagatgtgttcttgccttgcgaagatcctccaccaaccccccagtcgtctggggtggacaaccatttggaggagctgagcctgccggtgcctacatcagacaggaccacatctaggacctcctcctcctcctcctccgactcctccaccaacctgcatagcccaaatccaagtgatgatggagcagatacgcccttggcacagtcggatgaagaggaggaaaggggtgatggaggggcagagcctggagcctgcagctagcagtgggcccctgcctacagactgaccacgctggctattctccacatgagaccacaggcccagccagagcctgtcgggagaagaccagactctttacttgcagtaggcaccagaggtgggaaggatggtgggattgtgtacctttctaagaattaaccctctcctgctttactgctaattttttcctgctgcaaccctcccaccagtttttggcttactcctgagatatgatttgcaaatgaggagagagaagatgaggttggacaagatgccactgcttttcttagcactcttccctcccctaaaccatcccgtagtcttctaatacagtctctcagacaagtgtctctagatggatgtgaactccttaactcatcaagtaaggtggtactcaagccatgctgcctccttacatcctttttggaacagagcacggtataaataataaactaataataatatgccaa

SEQ ID NO: 356324 - DNA, 1320 bp, Homo sapiens
ccgggcggggcgacgttgccatggagacaggccgctggctgaggcccggctcgtgtccctgcagggcatggcgggtcagttccgcagctacgtgtgggacccgctgctgatcctgtcgcagatcgtcctcatgcagaccgtgtattacggctcgctgggcctgtggctggcgctggtggacgggctagtgcgaagcagcccctcgctggaccagatgttcgacgccgagatcctgggcttttccacccctccaggccggctctccatgatgtccttcatcctcaacgccctcacctggcacttctccttgctgctgccacatgaagaaggacgtgtttgcttccccttccaccatgattgagctgacatggacccaaatcctcgggccgccctggagcgccagcagctccgccttcgggagcggcaaaaattcttcgaggacattttacagccagagacagagtttgtctttcctctgtcccatctgcatctcgagtcgcagagaccccccataggtagtatctcatccatggaagtgaatgtggacacactggagcaagtagaacttattgaccttggggacccggatgcagcagatgtgttcttgccttgcgaagatcctccaccaaccccccagtcgtctggggtggacaaccatttggaggagctgagcctgccggtgcctacatcagacaggaccacatctaggacctcctcctcctcctcctccgactcctccaccaacctgcatagcccaaatccaagtgatgatggagcagatacgcccttggcacagtcggatgaagaggaggaaaggggtgatggaggggcagagcctggagcctgcagctagcagtgggcccctgcctacagactgaccacgctggctattctccacatgagaccacaggcccagccagagcctgtcgggagaagaccagactctttacttgcagtaggcaccagaggtgggaaggatggtgggattgtgtacctttctaagaattaaccctctcctgctttactgctaattttttcctgctgcaaccctcccaccagtttttggcttactcctgagatatgatttgcaaatgaggagagagaagatgaggttggacaagatgccactgcttttcttagcactcttccctcccctaaaccatcccgtagtcttctaatacagtctctcagacaagtgtctctagatggatgtgaactccttaactcatcaagtaaggtggtactcaagccatgctgcctccttacatcctttttggaacagagcacggtataaataataaactaataataatatgccaa

SEQ ID NO: 356325 - DNA, 1357 bp, Homo sapiens
ttttgaaggatgggaaggggtgggctgcagcactggaggaagggaaccctccaccctgagatctctgtctctatcctatcctgtccctggccttctgaggcaagcggggccaattaaggggaaaacgtacctcctccatttgtgctgaaccaatccctccaacccctctcaggagggcatgatatggagagttgggcattggctgtgttccctgaatacagagtatctctcttgtggtgcctggaactggcatcccctttgtggagcttagggcaagccccgcctctgcatgagacttggtttgtgggacacacttggtttcagggaaggggaaagaggtcaccaagggcagaggtgtccaggccggagccaggggccccactgttgggatgctggctgcagtggggcgccccaagcccaggtcccctctgtcttctctttcgactttgcagctgtacttgttttgctcctctacccgcaggagctgacatggacccaaatcctcgggccgccctggagcgccagcagctccgccttcgggagcggcaaaaattcttcgaggacattttacagccagagacagagtttgtctttcctctgtcccatctgcatctcgagtcgcagagaccccccataggtagtatctcatccatggaagtgaatgtggacacactggagcaagtagaacttattgaccttggggacccggatgcagcagatgtgttcttgccttgcgaagatcctccaccaaccccccagtcgtctggggtggacaaccatttggaggagctgagcctgccggtgcctacatcagacaggaccacatctaggacctcctcctcctcctcctccgactcctccaccaacctgcatagcccaaatccaagtgatgatggagcagatacgcccttggcacagtcggatgaagaggaggaaaggggtgatggaggggcagagcctggagcctgcagctagcagtgggcccctgcctacagactgaccacgctggctattctccacatgagaccacaggcccagccagagcctgtcgggagaagaccagactctttacttgcagtaggcaccagaggtgggaaggatggtgggattgtgtacctttctaagaattaaccctctcctgctttactgctaattttttcctgctgcaaccctcccaccagtttttggcttactcctgagatatgatttgcaaatgaggagagagaagatgaggttggacaagatgccactgcttttcttagcactcttccctcccctaaaccatcccgtagtcttctaatacagtctctcagacaagtgtctctagatggagcgtcgcgcatgggtaccgagctcg

SEQ ID NO: 356326 - DNA, 1388 bp, Homo sapiens
ttttgaaggatgggaaggggtgggctgcagcactggaggaagggaaccctccaccctgagatctctgtctctatcctatcctgtccctggccttctgaggcaagcggggccaattaaggggaaaacgtacctcctccatttgtgctgaaccaatccctccaacccctctcaggagggcatgatatggagagttgggcattggctgtgttccctgaatacagagtatctctcttgtggtgcctggaactggcatcccctttgtggagcttagggcaagccccgcctctgcatgagacttggtttgtgggacacacttggtttcagggaaggggaaagaggtcaccaagggcagaggtgtccaggccggagccaggggccccactgttgggatgctggctgcagtggggcgccccaagcccaggtcccctctgtcttctctttcgactttgcagctgtacttgttttgctcctctacccgcaggagctgacatggacccaaatcctcgggccgccctggagcgccagcagctccgccttcgggagcggcaccatctgcatctcgagtcgcagagaccccccataggtagtatctcatccatggaagtgaatgtggacacactggagcaagtagaacttattgaccttggggacccggatgcagcagatgtgttcttgccttgcgaagatcctccaccaaccccccagtcgtctggggtggacaaccatttggaggagctgagcctgccggtgcctacatcagacaggaccacatctaggacctcctcctcctcctcctccgactcctccaccaacctgcatagcccaaatccaagtgatgatggagcagatacgcccttggcacagtcggatgaagaggaggaaaggggtgatggaggggcagagcctggagcctgcagctagcagtgggcccctgcctacagactgaccacgctggctattctccacatgagaccacaggcccagccagagcctgtcgggagaagaccagactctttacttgcagtaggcaccagaggtgggaaggatggtgggattgtgtacctttctaagaattaaccctctcctgctttactgctaattttttcctgctgcaaccctcccaccagtttttggcttactcctgagatatgatttgcaaatgaggagagagaagatgaggttggacaagatgccactgcttttcttagcactcttccctcccctaaaccatcccgtagtcttctaatacagtctctcagacaagtgtctctagatggatgtgaactccttaactcatcaagtaaggtggtactcaagccatgctgcctccttacatcctttttggaacagagcacggtataaataataaactaataataatatgccaa

SEQ ID NO: 356327 - DNA, 1737 bp, Homo sapiens
ctggaacaacttacttcccgtctttccacttcagagagggggaacctaggatcaatgaagttgatgggttttcgtctgctggagtaggaataagttctttcctacgcagccgctcctgccgccgtggtcgctggagctttgcctctctaggccggcagcgcctctcctccatggtcctgtctgtcagcgctgttttgggagcccgccggtgaggccgggccacgctcagacacttcgatcgtcgagtctgtcactgggcatggcgggtcagttccgcagctacgtgtgggacccgctgctgatcctgtcgcagatcgtcctcatgcagaccgtgtattacggctcgctgggcctgtggctggcgctggtggacgggctagtgcgaagcagcccctcgctggaccagatgttcgacgccgagatcctgggcttttccacccctccaggccggctctccatgatgtccttcatcctcaacgccctcacctgtgccctgggcttgctgtacttcatccggcgaggaaagcagtgtctggatttcactgtcactgtccatttctttcacctcctgggctgctggttctacagctcccgtttcccctcggcgctgacctggtggctggtccaagccgtgtgcattgcactcatggctgtcatcggggagtacctgtgcatgcggacggagctcaaggagatacccctcaactcagcccctaaatccaatgtctagaatcaggccctttggacatcctgctgacacttgggccccttaacaccttgggctgctcagaccctccagatgaggtccagcccagatctgagaggaaccctggaaatgtgaagtctctgttggtgtgggagagatagtgagggcctgtcaaagaaggcaggtagcagtcagcatgacagctgcaagaatgacctctgtctgttgaagccttggtatctgagaggtcaggaaggggacctctttgagggtaataacagaattggaaccatgccactcttgagccacaatacctgtcaccagcctgttgttttaagagagaaaaaaaatcaaggatatctgattggagcaaaccacttctttagtcatctgtcttacccccctgggacagctgttacctttgcagtgttgccgaatcacagcagttacctttgcagtgttgccgaatcacagcagttctgttggagaaacgcttggtttccggatccagagccacagaaagaaatgtaggtgtgaagtattaggctgctgtcagggagaggatggcagatggaggcatcaagcacaaggaaaatgcacaacctgtgccctgttatacacacgttcatgtgcacccaagaacctatgactttcttccagttccttctaccaggtccccatcctgctgccagctctcaacatagcaggccataggacccagagaagaatcccagcgttgctcaaagtctaaccatcataaagacactgcctgtcttctaggaatgaccaggcacccagctcccactggactccaattttttttcctgccttatttagaattctttggcgggaagggtatgatgggttcccagagacaagaagcccaaccttctggcctgggctgtgctgatagtgctgagggagataggaatttgctgctaagatttttctttggggtggagtttcctctgtcaccgcctcccccatctccatcccgtgctagcctgatcgagctattttccaggcagcag

SEQ ID NO: 356328 - DNA, 1220 bp, Homo sapiens
ccagagccaggaatcaggggcagccgggcgagtcccagggcaggggtcctccgccgccttgcacctgccctgctgggcggcaccgggtcagtgccctgccccctcctgcgggtcccaactctctctttcccatcgtgcgtcctctggagaagtgcgcgcgtgagctgacatggacccaaatcctcgggccgccctggagcgccagcagctccgccttcgggagcggcaaaaattcttcgaggacattttacagccagagacagagtttgtctttcctctgtcccatctgcatctcgagtcgcagagaccccccataggtagtatctcatccatggaagtgaatgtggacacactggagcaagtagaacttattgaccttggggacccggatgcagcagatgtgttcttgccttgcgaagatcctccaccaaccccccagtcgtctggtatgcccctctgctttggggacttcagtgccagtcagccagagccggatgtcaggctctgaaacgaggctacaaggctgggctggggaagtacacaagggtggacaaccatttggaggagctgagcctgccggtgcctacatcagacaggaccacatctaggacctcctcctcctcctcctccgactcctccaccaacctgcatagcccaaatccaagtgatgatggagcagatacgcccttggcacagtcggatgaagaggaggaaaggggtgatggaggggcagagcctggagcctgcagctagcagtgggcccctgcctacagactgaccacgctggctattctccacatgagaccacaggcccagccagagcctgtcgggagaagaccagactctttacttgcagtaggcaccagaggtgggaaggatggtgggattgtgtacctttctaagaattaaccctctcctgctttactgctaattttttcctgctgcaaccctcccaccagtttttggcttactcctgagatatgatttgcaaatgaggagagagaagatgaggttggacaagatgccactgcttttcttagcactcttccctcccctaaaccatcccgtagtcttctaatacagtctctcagacaagtgtctctagatggatgtgaactccttaactcatcaagtaaggtggtactcaagccatgctgcctccttacatcctttttggaacagagcacggtataaataataaactaataataatatgccaa

SEQ ID NO: 356329 - DNA, 1075 bp, Homo sapiens
ctggaacaacttacttcccgtctttccacttcagagagggggaacctaggatcaatgaagttgatgggttttcgtctgctggagtaggaataagttctttcctacgcagccgctcctgccgccgtggtcgctggagctttgcctctctaggccggcagcgcctctcctccatggtcctgtctgtcagcgctgttttgggagcccgccggtgaggccgggccacgctcagacacttcgatcgtcgagtctgtcactgggcatggcgggtcagttccgcagctacgtgtgggacccgctgctgatcctgtcgcagatcgtcctcatgcagaccgtgtattacggctcgctgggcctgtggctggcgctggtggacgggctagtgcgaagcagcccctcgctggaccagatgttcgacgccgagatcctgggcttttccacccctccaggccggctctccatgatgtccttcatcctcaacgccctcacctgtgccctgggcttgctgtacttcatccggcgaggaaagcagtgtctggatttcactgtcactgtccatttctttcacctcctgggctgctggttctacagctcccgtttcccctcggcgctgacctggtggctggtccaagccgtgtgcattgcactcatggctgtcatcggggagtacctgtgcatgcggacggagctcaaggagatacccctcaactcagcccctaaatccaatgtctagaatcaggccctttggacatcctgctgacacttgggccccttaacaccttgggctgctcagaccctccagatgaggtccagcccagatctgagaggaaccctggaaatgtgaagtctctgttggtgtgggagagatagtgagggcctgtcaaagaaggcaggtagcagtcagcatgacagctgcaagaatgacctctgtctgttgaagccttggtatctgagaggtcaggaaggggacctctttgagggtaataacagaattggaaccatgccactcttgagccacaatacctgtcaccagcctgttgttttaagagagaaaaaaaatcaaggatatctgattgga

SEQ ID NO: 356330 - DNA, 2854 bp, Homo sapiens
catgtgctcagttcgctatccggcaggtcttgtacctggttcaggaggttcaggcagaggttgcacccactacgcctgcgcaacctcagccccgcccctccgctgctttccccggaaacgtttctttcctgttctttcctacgcagccgctcctgccgccgtggtcgctggagctttgcctctctaggccggcagcgcctctcctccatggtcctgtctgtcagcgctgttttgggagcccgccggtgaggccgggccacgctcagacacttcgatcgtcgagtctgtcactgggcatggcgggtcagttccgcagctacgtgtgggacccgctgctgatcctgtcgcagatcgtcctcatgcagaccgtgtattacggctcgctgggcctgtggctggcgctggtggacgggctagtgcgaagcagcccctcgctggaccagatgttcgacgccgaggccggctctccatgatgtccttcatcctcaacgccctcacctgtgccctgggcttgctgtacttcatccggcgaggaaagcagtgtctggatttcactgtcactgtccatttctttcacctcctgggctgctggttctacagctcccgtttcccctcggcgctgacctggtggctggtccaagccgtgtgcattgcactcatggctgtcatcggggagtacctgtgcatgcggacggagctcaaggagatacccctcaactcagcccctaaatccaatgtctagaatcaggccctttggacatcctgctgacacttgggccccttaacaccttgggctgctcagaccctccagatgaggtccagcccagatctgagaggaaccctggaaatgtgaagtctctgttggtgtgggagagatagtgagggcctgtcaaagaaggcaggtagcagtcagcatgacagctgcaagaatgacctctgtctgttgaagccttggtatctgagaggtcaggaaggggacctctttgagggtaataacagaattggaaccatgccactcttgagccacaatacctgtcaccagcctgttgttttaagagagaaaaaaaatcaaggatatctgattggagcaaaccacttctttagtcatctgtcttacccccctgggacagctgttacctttgcagtgttgccgaatcacagcagttacctttgcagtgttgccgaatcacagcagttctgttggagaaacgcttggtttccggatccagagccacagaaagaaatgtaggtgtgaagtattaggctgctgtcagggagaggatggcagatggaggcatcaagcacaaggaaaatgcacaacctgtgccctgttatacacacgttcatgtgcacccaagaacctatgactttcttccagttccttctaccaggtccccatcctgctgccagctctcaacatagcaggccataggacccagagaagaatcccagcgttgctcaaagtctaaccatcataaagacactgcctgtcttctaggaatgaccaggcacccagctcccactggactccaattttttttcctgccttatttagaattctttggcgggaagggtatgatgggttcccagagacaagaagcccaaccttctggcctgggctgtgctgatagtgctgagggagataggaatttgctgctaagatttttctttggggtggagtttcctctgtgaggggcttgcagctatccttcctgtgtatacaaatacagtattttccatggttctgcctgcacttactttgtaatgccacggttgagattgagagagatcagcgcagccaggcaagggaactttaaagaattattaggccaccttctccctttcctggaccccagagtcattcctccatttggttaaaatactcagtgcagggaactcttacatcctgtctccttcacttgcagcgtcccctgctatgcctcaggtgaaccacataattcttgggtttccgttcctacttgctagtgatttctgaacatgttcaatggagcggcacacagtctagacccacttccgcattgaaaccttcactgttcctctttggtttcttcagagctttcccaagagagctgtcagttttcagctgtcagtaacacaaatgagtttatggtaacacaaatgagttttgctatctctctgagaagctcatctgacctcctgactctcagccctacagagtagggagttgatgctgacaggatgaaggtttaggaataaatatgcctgggaagagactgggaaggttctagggtgaggcacctcagtaactcatggtaccttggccaagttggaaggaagcagtttgttaatgaggcacagtaatcctggctgcagggtctaggaggtaagaccagctgggatgaccttccctgggttaatcaatttccctctagacaacacaaactgcaggcatgtgactaactttgaaagaacacccatcatgtggctgctgtcacccttgaccagccgtggtggtggttactccatctgtggttggagcgcctctttgggattcacttcaaggtcttgtgcctatttttctgcatatcttctgtgatgacaaatctctgtcccctgagtgttaatttgatttttagaaatggccaaaagtaacgtgatccaaactttttttcagtaatatggagactgagctgcatggtagttggggatcaaaaatatgtgaccttaatgagatttttatgatttctaaagtaacaataaaagcagtttttagagttgagttccagagagggcagggcaatggcagtgacatgtttgtcattttaataataaataacatctattgagtgcttaagaggtgtccagcagtgtg

SEQ ID NO: 356331 - DNA, 1387 bp, Homo sapiens
ttttgaaggatgggaaggggtgggctgcagcactggaggaagggaaccctccaccctgagatctctgtctctatcctatcctgtccctggccttctgaggcaagcggggccaattaaggggaaaacgtacctcctccatttgtgctgaaccaatccctccaacccctctcaggagggcatgatatggagagttgggcattggctgtgttccctgaatacagagtatctctcttgtggtgcctggaactggcatcccctttgtggagcttagggcaagccccgcctctgcatgagacttggtttgtgggacacacttggtttcagggaaggggaaagaggtcaccaagggcagaggtgtccaggccggagccaggggccccactgttgggatgctggctgcagtggggcgccccaagcccaggtcccctctgtcttctctttcgactttgcagctgtacttgttttgctcctctacccgcaggagctgacatggacccaaatcctcgggccgccctggagcgccagcagctccgccttcgggagcggcaaaaattcttcgaggacattttacagccagagacagagtttgtctttcctctgtcccatctgcatctcgagtcgcagagaccccccataggtagtatctcatccatggaagtgaatgtggacacactggagcaagtagaacttattgaccttggggacccggatgcagcagatgtgttcttgccttgcgaagatcctccaccaaccccccagtcgtctggggtggacaaccatttggaggagctgagcctgccggtgcctacatcagacaggaccacatctaggacctcctcctcctcctcctccgactcctccaccaacctgcatagcccaaatccaagtgatgatggagcagatacgcccttggcacagtcggatgaagaggaggctacagactgaccacgctggctattctccacatgagaccacaggcccagccagagcctgtcgggagaagaccagactctttacttgcagtaggcaccagaggtgggaaggatggtgggattgtgtacctttctaagaattaaccctctcctgctttactgctaattttttcctgctgcaaccctcccaccagtttttggcttactcctgagatatgatttgcaaatgaggagagagaagatgaggttggacaagatgccactgcttttcttagcactcttccctcccctaaaccatcccgtagtcttctaatacagtctctcagacaagtgtctctagatggatgtgaactccttaactcatcaagtaaggtggtactcaagccatgctgcctccttacatcctttttggaacagagcacggtataaataataaactaataataatatgccaa

SEQ ID NO: 356332 - DNA, 1254 bp, Homo sapiens
ttttgaaggatgggaaggggtgggctgcagcactggaggaagggaaccctccaccctgagatctctgtctctatcctatcctgtccctggccttctgaggcaagcggggccaattaaggggaaaacgtacctcctccatttgtgctgaaccaatccctccaacccctctcaggagggcatgatatggagagttgggcattggctgtgttccctgaatacagagtatctctcttgtggtgcctggaactggcatcccctttgtggagcttagggcaagccccgcctctgcatgagacttggtttgtgggacacacttggtttcagggaaggggaaagaggtcaccaagggcagaggtgtccaggccggagccaggggccccactgttgggatgctggctgcagtggggcgccccaagcccaggtcccctctgtcttctctttcgactttgcagctgtacttgttttgctcctctacccgcaggagctgacatggacccaaatcctcgggccgccctggagcgccagcagctccgccttcgggagcggcaaaaattcttcgaggacattttacagccagagacagagtttgtctttcctctgtcccatctgcatctcgagtcgcagagaccccccataggtagtatctcatccatggaagtgaatgtggacacactggagcaagtagaacttattgaccttggggacccggatgcagcagatgtgttcttgccttgcgaagatcctccaccaaccccccagtcgtctggggtggacaaccatttggaggagctgagcctgccgctacagactgaccacgctggctattctccacatgagaccacaggcccagccagagcctgtcgggagaagaccagactctttacttgcagtaggcaccagaggtgggaaggatggtgggattgtgtacctttctaagaattaaccctctcctgctttactgctaattttttcctgctgcaaccctcccaccagtttttggcttactcctgagatatgatttgcaaatgaggagagagaagatgaggttggacaagatgccactgcttttcttagcactcttccctcccctaaaccatcccgtagtcttctaatacagtctctcagacaagtgtctctagatggatgtgaactccttaactcatcaagtaaggtggtactcaagccatgctgcctccttacatcctttttggaacagagcacggtataaataataaactaataataatatgccaa

SEQ ID NO: 356333 - DNA, 842 bp, Homo sapiens
catgtgctcagttcgctatccggcaggtcttgtacctggttcaggaggttcaggcagaggttgcacccactacgcctgcgcaacctcagccccgcccctccgctgctttccccggaaacgtttctttcctgttctttcctacgcagccgctcctgccgccgtggtcgctggagctttgcctctctaggccggcagcgcctctcctccatggtcctgtctgtcagcgctgttttgggagcccgccggtgaggccgggccacgctcagacacttcgatcgtcgagtctgtcactgggcatggcgggtcagttccgcagctacgtgtgggacccgctgctgatcctgtcgcagatcgtcctcatgcagaccgtgtattacggctcgctgggcctgtggctggcgctggtggacgggctagtgcgaagcagcccctcgctggaccagatgttcgacgccgagatcctgggcttttccacccctccaggccggctctccatgatgtccttcatcctcaacgccctcacctgtgccctgggcttgctgtacttcatccggcgaggaaagcagtgtctggatttcactgtcactgtccatttctttcacctcctgggctgctggttctacagctcccgtttcccctcggcgctgacctggtggctggtccaagccgtgtgcattgcactcatggctgtcatcggggagtacctgtgcatgcggacggagctcaaggagataggaatttgctgctaagatttttctttggggtggagtttcctctgtgaggggcttgcagctatccttcctgtgtatacaaatacagtattttccatggttctgcctgca

SEQ ID NO: 356334 - DNA, 246 bp, Homo sapiens
acattataaatacacagtctcagagtcagtgttttctaccttgagactttatattacctacaatcccttaagcttctccctggaaatatcacctgtccaacatggaaattacatccaataagcatttataagtgatcctcttagcatcatctccacagaatttcaaagaaaatcttagggttctcaaattccttagcctttacctcctctttaggacacttttaacatggactcctgggtctctat

SEQ ID NO: 356335 - DNA, 2238 bp, Homo sapiens
ctagcggacgctgccacctgatcccatccaggcgctgagaggcaagccaccggcactcggcgcgcagggccccgggcaccctcggaccccgtgcggatttcgagacaagggtccagagatagcggcggccgcccccaacccgggccagaggcagagcccaggcgtgcggtgcttctcgggaacactggccctgctaccagagccgcaggatcccccatgagtgcctgtgaagggagtcctggatagtgaggccctggctggtccaggggtgggtactccgccatgccacccatcctccagcgcctgcagcaggccaccaagatgatgagccgccggaaaatcctgctgctggtgctagggtgcagcaccgtaagccttctcatccaccagggggcgcagctcagctggtaccccaagctgttccccttgagctgccctcctctgcggaactcgccgccgcgccccaagcacatgactgtggccttcctgaagactcacaagacggcaggcacgacggtgcagaacatcctgtttcgctttgccgagcgccacaacctgacggtggccctgccgcacccgagctgcgagcaccagttctgctacccccgcaacttctcggcgcacttcgtgcacccggccacgcggccgccgcacgtgctggccagccacctgcgcttcgaccgtgcggagctggagcgcctcatgccgcccagcaccgtctatgtcaccatcctgcgcgagccggccgccatgttcgagtcgctcttcagctactacaaccagtactgcccggccttccggcgcgtgcccaacgcctcgctcgaggccttcctgcgcgcgcccgaggcatactaccgcgctggcgagcacttcgccatgttcgcacacaacacgctggcctacgacctgggcggcgacaatgagcgcagcccgcgcgacgacgccgcctacctggcgggcctcatccgccaggtggaggaggttttctcgctcgtcatgatcgccgagtacttcgacgagtcgctagtgctgctgcggcgcctactggcctgggacctggacgacgtgctctacgccaagctcaacgcgcgcgccgccagctcgcgcctggccgccatccccgcggcgctggcgcgggcggcgcgcacctggaacgccctggacgccggcctctacgaccacttcaacgccaccttctggcgccacgtggcgcgcgcgggccgcgcgtgcgtggagcgcgaggcgcgcgagctgcgcgaggcccgccagcgcctactgcggcgctgcttcggggacgagccactgctgcggcctgccgcgcagatccgcaccaagcagctgcagccatggcagcccagccgcaaggtggacattatgggctatgacctgcccggcggcggcgccggcccggccaccgaggcctgcctcaagctggccatgcccgaggtccagtactcgaactacctgttgcgcaagcagaagcgccggggcggtgcgcgggctcggcccgagcccgtcctggacaatcccccgcctcggcccatccgagtgctgcctcgcggccctcaaggtccctgagctccgcaggcctccaggagtatgggtcctgccctgccctcccaggagtccagccaggggctgcctccatgtcctgcccccatgagagccctttcttttcaatgggcttgagtccctcgctgaactttggggtacgcctccctatctgagcccccgctcccgatcgtgggctgaaccttgccttcgggcacggcgctgataggctggatccagcgctgggccaccctctccttcccagctggttggtgattttgacaagaggcctgagggctgtccagaactgctcaccctgcctttttctgggggctgagcccccacaacctgtcttttccaagtggataagcccaggccccatggagagaggctcagccctagggaaaggctgctcttgctctccctcccagggcttgaggctccctatacttttctgtcttccaggttctaccctccccacagacctaagctgctcccagtctcccagaaccaagagttcttgggttgggatttttgtttggttggtttttcttttttttaataaaacatctttaaaatgtgcgagttgtatgtcagtcatagaagccggattccccacatttgaggatgaaacggatgcccaggaggagctgtggctggacccatgaggatgggggcctggactca

SEQ ID NO: 356336 - DNA, 379 bp, Homo sapiens
ctagcggacgctgccacctgatcccatccaggcgctgagaggcaagccaccggcactcggcgcgcagggccccgggcaccctcggaccccgtgcggatttcgagacaagggtccagagatagcggcggccgcccccaacccgggccagaggcagagcccaggcgtgcggtgtgagtactgcagtggccggcatggggttggaggggtgggagtggaccagaccgggatgggggccgagaggcgggcgggagagtgtcttgggggcctagtggttggaaagcatgaggaggggggcgctctacccctggaaagtgggagaagatagggtgagcgggccaatctggcctatcccctatggtgatcagatcccactggcagg

SEQ ID NO: 356337 - DNA, 2116 bp, Homo sapiens
atcccatctcctctgcccactgcaaacccgtctgccttcttctgccaggcttctcgggaacactggccctgctaccagagccgcaggatcccccatgagtgcctgtgaagggagtcctggatagtgaggccctggctggtccaggggtgggtactccgccatgccacccatcctccagcgcctgcagcaggccaccaagatgatgagccgccggaaaatcctgctgctggtgctagggtgcagcaccgtaagccttctcatccaccagggggcgcagctcagctggtaccccaagctgttccccttgagctgccctcctctgcggaactcgccgccgcgccccaagcacatgactgtggccttcctgaagactcacaagacggcaggcacgacggtgcagaacatcctgtttcgctttgccgagcgccacaacctgacggtggccctgccgcacccgagctgcgagcaccagttctgctacccccgcaacttctcggcgcacttcgtgcacccggccacgcggccgccgcacgtgctggccagccacctgcgcttcgaccgtgcggagctggagcgcctcatgccgcccagcaccgtctatgtcaccatcctgcgcgagccggccgccatgttcgagtcgctcttcagctactacaaccagtactgcccggccttccggcgcgtgcccaacgcctcgctcgaggccttcctgcgcgcgcccgaggcatactaccgcgctggcgagcacttcgccatgttcgcacacaacacgctggcctacgacctgggcggcgacaatgagcgcagcccgcgcgacgacgccgcctacctggcgggcctcatccgccaggtggaggaggttttctcgctcgtcatgatcgccgagtacttcgacgagtcgctagtgctgctgcggcgcctactggcctgggacctggacgacgtgctctacgccaagctcaacgcgcgcgccgccagctcgcgcctggccgccatccccgcggcgctggcgcgggcggcgcgcacctggaacgccctggacgccggcctctacgaccacttcaacgccaccttctggcgccacgtggcgcgcgcgggccgcgcgtgcgtggagcgcgaggcgcgcgagctgcgcgaggcccgccagcgcctactgcggcgctgcttcggggacgagccactgctgcggcctgccgcgcagatccgcaccaagcagctgcagccatggcagcccagccgcaaggtggacattatgggctatgacctgcccggcggcggcgccggcccggccaccgaggcctgcctcaagctggccatgcccgaggtccagtactcgaactacctgttgcgcaagcagaagcgccggggcggtgcgcgggctcggcccgagcccgtcctggacaatcccccgcctcggcccatccgagtgctgcctcgcggccctcaaggtccctgagctccgcaggcctccaggagtatgggtcctgccctgccctcccaggagtccagccaggggctgcctccatgtcctgcccccatgagagccctttcttttcaatgggcttgagtccctcgctgaactttggggtacgcctccctatctgagcccccgctcccgatcgtgggctgaaccttgccttcgggcacggcgctgataggctggatccagcgctgggccaccctctccttcccagctggttggtgattttgacaagaggcctgagggctgtccagaactgctcaccctgcctttttctgggggctgagcccccacaacctgtcttttccaagtggataagcccaggccccatggagagaggctcagccctagggaaaggctgctcttgctctccctcccagggcttgaggctccctatacttttctgtcttccaggttctaccctccccacagacctaagctgctcccagtctcccagaaccaagagttcttgggttgggatttttgtttggttggtttttcttttttttaataaaacatctttaaaatgtgcgagttgtatgtcagtcatagaagccggattccccacatttgaggatgaaacggatgcccaggaggagctgtggctggacccatgaggatgggggcctggactca

SEQ ID NO: 356338 - DNA, 336 bp, Homo sapiens
tgaaggtctaaaaatattggtcagtgtatcaggagtaaaatttggtttaaccgaaaaaaactggcctgccgcggtggctcacgcctgtaatcccagcactttgggaggccaaggcggtcagatcacttgaggtcaggggttcgagaccagcctgggcaacatggcgaaaccccatctctactaaaaatacaaaaaattagccgggcgtggtgctcaggcctgtaattccagctacctgggaggctgaggcatgagaattgcttgaacccgggaggtgaaagttgtagtgagctgagatcacaccactgcactccagcttgggtgacagagtgagac

SEQ ID NO: 356339 - DNA, 1085 bp, Homo sapiens
cggttctcaccgctgctatggaggcgctggccatgggttcccgggcgctgcggctctggctggtcgcacccggtggcgggatcaaatggagatttatagcaacatcgccagcttctcagctgtcaccgacagaattgacagaaatgcggaatgatctctttaataaagagaaagccaggcagttatcattaactccccgaactgagaagatagaagttaagcatgttgggaaaactgaccccggtactgtcttcgtgatgaataaaaacatttcaactccctacagttgtgccatgcatttaagcgagtggtattgcaggaagtccattctggctctggtggatggacagccttgggacatgtataagcctttaacaaagtcctgtgaaattaaatttcttactttcaaagattgtgatccaggagaagtgaataaggcatattggcgttcctgtgctatgatgatgggctgtgtgatagagagggcattcaaagatgaatatatggtcaatttggtcagagctccagaagttcctgtaatttctggtgccttctgttatgacgtagttttggatagcaaacttgatgagtggatgccaacaaaagagaacttacgttccttcacaaaggatgctcatgctttaatttataaagatcttccatttgaaactctggaagttgaagcaaaagtggcattggaaatatttcaacacagcaagtacaaagtagatttcatagaagagaaggcatctcagaaccctgagagaatagtcaagctacacagaataggtgacttcattgatgtgagtgagggccctcttattccaagaacaagtatttgtttccagtatgaagtgtcagcagttcacaatcttcaacccacccagccaagtctcatacgaagattccagggtgtgtctttacctgttcacttaagagcacattttacaatatgggataagctattggaaagatctcggaaaatggtaactgaagatcaaagtaaagcaacagaggaatgtacatctacctaataactttctaaaatttaaatatgtataataaaataaatgttttaaatataa

SEQ ID NO: 356340 - DNA, 669 bp, Homo sapiens
caggtaggaagaagagagtgaattcttgaatgctgtccttaggtatctgggtggagccctttaccaagatagatgatgcaggtaggacaggttttggggtgttgaattcagatttagccatgtctgtttgatgagtctgagtgacacagaatagaaatagggacatagagatatctatttagactaaatctgtaatatgttctattctaaatggaattatactccaaaagaaaataaactgatttaaaatagcttgttacagcacttcaggtgttttttcttacactaatgattttgttttacggctgaaaagtaaaatggccaacttgagaagcctaggtataatatgccttagattatatttttgaatggaattattgttctttacctgataatttatattggttacttggcctttaaatctttcttcttacctaactttctattctactatttaaggggaaagataaagggtcattataagagggctgtggaatgatttaaaatggtgggtgaagggtaaaactgaaagtgtttattaggaaagtaaagctattcatgtttttacaggtaactgaagatcaaagtaaagcaacagaggaatgtacatctacctaataactttctaaaatttaaatatgtataataaaataaatgttttaaatataa

SEQ ID NO: 356341 - DNA, 508 bp, Homo sapiens
  misc_feature (26)..(26): n is a, c, g, or t
  misc_feature (37)..(37): n is a, c, g, or t
  misc_feature (55)..(55): n is a, c, g, or t
  misc_feature (57)..(57): n is a, c, g, or t
taggcggccttgcgagcgtgtatcanaactacgtcantttggtaagctcagaagntnctgtaatttctggtgccttctgttatgacgtagttttggatagcaaacttgatgagtggatgccaacaaaagagaacttacgttccttcacaaaggatgctcatgctttaatttataaagatcttccatttgaaactctggaagttgaagcaaaagtggcattggaaatatttcaacacagcaagtacaaagtagatttcatagaagagaaggcatctcagaaccctgagagaatagtcaagctacacagaataggtgacttcattgatgtgagtgagggccctcttattccaagaacaagtatttgtttccagtatgaagtgtcagcagttcacaatcttcaacccacccagccaagtctcatacgaagattccagggtgtgtctttacctgttcacttaagagcacattttacaatatgggataacacgttcgcgagggggatcctcta

SEQ ID NO: 356342 - DNA, 1174 bp, Homo sapiens
cggttctcaccgctgctatggaggcgctggccatgggttcccgggcgctgcggctctggctggtcgcacccggtggcgggatcaaatggagatttatagcaacatcgccagcttctcagctgtcaccgacagaattgacagaaatgcggaatgatctctttaataaagagaaagccaggcagttatcattaactccccgaactgagaagatagaagttaagcatgttgggaaaactgaccccggtactgtcttcgtgatgaataaaaacatttcaactccctacagttgtgccatgcatttaagcgagtggtattgcaggaagtccattctggctctggtggatggacagccttgggacatgtataagcctttaacaaagtcctgtgaaattaaatttcttactttcaaagattgtgatccaggagaagtgaataaggcatattggcgttcctgtgctatgatgatgggctgtgtgatagagagggcattcaaagatgaatatatggtcaatttggtcagagctccagaagttcctgtaatttctggtgccttctgttatgacgtagttttggatagcaaacttgatgagtggatgccaacaaaagagaacttacgttccttcacaaaggatgctcatgctttaatttataaagatcttccatttgaaactctggaagttgaagcaaaagtggcattggaaatatttcaacacagcaagtacaaagtagatttcatagaagagaaggcatctcagaaccctgagagaatagtcaagctacacagaataggtgacttcattgatgtgagtgagggccctcttattccaagaacaagtatttgtttccagtatgaagtgtcagcagttcacaatcttcaacccacccagccaagtctcatacgaagattccagggtgtgtctttacctgttcacttaagagcacattttacaatatgggataagctattggaaagatctcggaaaatgactccatttcccattctccttctatttactacgcagtcattcttcactacctcgcctgagtcgtacctcctccatggaacagtctcagagtaactgaagatcaaagtaaagcaacagaggaatgtacatctacctaataactttctaaaatttaaatatgtataataaaataaatgttttaaatataa

SEQ ID NO: 356343 - DNA, 1302 bp, Homo sapiens
cggttctcaccgctgctatggaggcgctggccatgggttcccgggcgctgcggctctggctggtcgcacccggtggcgggatcaaatggagatttatagcaacatcgccagcttctcagctgtcaccgacagaattgacagaaatgcggaatgatctctttaataaagagaaagccaggcagttatcattaactccccgaactgagaagatagaagttaagcatgttgggaaaactgaccccggtactgtcttcgtgatgaataaaaacatttcaactccctacagttgtgccatgcatttaagcgagtggtattgcaggaagtccattctggctctggtggatggacagccttgggacatgtataagcctttaacaaagtcctgtgaaattaaatttcttactttcaaagattgtgatccaggagaagtgaataaggcatattggcgttcctgtgctatgatgatgggctgtgtgatagagagggcattcaaagatgaatatatggtcaatttggtcagagctccagaagttcctgtaatttctggtgccttctgttatgacgtagttttggatagcaaacttgatgagtggatgccaacaaaagagaacttacgttccttcacaaaggatgctcatgctttaatttataaagatcttccatttgaaactctggaagttgaagcaaaagtggcattggaaatatttcaacacagcaagtacaaagtagatttcatagaagagaaggcatctcagaaccctgagagaatagtcaagctacacagaataggtgacttcattgatgtgagtgagggccctcttattccaagaacaagtatttgtttccagtatgaagtgtcagcagttcacaatcttcaacccacccagccaagtctcatacgaagattccagggtgtgtctttacctgttcacttaagagtaagtaaagcttaaagttctaggtcttccaatttgggtatagatataattccggacttgattttataccagtttgaagaatataaacttttaatttttcttaagttatgtgacactaatattttataaactcaggtttatgattaaaaacaaagttgcccagggtgtaaatatacaattacaaaagaaacattagttgaaaaaattaaattgacatagcatttaaaaatttcaagttagcataggtgagggtacattgacagagggggtattagagtgcgtattggtaagacttcctggaatgccttttaagcttaaatttggcatgctcttccctctaattttaatgatccatcatgacccg

SEQ ID NO: 356344 - DNA, 461 bp, Homo sapiens
  misc_feature (47)..(47): n is a, c, g, or t
tgtgtgaagctctggtgtttgcagttcgacctagcaggatccctcanatttcaccggacaccgatctactgtcccggagagtttcaccggcatggtacaaagtagatttcatagaagagaaggcatctcagaaccctgagagaatagtcaagctacacagaataggtgacttcattgatgtgagtgagggccctcttattccaagaacaagtatttgtttccagtatgaagtgtcagcagttcacaatcttcaacccacccagccaagtctcatacgaagattccagggtgtgtctttacctgttcacttaagagcacattttacaatatgggataagctattggaaagatctcggaaaatggtaactgaagatcaaagtaaagcaacagaggaatgtacatctacctaataactttctaaaatttaaatatgtataataaaataaatgttttaaatataa

SEQ ID NO: 356345 - DNA, 380 bp, Homo sapiens
ttaagcgtttttttcttaaatgctcactgcaacctctgcctcccgggttcatgcgattgaagaaagcaaaaaagcagctatccccatgtagcacctttttttgctactatgatccacttttataaccacttatctaaattagtactgcctagctttttatttattttgttctaaaagctatataaagactctgtcctttttactttgacattactgcttcatttagttcatcgcaaatcttttcttttcaaggcacattttacaatatgggataagctattggaaagatctcggaaaatggtaagtgtttttgacagctattgagtactcttctataaagaaattcatcaaaattaaccaataacaaccaaaggggggaa

SEQ ID NO: 356346 - DNA, 1160 bp, Homo sapiens
cggttctcaccgctgctatggaggcgctggccatgggttcccgggcgctgcggctctggctggtcgcacccggtggcgggatcaaatggagatttatagcaacatcgccagcttctcagctgtcaccgacagaattgacagaaatgcggaatgatctctttaataaagagaaagccaggcagttatcattaactccccgaactgagaagatagaagttaagcatgttgggaaaactgaccccggtactgtcttcgtgatgaataaaaacatttcaactccctacagttgtgccatgcatttaagcgagtggtattgcaggaagtccattctggctctggtggatggacagccttgggacatgtataagcctttaacaaagtcctgtgaaattaaatttcttactttcaaagattgtgatccaggagaagtgaataaggcatattggcgttcctgtgctatgatgatgggctgtgtgatagagagggcattcaaagatgaatatatggtcaatttggtcagagctccagaagttcctgtaatttctggtgccttctgttatgacgtagttttggatagcaaacttgatgagtggatgccaacaaaagagaacttacgttccttcacaaaggatgctcatgctttaatttataaagatcttccatttgaaactctggaagttgaagcaaaagtggcattggaaatatttcaacacagcaagtacaaagtagatttcatagaagagaaggcatctcagaaccctgagagaatagtcaagctacacagaataggtgacttcattgatgtgagtgagggccctcttattccaagaacaagtatttgtttccagtatgaagtgtcagcagttcacaatcttcaacccacccagccaagtctcatacgaagattccagggtgtgtctttacctgttcacttaagagcacattttacaatatgggataagctattggaaagatctcggaaaatggtaactgaagatcaaagtaaagcaacagaggaatgtacatctacctaataactttctaaaatttaaatatgtataataaaataaatgttttaaatataaaaaaaaaaaaaaaaggaacaacaaaaaaaagaccgggcggaaatattagggggcggagaaaagagggaaaaagag

SEQ ID NO: 356347 - DNA, 1056 bp, Homo sapiens
cggttctcaccgctgctatggaggcgctggccatgggttcccgggcgctgcggctctggctggtcgcacccggtggcgggatcaaatggagatttatagcaacatcgccagcttctcagctgtcaccgacagaattgacagaaatgcggaatgatctctttaataaagagaaagccaggcagttatcattaactccccgaactgagaagatagaagttaagcatgttgggaaaactgaccccggtactgtcttcgtgatgaataaaaacatttcaactccctacagttgtgccatgcatttaagcgagtggtattgcaggaagtccattctggctctggtggatggacagccttgggacatgtataagcctttaacaaagtcctgtgaaattaaatttcttactttcaaagattgtgatccaggagaagtgaataaggcatattggcgttcctgtgctatgatgatgggctgtgtgatagagagggcattcaaagatgaatatatggtcaatttggtcagagctccagaagttcctgttttggatagcaaacttgatgagtggatgccaacaaaagagaacttacgttccttcacaaaggatgctcatgctttaatttataaagatcttccatttgaaactctggaagttgaagcaaaagtggcattggaaatatttcaacacagcaagtacacagtagattcttagaaagacggaaggcgtctccagaacctgagagaattgtcaaagtacacgaataggtgacttcattgatgtgagtgagggccctcttattccaagaacaagtatttgtttccagtatgaagtgtcagcagttcacaatcttcaacccacccagccaagtctcatacgaagattccagggtgtgtctttacctgttcacttaagagcacattttacaatatgggataagctattggaaagatctcggaaaatggtaactgaagatcaaagtaaagcaacagaggaatgtacatctacctaataactttctaaaatttaaatatgtataataaaataaatgttttaaatataa

SEQ ID NO: 356348 - DNA, 436 bp, Homo sapiens
caggagaatggcatgaacccaggaggcggagcttgcagtgagccgagatcacaccactgcactccagcctgggcgacagagtgagactccatctcaaaaaaaaaaaaaaaaaacttaagatggacacagctgactggacccccatcctgcctcacccatgggtgctgcaccccagacccatcctgccacttctatgtctctggaccacaggatggtggtggcattgcaggttggcaagtgggctgatggggtccgccctcctcactgctgagctcctcacctggacagtctcctggacgaggagtttccagctgctggctggagtctcaggccaaattgcagagggtcctccagggtcctgaagagcactggactaagagtctagtggttccagggccctgaccagtaggtgctcaataaatgtttgttgttgaat

SEQ ID NO: 356349 - DNA, 419 bp, Homo sapiens
gccccattcatgactgagaagcagctgagtggagccatggccacattcatgactgagaagcagctgagtggaggcatggccccggggtccccttgctgctgtgggctccctgtccctgggcaggagtgctggtgaggaggtggagccttttgaggggggccttccctcagctgtttccccacactggggggctgggccctgcctccccgttaccctccttccctgcaggcctggagcctgtagggctggactgaggttcaggtctccccccagctgtctcacccccactttgtccccactctagagcagggaggcagtgggggaggagttgtgtctcgtcttctgtctccatgtggtttttgggtgtttttcttgttgtgtcctggattccgataaaattaaagaaattgcttcctcaa

SEQ ID NO: 356350 - DNA, 669 bp, Homo sapiens
tgtctcgaatctacaaggtgggagcgggtgagaacccagcgactgcgcggctgaatgacagggagtagccccgccgcctccaacatggcagcttctatccagcgaagccgggtccccgcttccgggttccgtactgtcggccaggctacttccggcagcgcgatggctgggttcccgggactcgaacggaagttccggcgggggcggccgagggggaagagtgtgtctgcgggagaaagaggagaatcgcccaagcggcctcggaagtcccagggagtggaggcccccgccgtggagccgtgtggtgtatgtgtggtaacaccatgtctgtgcccctgctcaccgatgctgccaccgtgtctggagctgagcgggaaacggccgcggttatttttttacatggacttggagacacagggcacagctgggctgacgccctctccaccatccggctccctcacgtcaagtacatctgtccccatgccctaggatccctgtgacaagcctcccaggacgattcgatgggcagggatcccgttcttcatttcatgctcaatcaaggccttgactgtctctgctgccttcttgatgccacgcctcgtcctctggggcatctggactcagccccatcaggtcaaaccaggagggcagtgtaccgcgctcgaattg

SEQ ID NO: 356351 - DNA, 2378 bp, Homo sapiens
tgtctcgaatctacaaggtgggagcgggtgagaacccagcgactgcgcggctgaatgacagggagtagccccgccgcctccaacatggcagcttctatccagcgaagccgggtccccgcttccgggttccgtactgtcggccaggctacttccggcagcgcgatggctgggttcccgggactcgaacggaagttccggcgggggcggccgagggggaagagtgtgtctgcgggagaaagaggagaatcgcccaagcggcctcggaagtcccagggagtggaggcccccgccgtggagccgtgtggtgtatgtgtggtaacaccatgtctgtgcccctgctcaccgatgctgccaccgtgtctggagctgagcgggaaacggccgcggttatttttttacatggacttggagacacagggcacagctgggctgacgccctctccaccatccggctccctcacgtcaagtacatctgtccccatgcgcctaggatccctgtgaccctcaacatgaagatggtgatgccctcctggtttgacctgatggggctgagtccagatgccccagaggacgaggctggcatcaagaaggcagcagagaacatcaaggccttgattgagcatgaaatgaagaacgggatccctgccaatcgaatcgtcctgggaggcttttcacagggcggggccctgtccctctacacggccctcacctgcccccaccctctggctggcatcgtggcgttgagctgctggctgcctctgcaccgggccttcccccaggcagctaatggcagtgccaaggacctggccatactccagtgccatggggagctggaccccatggtgcccgtacggtttggggccctgacggctgagaagctccggtctgttgtcacacctgccagggtccagttcaagacatacccgggtgtcatgcacagctcctgtcctcaggagatggcagctgtgaaggaatttcttgagaagctgctgcctcctgtctaactagtcgctggccccagtgcagtaccccagctcatgggggactcagcaagcaagcgtggcaccatcttggatctgagccggtcgagcccctgtccccacccttcctgacctgtccttttcccacaggcctctgggggcaggtggcaaggcctggccgggccttccttcctggccttagccacctggctctgtctgcagcaggggcaggctgctttcttatccatttccctggaggcgggcccccctggcagcagtattggaggggctacaggcagctggagaaaggggcccagccgctgacccactcactcaggacctcactcactagccccgctttgggccccctcctgtgacctcagggtttggcccatggggccctcccaggcccctgccccaactgattctgcccagataatcgtgtctcctgcctccactcagctgcttctcagtcatgaatgtggccatggccccggggtccccttgctgctgtgggctccctgtccctgggcaggagtgctggtgaggaggtggagccttttgaggggggccttccctcagctgtttccccacactggggggctgggccctgcctccccgttaccctccttccctgcaggcctggagcctgtagggctggactgaggttcaggtctccccccagctgtctcacccccactttgtccccactctagagcagggaggcagtgggggaggagttgtgtctcgtcttctgtctccatgtggtttttgggtgtttttcttgttgtgtcctggattccgataaaattaaagaaattgcttcctcaaaaaaaaaaaaaaaaaaaaaaaaaaaaaaaaaaaaaaaaaaaaaaaaaaaaaaaaaaaaaaaaaaaaaaaagaaaaaaaaaaaaaaaaaaaagggagggggggcgagccggcagtaaaataatccgctcaccccggggggacggacacatcactcataaaccacaacaccgcactttctctaaacacaaggagggcccccacaaaaggaggagtagtaataaatataacaacagcagccgacgcccggcccggaataaaaaaaaacacagaagctgcgtgatggtgagagaaaaaaaacatgtattgcattggtgcgtatgtattttcgttagagggaagaaagaacacaacacatctctgggggggggggggagaaaaataaatatgtagggaagacaaaaatccaccgaaagaatataattatactgtgtgcgggaggaaaaatactatatacaatgaggggtgtaatatattagtatgaggtaaaaaaccgtaaactatttgttgctgtcggaaaaaaaaaattgtggtgcaggaggtaaaaatgtaatgaaacaaaaatatagg

SEQ ID NO: 356352 - DNA, 1647 bp, Homo sapiens
tgtctcgaatctacaaggtgggagcgggtgagaacccagcgactgcgcggctgaatgacagggagtagccccgccgcctccaacatggcagcttctatccagcgaagccgggtccccgcttccgggttccgtactgtcggccaggctacttccggcagcgcgatggctgggttcccgggactcgaacggaagttccggcgggggcggccgagggggaagagtgtgtctgcgggagaaagaggagaatcgcccaagcggcctcggaagtcccagggagtggaggcccccgccgtggagccgtgtggtgtatgtgtggtaacaccatgtctgtgcccctgctcaccgatgctgccaccgtgtctggagctgagcgggaaacggccgcggttatttttttacatggacttggagacacagggcacagctgggctgacgccctctccaccatccggctccctcacgtcaagtacatctgtccccatgcgcctaggatccctgtgaccctcaacatgaagatggtgatgccctcctggtttgacctgatggggctgagtccagatgccccagaggacgaggctggcatcaagaaggcagcagagaacatcaaggccttgattgagcatgaaatgaagaacgggatccctgccaatcgaatcgtcctgggaggcttttcacagggcggggccctgtccctctacacggccctcacctgcccccaccctctggctggcatcgtggcgttgagctgctggctgcctctgcaccgggccttcccccaggcagctaatggcagtgccaaggacctggccatactccagtgccatggggagctggaccccatggtgcccgtacggtttggggccctgacggctgagaagctccggtctgttgtcacacctgccagggtccagttcaagacatacccgggtgtcatgcacagctcctgtcctcaggagatggcagctgtgaaggaatttcttgagaagctgctgcctcctgtctaactagtcgctggccccagtgcagtaccccagctcatgggggactcagcaagcaagcgtggcaccatcttggatctgagccggtcgagcccctgtccccacccttcctgacctgtccttttcccacaggcctctgggggcaggtggcaaggcctggccgggccttccttcctggccttagccacctggctctgtctgcagcaggggcaggctgctttcttatccatttccctggaggcgggcccccctggcagcagtattggaggggctacaggcagctggagaaaggggcccagccgctgacccactcactcaggacctcactcactagccccgctttgggccccctcctgtgacctcagggtttggcccatggggccctcccaggcccctgccccaactgattctgcccagataatcgtgtctcctctccccgttaccctccttccctgcaggcctggagcctgtagggctggactgaggttcaggtctccccccagctgtctcacccccactttgtccccactctagagcagggaggcagtgggggaggagttgtgtctcgtcttctgtctccatgtggtttttgggtgtttttcttgttgtgtcctggattccgataaaattaaagaaattgcttcctcaa

SEQ ID NO: 356353 - DNA, 1390 bp, Homo sapiens
  misc_feature (1294)..(1294): n is a, c, g, or t
  misc_feature (1297)..(1297): n is a, c, g, or t
  misc_feature (1308)..(1308): n is a, c, g, or t
  misc_feature (1317)..(1317): n is a, c, g, or t
  misc_feature (1321)..(1321): n is a, c, g, or t
  misc_feature (1324)..(1325): n is a, c, g, or t
  misc_feature (1386)..(1386): n is a, c, g, or t
tgtctcgaatctacaaggtgggagcgggtgagaacccagcgactgcgcggctgaatgacagggagtagccccgccgcctccaacatggcagcttctatccagcgaagccgggtccccgcttccgggttccgtactgtcggccaggctacttccggcagcgcgatggctgggttcccgggactcgaacggaagttccggcgggggcggccgagggggaagagtgtgtctgcgggagaaagaggagaatcgcccaagcggcctcggaagtcccagggagtggaggcccccgccgtggagccgtgtggtgtatgtgtggtaacaccatgtctgtgcccctgctcaccgatgctgccaccgtgtctggagctgagcgggaaacggccgcggttatttttttacatggacttggagacacagggcacagctgggctgacgccctctccaccatccggctccctcacgtcaagtacatctgtccccatgcgcctaggatccctgtgaccctcaacatgaagatggtgatgccctcctggtttgacctgatggggctgagtccagatgccccagaggacgaggctggcatcaagaaggcagcagagaacatcaaggccttgattgagcatgaaatgaagaacgggatccctgccaatcgaatcgtcctgggaggcttttcacagggcggggccctgtccctctacacggccctcacctgcccccaccctctggctggcatcgtggcgttgagctgctggctgcctctgcaccgggccttcccccaggcagctaatggcagtgccaaggacctggccatactccagtgccatggggagctggaccccatggtgcccgtacggtttggggccctgacggctgagaagctccggtctgttgtcacacctgccagggtccagttcaagacatacccgggtgtcatgcacagctcctgtcctcaggagatggcagctgtgaaggaatttcttgagaagctgctgcctcctgtctaactagtcgctggccccagtgcagtaccccagctcatgggggactcagcaagcaagcgtggcaccatcttggatctgagccggtcgagcccctgtccccacccttcctgacctgtccttttcccacaggcctctgggggcaggtggcaaggcctggccgggccttccttcctggccttagccacctggctctgtctgcagcaggggcaggctgctttcttatccatttccctggaggcgggcccccctggcagcagtattggaggggctacaggcagctggagaaagggcancgntgacaataatnagacttatnatanccnntttggccctctgtactcaggtttgccatgggctccaagcctgcccaatgatttgcaaaatntttt

SEQ ID NO: 356354 - DNA, 1597 bp, Homo sapiens
  misc_feature (20)..(20): n is a, c, g, or t
attagctagtacgagctggnttaagaggagaatcgcccaagcggcctcggaagtcccagggagtggaggcccccgccgtggagccgtgtggtgtatgtgtggtaacaccatgtctgtgcccctgctcaccgatgctgccaccgtgtctggagctgagcgggaaacggccgcggttatttttttacatggacttggagacacagggcacagctgggctgacgccctctccaccatccggctccctcacgtcaagtacatctgtccccatgcgcctaggatccctgtgaccctcaacatgaagatggtgatgccctcctggtttgacctgatggggctgagtccagatgccccagaggacgaggctggcatcaagaaggcagcagagaacatcaaggccttgattgagcatgaaatgaagaacgggatccctgccaatcgaatcgtcctgggaggcttttcacagggcggggccctgtccctctacacggccctcacctgcccccaccctctggctggcatcgtggcgttgagctgctggctgcctctgcaccgggccttcccccaggcagctaatggcagtgccaaggacctggccatactccagtgccatggggagctggaccccatggtgcccgtacggtttggggccctgacggctgagaagctccggtctgttgtcacacctgccagggtccagttcaagacatacccgggtgtcatgcacagctcctgtcctcaggagatggcagctgtgaaggaatttcttgagaagctgctgcctcctgtctaactagtcgctggccccagtgcagtaccccagctcatgggggactcagcaagcaagcgtggcaccatcttggatctgagccggtcgagcccctgtccccacccttcctgacctgtccttttcccacaggcctctgggggcaggtggcaaggcctggccgggccttccttcctggccttagccacctggctctgtctgcagcaggggcaggctgctttcttatccatttccctggaggcgggcccccctggcagcagtattggaggggctacaggcagctggagaaaggggcccagccgctgacccactcactcaggacctcactcactagccccgctttgggccccctcctgtgacctcagggtttggcccatggggccctcccaggcccctgccccaactgattctgcccagataatcgtgtctcctgcctccactcagctgcttctcagtcatgaatgtggccatggccccggggtccccttgctgctgtgggctccctgtccctgggcaggagtgctggtgaggaggtggagccttttgaggggggccttccctcagctgtttccccacactggggggctgggccctgcctccccgttaccctccttccctgcaggcctggagcctgtagggctggactgaggttcaggtctccccccagctgtctcacccccactttgtccccactctagagcagggaggcagtgggggaggagttgtgtctcgtcttctgtctccatgtggtttttgggtgtttttcttgttgtgtcctggattccgataaaattaaagaaattgcttcctcaa

SEQ ID NO: 356355 - DNA, 1672 bp, Homo sapiens
  misc_feature (5)..(5): n is a, c, g, or t
  misc_feature (7)..(7): n is a, c, g, or t
  misc_feature (9)..(9): n is a, c, g, or t
  misc_feature (12)..(12): n is a, c, g, or t
atcgncntncgntttgcagtcagtggcagcagcagcaggacagaacctgggtgctgtgtggggctgatggcctggtggctcattgggcagggagtgtgtcctgtgcctggttttgctcttgaccgccgccccgatgtatgcaggcccccgccgtggagccgtgtggtgtatgtgtggtaacaccatgtctgtgcccctgctcaccgatgctgccaccgtgtctggagctgagcgggaaacggccgcggttatttttttacatggacttggagacacagggcacagctgggctgacgccctctccaccatccggctccctcacgtcaagtacatctgtccccatgcgcctaggatccctgtgaccctcaacatgaagatggtgatgccctcctggtttgacctgatggggctgagtccagatgccccagaggacgaggctggcatcaagaaggcagcagagaacatcaaggccttgattgagcatgaaatgaagaacgggatccctgccaatcgaatcgtcctgggaggcttttcacagggcggggccctgtccctctacacggccctcacctgcccccaccctctggctggcatcgtggcgttgagctgctggctgcctctgcaccgggccttcccccaggcagctaatggcagtgccaaggacctggccatactccagtgccatggggagctggaccccatggtgcccgtacggtttggggccctgacggctgagaagctccggtctgttgtcacacctgccagggtccagttcaagacatacccgggtgtcatgcacagctcctgtcctcaggagatggcagctgtgaaggaatttcttgagaagctgctgcctcctgtctaactagtcgctggccccagtgcagtaccccagctcatgggggactcagcaagcaagcgtggcaccatcttggatctgagccggtcgagcccctgtccccacccttcctgacctgtccttttcccacaggcctctgggggcaggtggcaaggcctggccgggccttccttcctggccttagccacctggctctgtctgcagcaggggcaggctgctttcttatccatttccctggaggcgggcccccctggcagcagtattggaggggctacaggcagctggagaaaggggcccagccgctgacccactcactcaggacctcactcactagccccgctttgggccccctcctgtgacctcagggtttggcccatggggccctcccaggcccctgccccaactgattctgcccagataatcgtgtctcctgcctccactcagctgcttctcagtcatgaatgtggccatggccccggggtccccttgctgctgtgggctccctgtccctgggcaggagtgctggtgaggaggtggagccttttgaggggggccttccctcagctgtttccccacactggggggctgggccctgcctccccgttaccctccttccctgcaggcctggagcctgtagggctggactgaggttcaggtctccccccagctgtctcacccccactttgtccccactctagagcagggaggcagtgggggaggagttgtgtctcgtcttctgtctccatgtggtttttgggtgtttttcttgttgtgtcctggattccgataaaattaaagaaattgcttcctcaa

SEQ ID NO: 356356 - DNA, 1469 bp, Homo sapiens
cgctcggtccggattggggagacaggaaggcttcccctaggtccgttatttttttacatggacttggagacacagggcacagctgggctgacgccctctccaccatccggctccctcacgtcaagtacatctgtccccatgcgcctaggatccctgtgaccctcaacatgaagatggtgatgccctcctggtttgacctgatggggctgagtccagatgccccagaggacgaggctggcatcaagaaggcagcagagaacatcaaggccttgattgagcatgaaatgaagaacgggatccctgccaatcgaatcgtcctgggaggcttttcacagggcggggccctgtccctctacacggccctcacctgcccccaccctctggctggcatcgtggcgttgagctgctggctgcctctgcaccgggccttcccccaggcagctaatggcagtgccaaggacctggccatactccagtgccatggggagctggaccccatggtgcccgtacggtttggggccctgacggctgagaagctccggtctgttgtcacacctgccagggtccagttcaagacatacccgggtgtcatgcacagctcctgtcctcaggagatggcagctgtgaaggaatttcttgagaagctgctgcctcctgtctaactagtcgctggccccagtgcagtaccccagctcatgggggactcagcaagcaagcgtggcaccatcttggatctgagccggtcgagcccctgtccccacccttcctgacctgtccttttcccacaggcctctgggggcaggtggcaaggcctggccgggccttccttcctggccttagccacctggctctgtctgcagcaggggcaggctgctttcttatccatttccctggaggcgggcccccctggcagcagtattggaggggctacaggcagctggagaaaggggcccagccgctgacccactcactcaggacctcactcactagccccgctttgggccccctcctgtgacctcagggtttggcccatggggccctcccaggcccctgccccaactgattctgcccagataatcgtgtctcctgcctccactcagctgcttctcagtcatgaatgtggccatggccccggggtccccttgctgctgtgggctccctgtccctgggcaggagtgctggtgaggaggtggagccttttgaggggggccttccctcagctgtttccccacactggggggctgggccctgcctccccgttaccctccttccctgcaggcctggagcctgtagggctggactgaggttcaggtctccccccagctgtctcacccccactttgtccccactctagagcagggaggcagtgggggaggagttgtgtctcgtcttctgtctccatgtggtttttgggtgtttttcttgttgtgtcctggattccgataaaattaaagaaattgcttcctcaa

SEQ ID NO: 356357 - DNA, 1544 bp, Homo sapiens
gcgtggtcaagccagggctcgtttgcagtcagtggcagcagcagcaggcccccgccgtggagccgtgtggtgtatgtgtggtaacaccatgtctgtgcccctgctcaccgatgctgccaccgtgtctggagctgagcgggaaacggccgcggcacagctgggctgacgccctctccaccatccggctccctcacgtcaagtacatctgtccccatgcgcctaggatccctgtgaccctcaacatgaagatggtgatgccctcctggtttgacctgatggggctgagtccagatgccccagaggacgaggctggcatcaagaaggcagcagagaacatcaaggccttgattgagcatgaaatgaagaacgggatccctgccaatcgaatcgtcctgggaggcttttcacagggcggggccctgtccctctacacggccctcacctgcccccaccctctggctggcatcgtggcgttgagctgctggctgcctctgcaccgggccttcccccaggcagctaatggcagtgccaaggacctggccatactccagtgccatggggagctggaccccatggtgcccgtacggtttggggccctgacggctgagaagctccggtctgttgtcacacctgccagggtccagttcaagacatacccgggtgtcatgcacagctcctgtcctcaggagatggcagctgtgaaggaatttcttgagaagctgctgcctcctgtctaactagtcgctggccccagtgcagtaccccagctcatgggggactcagcaagcaagcgtggcaccatcttggatctgagccggtcgagcccctgtccccacccttcctgacctgtccttttcccacaggcctctgggggcaggtggcaaggcctggccgggccttccttcctggccttagccacctggctctgtctgcagcaggggcaggctgctttcttatccatttccctggaggcgggcccccctggcagcagtattggaggggctacaggcagctggagaaaggggcccagccgctgacccactcactcaggacctcactcactagccccgctttgggccccctcctgtgacctcagggtttggcccatggggccctcccaggcccctgccccaactgattctgcccagataatcgtgtctcctgcctccactcagctgcttctcagtcatgaatgtggccatggccccggggtccccttgctgctgtgggctccctgtccctgggcaggagtgctggtgaggaggtggagccttttgaggggggccttccctcagctgtttccccacactggggggctgggccctgcctccccgttaccctccttccctgcaggcctggagcctgtagggctggactgaggttcaggtctccccccagctgtctcacccccactttgtccccactctagagcagggaggcagtgggggaggagttgtgtctcgtcttctgtctccatgtggtttttgggtgtttttcttgttgtgtcctggattccgataaaattaaagaaattgcttcctcaa

SEQ ID NO: 356358 - DNA, 1740 bp, Homo sapiens
tgtctcgaatctacaaggtgggagcgggtgagaacccagcgactgcgcggctgaatgacagggagtagccccgccgcctccaacatggcagcttctatccagcgaagccgggtccccgcttccgggttccgtactgtcggccaggctacttccggcagcgcgatggctgggttcccgggactcgaacggaagttccggcgggggcggccgagggggaagagtgtgtctgcgggagaaagaggagaatcgcccaagcggcctcggaagtcccagggagtggaggcccccgccgtggagccgtgtggtgtatgtgtggtaacaccatgtctgtgcccctgctcaccgatgctgccaccgtgtctggagctgagcgggaaacggccgcggttatttttttacatggacttggagacacagggcacagctgggctgacgccctctccaccatccggctccctcacgtcaagtacatctgtccccatgcgcctaggatccctgtgaccctcaacatgaagatggtgatgccctcctgtcaaggccttgattgagcatgaaatgaagaacgggatccctgccaatcgaatcgtcctgggaggcttttcacagggcggggccctgtccctctacacggccctcacctgcccccaccctctggctggcatcgtggcgttgagctgctggctgcctctgcaccgggccttcccccaggcagctaatggcagtgccaaggacctggccatactccagtgccatggggagctggaccccatggtgcccgtacggtttggggccctgacggctgagaagctccggtctgttgtcacacctgccagggtccagttcaagacatacccgggtgtcatgcacagctcctgtcctcaggagatggcagctgtgaaggaatttcttgagaagctgctgcctcctgtctaactagtcgctggccccagtgcagtaccccagctcatgggggactcagcaagcaagcgtggcaccatcttggatctgagccggtcgagcccctgtccccacccttcctgacctgtccttttcccacaggcctctgggggcaggtggcaaggcctggccgggccttccttcctggccttagccacctggctctgtctgcagcaggggcaggctgctttcttatccatttccctggaggcgggcccccctggcagcagtattggaggggctacaggcagctggagaaaggggcccagccgctgacccactcactcaggacctcactcactagccccgctttgggccccctcctgtgacctcagggtttggcccatggggccctcccaggcccctgccccaactgattctgcccagataatcgtgtctcctgcctccactcagctgcttctcagtcatgaatgtggccatggccccggggtccccttgctgctgtgggctccctgtccctgggcaggagtgctggtgaggaggtggagccttttgaggggggccttccctcagctgtttccccacactggggggctgggccctgcctccccgttaccctccttccctgcaggcctggagcctgtagggctggactgaggttcaggtctccccccagctgtctcacccccactttgtccccactctagagcagggaggcagtgggggaggagttgtgtctcgtcttctgtctccatgtggtttttgggtgtttttcttgttgtgtcctggattccgataaaattaaagaaattgcttcctcaa

SEQ ID NO: 356359 - DNA, 1686 bp, Homo sapiens
tgtctcgaatctacaaggtgggagcgggtgagaacccagcgactgcgcggctgaatgacagggagtagccccgccgcctccaacatggcagcttctatccagcgaagccgggtccccgcttccgggttccgtactgtcggccaggctacttccggcagcgcgatggctgggttcccgggactcgaacggaagttccggcgggggcggccgagggggaagagtgtgtctgcgggagaaagaggagaatcgcccaagcggcctcggaagtcccagggagtggaggcccccgccgtggagccgtgtggtgtatgtgtggtaacaccatgtctgtgcccctgctcaccgatgctgccaccgtgtctggagctgagcgggaaacggccgcggttatttttttacatggacttggagacacagggcacagctgggctgacgccctctccaccatccggctccctcacgtcaagtacatctgtccccatgcgcctaggatccctgtgaccctcaacatgaagatggtgatgccctcctggtttgacctgatggggctgagtccagatgccccagaggacgaggctggcatcaagaaggcagcagagaacatcaaggccttgattgagcatgaaatgaagaacgggatccctgccaatcgaatcgtcctgggaggcttttcacagggcggggccctgtccctctacacggccctcacctgcccccaccctctggctggcatcgtggcgttgagctgctggctgcctctgcaccgggccttcccccagggtccagttcaagacatacccgggtgtcatgcacagctcctgtcctcaggagatggcagctgtgaaggaatttcttgagaagctgctgcctcctgtctaactagtcgctggccccagtgcagtaccccagctcatgggggactcagcaagcaagcgtggcaccatcttggatctgagccggtcgagcccctgtccccacccttcctgacctgtccttttcccacaggcctctgggggcaggtggcaaggcctggccgggccttccttcctggccttagccacctggctctgtctgcagcaggggcaggctgctttcttatccatttccctggaggcgggcccccctggcagcagtattggaggggctacaggcagctggagaaaggggcccagccgctgacccactcactcaggacctcactcactagccccgctttgggccccctcctgtgacctcagggtttggcccatggggccctcccaggcccctgccccaactgattctgcccagataatcgtgtctcctgcctccactcagctgcttctcagtcatgaatgtggccatggccccggggtccccttgctgctgtgggctccctgtccctgggcaggagtgctggtgaggaggtggagccttttgaggggggccttccctcagctgtttccccacactggggggctgggccctgcctccccgttaccctccttccctgcaggcctggagcctgtagggctggactgaggttcaggtctccccccagctgtctcacccccactttgtccccactctagagcagggaggcagtgggggaggagttgtgtctcgtcttctgtctccatgtggtttttgggtgtttttcttgttgtgtcctggattccgataaaattaaagaaattgcttcctcaa

SEQ ID NO: 356360 - DNA, 865 bp, Homo sapiens
tgtctcgaatctacaaggtgggagcgggtgagaacccagcgactgcgcggctgaatgacagggagtagccccgccgcctccaacatggcagcttctatccagcgaagccgggtccccgcttccgggttccgtactgtcggccaggctacttccggcagcgcgatggctgggttcccgggactcgaacggaagttccggcgggggcggccgagggggaagagtgtgtctgcgggagaaagaggagaatcgcccaagcggcctcggaagtcccagggagtggaggcccccgccgtggagccgtgtggtgtatgtgtggtaacaccatgtctgtgcccctgctcaccgatgctgccaccgtgtctggagctgagcgggaaacggccgcggttatttttttacatggacttggagacacagggcacagctgggctgacgccctctccaccatccggctccctcacgtcaagtacatctgtccccatgcgcctaggatccctgtgaccctcaacatgaagatggtgatgccctcctggtttgacctgatggggctgagtccagatgccccagaggacgaggctggcatcaagaaggcagcagagaacatcaaggccttgattgagcatgaaatgaagaacgggatccctgccaatcgaatcgtcctgggaggcttttcacagggcggggccctgtccctctacacggccctcacctgcccccacctgtctcacccccactttgtccccactctagagcagggaggcagtgggggaggagttgtgtctcgtcttctgtctccatgtggtttttgggtgtttttcttgttgtgtcctggattccgataaaattaaagaaattgcttcctcaa

SEQ ID NO: 356361 - DNA, 675 bp, Homo sapiens
aactataggcataggtacgaggctgggtgttaatcggccgagagaggagaatcgcccaagcggcctcggaagtcccagggagtggaggcccccgccgtggagccgtgtggtgtatgtgtggtaacaccatgtctgtgcccctgctcaccgatgctgccaccgtgtctggagctgagcgggaaacggccgcggttatttttttacatggacttggagacacagggtaagtgactgaggggggtgctccttaaggaggggtctggcccggcagcggactggagaggcttctcttcctaccacatcggagccttttctcccgtccctcctacaggcacagctgggctgacgccctctccaccatccggctccctcacgtcaagtacatctgtccccatgccgtgagtgtcaccccagcaagggaggggctgaggctggggatcatctgggggtggtcctgtcatcccaggcctgttctctcctgtcagttgcatcctggggcttgggctcagggcaagtcagaagtggcattttcagcctgagctcctgtggagcccccaggagtggggtccagcaccagcccccagccctagggcctcctagacctgagctctcctagaacccacacctcccttcgccccttccccaagtactcaccgactacctgggagccctcat

SEQ ID NO: 356362 - DNA, 1811 bp, Homo sapiens
tgtctcgaatctacaaggtgggagcgggtgagaacccagcgactgcgcggctgaatgacagggagtagccccgccgcctccaacatggcagcttctatccagcgaagccgggtccccgcttccgggttccgtactgtcggccaggctacttccggcagcgcgatggctgggttcccgggactcgaacggaagttccggcgggggcggccgagggggaagagtgtgtctgcgggagaaagaggagaatcgcccaagcggcctcggaagtcccagggagtggaggcccccgccgtggagccgtgtggtgtatgtgtggtaacaccatgtctgtgcccctgctcaccgatgctgccaccgtgtctggagctgagcgggaaacggccgcggttatttttttacatggacttggagacacagggcacagctgggctgacgccctctccaccatccggctccctcacgtcaagtacatctgtccccatgcgcctaggatccctgtgaccctcaacatgaagatggtgatgccctcctggtttgacctgatggggctgagtccagatgccccagaggacgaggctggcatcaagaaggcagcagagaacatcaaggccttgattgagcatgaaatgaagaacgggatccctgccaatcgaatcgtcctgggaggcttttcacagggcggggccctgtccctctacacggccctcacctgcccccaccctctggctggcatcgtggcgttgagctgctggctgcctctgcaccgggccttcccccaggcagctaatggcagtgccaaggacctggccatactccagtgccatggggagctggaccccatggtgcccgtacggtttggggccctgacggctgagaagctccggtctgttgtcacacctgccagggtccagttcaagacatacccgggtgtcatgcacagctcctgtcctcaggagatggcagctgtgaaggaatttcttgagaagctgctgcctcctgtctaactagtcgctggccccagtgcagtaccccagctcatgggggactcagcaagcaagcgtggcaccatcttggatctgagccggtcgagcccctgtccccacccttcctgacctgtccttttcccacaggcctctgggggcaggtggcaaggcctggccgggccttccttcctggccttagccacctggctctgtctgcagcaggggcaggctgctttcttatccatttccctggaggcgggcccccctggcagcagtattggaggggctacaggcagctggagaaaggggcccagccgctgacccactcactcaggacctcactcactagccccgctttgggccccctcctgtgacctcagggtttggcccatggggccctcccaggcccctgccccaactgattctgcccagataatcgtgtctcctgcctccactcagctgcttctcagtcatgaatgtggccatggccccggggtccccttgctgctgtgggctccctgtccctgggcaggagtgctggtgaggaggtggagccttttgaggggggccttccctcagctgtttccccacactggggggctgggccctgcctccccgttaccctccttccctgcaggcctggagcctgtagggctggactgaggttcaggtctccccccagctgtctcacccccactttgtccccactctagagcagggaggcagtgggggaggagttgtgtctcgtcttctgtctccatgtggtttttgggtgtttttcttgttgtgtcctggattccgataaaattaaagaaattgcttcctcaa

SEQ ID NO: 356363 - DNA, 1567 bp, Homo sapiens
tgtctcgaatctacaaggtgggagcgggtgagaacccagcgactgcgcggctgaatgacagggagtagccccgccgcctccaacatggcagcttctatccagcgaagccgggtccccgcttccgggttccgtactgtcggccaggctacttccggcagcgcgatggctgggttcccgggactcgaacggaagttccggcgggggcggccgagggggaagagtgtgtctgcgggagaaagaggagaatcgcccaagcggcctcggaagtcccagggagtggaggcccccgccgtggagccgtgtggtgtatgtgtggtaacaccatgtctgtgcccctgctcaccgatgctgccaccgtgtctggagctgagcgggaaacggccgcggttatttttttacatggacttggagacacagggcacagctgggctgacgccctctccaccatccggctccctcacgtcaagtacatctgtccccatgcgcctaggatccctgtgaccctcaacatgaagatggtgatgccctcctggtttgacctgatggggctgagtccagatgccccagaggacgaggctggcatcaagaaggcagcagagaacatcaaggccttgattgagcatgaaatgaagaacgggatccctgccaatcgaatcgtcctgggaggcttttcacagggcggggccctgtccctctacacggccctcacctgcccccaccctctggctggcatcgtggcgttgagctgctggctgcctctgcaccgggccttcccccaggcagctaatggcagtgccaaggacctggccatactccagtgccatggggagctggaccccatggtgcccgtacggtttggggccctgacggctgagaagctccggtctgttgtcacacctgccagggtccagttcaagacatacccgggtgtcatgcacagctcctgtcctcaggagatggcagctgtgaaggaatttcttgagaagctgctgcctcctgtctaactagtcgctggccccagtgcagtaccccagctcatgggggactcagcaagcaagcgtggcaccatcttggatctgagccggtcgagcccctgtccccacccttcctgacctgtccttttcccacaggcctctgggggcaggtggcaaggcctggccgggccttccttcctggccttagccacgcctccactcagctgcttctcagtcatgaatgtggccatggccccggggtccccttgctgctgtgggctccctgtccctgggcaggagtgctggtgaggaggtggagccttttgaggggggccttccctcagctgtttccccacactggggggctgggccctgcctccccgttaccctccttccctgcaggcctggagcctgtagggctggactgaggttcaggtctccccccagctgtctcacccccactttgtccccactctagagcagggaggcagtgggggaggagttgtgtctcgtcttctgtctccatgtggtttttgggtgtttttcttgttgtgtcctggattccgataaaattaaagaaattgcttcctcaa

SEQ ID NO: 356364 - DNA, 1600 bp, Homo sapiens
tgtctcgaatctacaaggtgggagcgggtgagaacccagcgactgcgcggctgaatgacagggagtagccccgccgcctccaacatggcagcttctatccagcgaagccgggtccccgcttccgggttccgtactgtcggccaggctacttccggcagcgcgatggctgggttcccgggactcgaacggaagttccggcgggggcggccgagggggaagagtgtgtctgcgggagaaagaggagaatcgcccaagcggcctcggaagtcccagggagtggaggcccccgccgtggagccgtgtggtgtatgtgtggtaacaccatgtctgtgcccctgctcaccgatgctgccaccgtgtctggagctgagcgggaaacggccgcggttatttttttacatggacttggagacacagggcacagctgggctgacgccctctccaccatccggctccctcacgtcaagtacatctgtccccatgcgcctaggatccctgtgaccctcaacatgaagatggtgatgccctcctggtttgacctgatggggctgagtccagatgccccagaggacgaggctggcatcaagaaggcagcagagaacatcaaggccttgattgagcatgaaatgaagaacgggatccctgccaatcgaatcgtcctgggaggcttttcacagggcggggccctgtccctctacacggccctcacctgcccccaccctctggctggcatcgtggcgttgagctgctggctgcctctgcaccgggccttcccccaggcagctaatggcagtgccaaggacctggccatactccagtgccatggggagctggaccccatggtgcccgtacggtttggggccctgacggctgagaagctccggtctgttgtcacacctgccagggtccagttcaagacatacccgggtgtcatgcacagctcctgtcctcaggagatggcagctgtgaaggaatttcttgagaagctgctgcctcctgtctaactagtcgctggccccagtgcagtaccccagctcatgggggactcagcaagcaagcgtggcaccatcttggatctgagccggtcgagcccctgtccccacccttcctgacctgtccttttcccacaggcctctgggggcaggtggcaaggcctggccgggccttccttcctggccttagccacctggctctgtctgcagcaggggcaggctgctttcttatccatttccctggaggcgggcccccctggcagcagtattggaggggctacaggcagctggagaaaggggcccagccgctgacccactcactcaggacgtggagccttttgaggggggccttccctcagctgtttccccacactggggggctgggccctgcctccccgttaccctccttccctgcaggcctggagcctgtagggctggactgaggttcaggtctccccccagctgtctcacccccactttgtccccactctagagcagggaggcagtgggggaggagttgtgtctcgtcttctgtctccatgtggtttttgggtgtttttcttgttgtgtcctggattccgataaaattaaagaaattgcttcctcaa

SEQ ID NO: 356365 - DNA, 1616 bp, Homo sapiens
aactataggcataggtacgaggctgggtgttaatcggccgagagaggagaatcgcccaagcggcctcggaagtcccagggagtggaggcccccgccgtggagccgtgtggtgtatgtgtggtaacaccatgtctgtgcccctgctcaccgatgctgccaccgtgtctggagctgagcgggaaacggccgcggttatttttttacatggacttggagacacagggcacagctgggctgacgccctctccaccatccggctccctcacgtcaagtacatctgtccccatgcgcctaggatccctgtgaccctcaacatgaagatggtgatgccctcctggtttgacctgatggggctgagtccagatgccccagaggacgaggctggcatcaagaaggcagcagagaacatcaaggccttgattgagcatgaaatgaagaacgggatccctgccaatcgaatcgtcctgggaggcttttcacagggcggggccctgtccctctacacggccctcacctgcccccaccctctggctggcatcgtggcgttgagctgctggctgcctctgcaccgggccttcccccaggcagctaatggcagtgccaaggacctggccatactccagtgccatggggagctggaccccatggtgcccgtacggtttggggccctgacggctgagaagctccggtctgttgtcacacctgccagggtccagttcaagacatacccgggtgtcatgcacagctcctgtcctcaggagatggcagctgtgaaggaatttcttgagaagctgctgcctcctgtctaactagtcgctggccccagtgcagtaccccagctcatgggggactcagcaagcaagcgtggcaccatcttggatctgagccggtcgagcccctgtccccacccttcctgacctgtccttttcccacaggcctctgggggcaggtggcaaggcctggccgggccttccttcctggccttagccacctggctctgtctgcagcaggggcaggctgctttcttatccatttccctggaggcgggcccccctggcagcagtattggaggggctacaggcagctggagaaaggggcccagccgctgacccactcactcaggacctcactcactagccccgctttgggccccctcctgtgacctcagggtttggcccatggggccctcccaggcccctgccccaactgattctgcccagataatcgtgtctcctgcctccactcagctgcttctcagtcatgaatgtggccatggccccggggtccccttgctgctgtgggctccctgtccctgggcaggagtgctggtgaggaggtggagccttttgaggggggccttccctcagctgtttccccacactggggggctgggccctgcctccccgttaccctccttccctgcaggcctggagcctgtagggctggactgaggttcaggtctccccccagctgtctcacccccactttgtccccactctagagcagggaggcagtgggggaggagttgtgtctcgtcttctgtctccatgtggtttttgggtgtttttcttgttgtgtcctggattccgataaaattaaagaaattgcttcctcaa

SEQ ID NO: 356366 - DNA, 1588 bp, Homo sapiens
tattcattccgggctggcgtttaatttaccattcttgccgtagtctccaatgagtagaggcccccgccgtggagccgtgtggtgtatgtgtggtaacaccatgtctgtgcccctgctcaccgatgctgccaccgtgtctggagctgagcgggaaacggccgcggttatttttttacatggacttggagacacagggcacagctgggctgacgccctctccaccatccggctccctcacgtcaagtacatctgtccccatgcgcctaggatccctgtgaccctcaacatgaagatggtgatgccctcctggtttgacctgatggggctgagtccagatgccccagaggacgaggctggcatcaagaaggcagcagagaacatcaaggccttgattgagcatgaaatgaagaacgggatccctgccaatcgaatcgtcctgggaggcttttcacagggcggggccctgtccctctacacggccctcacctgcccccaccctctggctggcatcgtggcgttgagctgctggctgcctctgcaccgggccttcccccaggcagctaatggcagtgccaaggacctggccatactccagtgccatggggagctggaccccatggtgcccgtacggtttggggccctgacggctgagaagctccggtctgttgtcacacctgccagggtccagttcaagacatacccgggtgtcatgcacagctcctgtcctcaggagatggcagctgtgaaggaatttcttgagaagctgctgcctcctgtctaactagtcgctggccccagtgcagtaccccagctcatgggggactcagcaagcaagcgtggcaccatcttggatctgagccggtcgagcccctgtccccacccttcctgacctgtccttttcccacaggcctctgggggcaggtggcaaggcctggccgggccttccttcctggccttagccacctggctctgtctgcagcaggggcaggctgctttcttatccatttccctggaggcgggcccccctggcagcagtattggaggggctacaggcagctggagaaaggggcccagccgctgacccactcactcaggacctcactcactagccccgctttgggccccctcctgtgacctcagggtttggcccatggggccctcccaggcccctgccccaactgattctgcccagataatcgtgtctcctgcctccactcagctgcttctcagtcatgaatgtggccatggccccggggtccccttgctgctgtgggctccctgtccctgggcaggagtgctggtgaggaggtggagccttttgaggggggccttccctcagctgtttccccacactggggggctgggccctgcctccccgttaccctccttccctgcaggcctggagcctgtagggctggactgaggttcaggtctccccccagctgtctcacccccactttgtccccactctagagcagggaggcagtgggggaggagttgtgtctcgtcttctgtctccatgtggtttttgggtgtttttcttgttgtgtcctggattccgataaaattaaagaaattgcttcctcaa

SEQ ID NO: 356367 - DNA, 1779 bp, Homo sapiens
tgtctcgaatctacaaggtgggagcgggtgagaacccagcgactgcgcggctgaatgacagggagtagccccgccgcctccaacatggcagcttctatccagcgaagccgggtccccgcttccgggttccgtactgtcggccaggctacttccggcagcgcgatggctgggttcccgggactcgaacggaagttccggcgggggcggccgagggggaagagtgtgtctgcgggagaaagaggagaatcgcccaagcggcctcggaagtcccagggagtggaggcccccgccgtggagccgtgtggtgtatgtgtggtaacaccatgtctgtgcccctgctcaccgatgctgccaccgtgtctggagctgagcgggaaacggccgcggcacagctgggctgacgccctctccaccatccggctccctcacgtcaagtacatctgtccccatgcgcctaggatccctgtgaccctcaacatgaagatggtgatgccctcctggtttgacctgatggggctgagtccagatgccccagaggacgaggctggcatcaagaaggcagcagagaacatcaaggccttgattgagcatgaaatgaagaacgggatccctgccaatcgaatcgtcctgggaggcttttcacagggcggggccctgtccctctacacggccctcacctgcccccaccctctggctggcatcgtggcgttgagctgctggctgcctctgcaccgggccttcccccaggcagctaatggcagtgccaaggacctggccatactccagtgccatggggagctggaccccatggtgcccgtacggtttggggccctgacggctgagaagctccggtctgttgtcacacctgccagggtccagttcaagacatacccgggtgtcatgcacagctcctgtcctcaggagatggcagctgtgaaggaatttcttgagaagctgctgcctcctgtctaactagtcgctggccccagtgcagtaccccagctcatgggggactcagcaagcaagcgtggcaccatcttggatctgagccggtcgagcccctgtccccacccttcctgacctgtccttttcccacaggcctctgggggcaggtggcaaggcctggccgggccttccttcctggccttagccacctggctctgtctgcagcaggggcaggctgctttcttatccatttccctggaggcgggcccccctggcagcagtattggaggggctacaggcagctggagaaaggggcccagccgctgacccactcactcaggacctcactcactagccccgctttgggccccctcctgtgacctcagggtttggcccatggggccctcccaggcccctgccccaactgattctgcccagataatcgtgtctcctgcctccactcagctgcttctcagtcatgaatgtggccatggccccggggtccccttgctgctgtgggctccctgtccctgggcaggagtgctggtgaggaggtggagccttttgaggggggccttccctcagctgtttccccacactggggggctgggccctgcctccccgttaccctccttccctgcaggcctggagcctgtagggctggactgaggttcaggtctccccccagctgtctcacccccactttgtccccactctagagcagggaggcagtgggggaggagttgtgtctcgtcttctgtctccatgtggtttttgggtgtttttcttgttgtgtcctggattccgataaaattaaagaaattgcttcctcaa

SEQ ID NO: 356368 - DNA, 1366 bp, Homo sapiens
ctcctgagcatgatgggccctctggctctctttccccaggcctaggatccctgtgaccctcaacatgaagatggtgatgccctcctggtttgacctgatggggctgagtccagatgccccagaggacgaggctggcatcaagaaggcagcagagaacatcaaggccttgattgagcatgaaatgaagaacgggatccctgccaatcgaatcgtcctgggaggcttttcacagggcggggccctgtccctctacacggccctcacctgcccccaccctctggctggcatcgtggcgttgagctgctggctgcctctgcaccgggccttcccccaggcagctaatggcagtgccaaggacctggccatactccagtgccatggggagctggaccccatggtgcccgtacggtttggggccctgacggctgagaagctccggtctgttgtcacacctgccagggtccagttcaagacatacccgggtgtcatgcacagctcctgtcctcaggagatggcagctgtgaaggaatttcttgagaagctgctgcctcctgtctaactagtcgctggccccagtgcagtaccccagctcatgggggactcagcaagcaagcgtggcaccatcttggatctgagccggtcgagcccctgtccccacccttcctgacctgtccttttcccacaggcctctgggggcaggtggcaaggcctggccgggccttccttcctggccttagccacctggctctgtctgcagcaggggcaggctgctttcttatccatttccctggaggcgggcccccctggcagcagtattggaggggctacaggcagctggagaaaggggcccagccgctgacccactcactcaggacctcactcactagccccgctttgggccccctcctgtgacctcagggtttggcccatggggccctcccaggcccctgccccaactgattctgcccagataatcgtgtctcctgcctccactcagctgcttctcagtcatgaatgtggccatggccccggggtccccttgctgctgtgggctccctgtccctgggcaggagtgctggtgaggaggtggagccttttgaggggggccttccctcagctgtttccccacactggggggctgggccctgcctccccgttaccctccttccctgcaggcctggagcctgtagggctggactgaggttcaggtctccccccagctgtctcacccccactttgtccccactctagagcagggaggcagtgggggaggagttgtgtctcgtcttctgtctccatgtggtttttgggtgtttttcttgttgtgtcctggattccgataaaattaaagaaattgcttcctcaa

SEQ ID NO: 356369 - DNA, 1618 bp, Homo sapiens
tgtctcgaatctacaaggtgggagcgggtgagaacccagcgactgcgcggctgaatgacagggagtagccccgccgcctccaacatggcagcttctatccagcgaagccgggtccccgcttccgggttccgtactgtcggccaggctacttccggcagcgcgatggctgggttcccgggactcgaacggaagttccggcgggggcggccgagggggaagagtgtgtctgcgggagaaagaggagaatcgcccaagcggcctcggaagtcccagggagtggaggcccccgccgtggagccgtgtggtgtatgtgtggtaacaccatgtctgtgcccctgctcaccgatgctgccaccgtgtctggagctgagcgggaaacggccgcggttatttttttacatggacttggagacacagggcacagctgggctgacgccctctccaccatccggctccctcacgtcaagtacatctgtccccatgcggcggggccctgtccctctacacggccctcacctgcccccaccctctggctggcatcgtggcgttgagctgctggctgcctctgcaccgggccttcccccaggcagctaatggcagtgccaaggacctggccatactccagtgccatggggagctggaccccatggtgcccgtacggtttggggccctgacggctgagaagctccggtctgttgtcacacctgccagggtccagttcaagacatacccgggtgtcatgcacagctcctgtcctcaggagatggcagctgtgaaggaatttcttgagaagctgctgcctcctgtctaactagtcgctggccccagtgcagtaccccagctcatgggggactcagcaagcaagcgtggcaccatcttggatctgagccggtcgagcccctgtccccacccttcctgacctgtccttttcccacaggcctctgggggcaggtggcaaggcctggccgggccttccttcctggccttagccacctggctctgtctgcagcaggggcaggctgctttcttatccatttccctggaggcgggcccccctggcagcagtattggaggggctacaggcagctggagaaaggggcccagccgctgacccactcactcaggacctcactcactagccccgctttgggccccctcctgtgacctcagggtttggcccatggggccctcccaggcccctgccccaactgattctgcccagataatcgtgtctcctgcctccactcagctgcttctcagtcatgaatgtggccatggccccggggtccccttgctgctgtgggctccctgtccctgggcaggagtgctggtgaggaggtggagccttttgaggggggccttccctcagctgtttccccacactggggggctgggccctgcctccccgttaccctccttccctgcaggcctggagcctgtagggctggactgaggttcaggtctccccccagctgtctcacccccactttgtccccactctagagcagggaggcagtgggggaggagttgtgtctcgtcttctgtctccatgtggtttttgggtgtttttcttgttgtgtcctggattccgataaaattaaagaaattgcttcctcaa

SEQ ID NO: 356370 - DNA, 644 bp, Homo sapiens
  misc_feature (283)..(283): n is a, c, g, or t
  misc_feature (289)..(291): n is a, c, g, or t
aactataggcataggtacgaggctgggtgttaatcggccgagagaggagaatcgcccaagcggcctcggaagtcccagggagtggaggcccccgccgtggagccgtgtggtgtatgtgtggtaacaccatgtctgtgcccctgctcaccgatgctgccaccgtgtctggagctgagcgggaaacggccgcgtatttttttacatggactctgcgcagcaccaccaaggggcccacatgcccttggggccctggcgaacgccccccttccatccccaccccaantccggnnnctccctcaaaaaaaccccccccggggggggcgccccccaatttttttccccccaaaaaaaaaaacccgggggctctttttttaaaacccaaacttcctgggtatcccccaaaattgggccgcctaggcatccctgtgcaccctcaacatgaagatggtgatgccctcctggtttgacctgatggggctgagtccagatgccccaggaggcacgaggctggggcaattccaaaaagggcaaacaaggggggggcccaaaaagggccccacaaaggcaaaacgcggaaaaaaaccccaaagtttccaaaaacggggggccccccctttttggcaaattctgggaacgccaacttg

SEQ ID NO: 356371 - DNA, 1108 bp, Homo sapiens
ttcccgagtatcgcgagaagcgcgcttagtctgcacgccgaggtccgcgctgtgtcccgtgttttctgcgtgagaggaaaagatgctagaaccacaggagaatggcgtgattgacctaccagattatgagcatgtagaagatgaaacttttcctcctttcccacctccagcctctccagagagacaagatggtgaaggaactgagcctgatgaagagtcaggaaatggagcacctgttcctgtacctccaaagagaacagttaaaagaaatatacccaagctggatgctcagagattaatttcagagagaggacttccagccttaaggcatgtatttgataaggcaaaattcaaaggtaaaggtcatgaggctgaagacttgaagatgctaatcagacacatggagcactgggcacataggctattccctaaactgcagtttgaggattttattgacagagttgaatacctgggaagtaaaaaggaagttcagacctgtttaaaacgaattcgacttgatctccctattttacatgaagattttgttagcaataatgatgaagttgcggagaataatgaacatgatgtcacttctactgaattagatccctttctgacaaacttatctgaaagtgagatgtttgcttctgagttaagtagaagcctaacagaagagcaacaacaaagaattgagagaaataaacaactggccttggaaagaaggcaggcaaagctgctgagtaatagtcagaccctaggaaatgatatgttaatgaatacacccagggcacacacggttgaagaggttaatactgatgaggatcaaaaggaggagtcaaatggattaaacgaagacattctggacaatccatgtaatgatgctattgccaatactttaaatgaagaggaaacactgctggaccagtcttttaaaaatgtgcaacagcaacttgatgctacatccagaaatattactgaagctagataagtttccattaagagaaaatgtatctgttaagtcatcgtcctgcaagcttggcgttactatgtattttttcttcttggagtgaaaatccttagatagtaaaactgttatagattattgttt

SEQ ID NO: 356372 - DNA, 821 bp, Homo sapiens
actgcctgggggcggggtccgtcgcggacgccgtggcgccctctgtcgccccgaggcaagcaggtggacccagctgagaagaagtctgtgtcgctgtgtggtgagctctccaggccaggtgccgcgcggcctccacctctgcggtcctttgccgtgtgtactgcgagagtgaagaccattctcattaatcagactgtcgacattccagaaaatgtcaacattactctgaagggacacacagttatcgtgaatggccccagaggaaccctgcggagggacttcaatcacatcaatgtagaactcagtcttcttggaaagaaaaaaaaagaggctctggttgacaaatggtggggtaacagaaaagaactggctaccgttcggactatttgtagtcatgtacagaacatgatcaagggtgttacactgggcttccgttacaagatgaggtctgtgtatgcttacttccccatcatcgtcgttatcccggagaatgggtctgttgttgaaatccgaaatttcttgggtgaaaaatacatccgcagggtgcggatgagaccaggtgttgcttgttcagtatctcaagcccagaaagatgaattaatctttgaaggaaatgacatcgagcttgtttcaaattcagcggctttgattcagcaagccacaacagtttaaaacaaggatatcaggaaatttttgaatggtatctatgtctctgaaaaaggaactgttcagcaggatgatgacataagatctaagagttatccagctacagaaagaagacgccagatgactcctaagacctacttgtgatatttaaatga

SEQ ID NO: 356373 - DNA, 204 bp, Homo sapiens
actgcctgggggcggggtccgtcgcggacgccgtggcgccctctgtcgccccgaggcaagcaggtggacccagctgagaagaagtctgtgtcgctgtgtggtgagctctccaggccaggtgccgcgcggcctccacctctgcgtgtcaaagacattaggtgtacagaacaaaggaaacgtgtacagaacaaaggaaacatctac

SEQ ID NO: 356374 - DNA, 1177 bp, Homo sapiens
actgcctgggggcggggtccgtcgcggacgccgtggcgccctctgtcgccccgaggcaagcaggtggacccagctgagaagaagtctgtgtcgctgtgtggtgagctctccaggccaggtgccgcgcggcctccacctctgcgaggaaaagatgctagaaccacaggagaatggcgtgattgacctaccagattatgagcatgtagaagatgaaacttttcctcctttcccacctccagcctctccagagagacaagatggtgaaggaactgagcctgatgaagagtcaggaaatggagcacctgttcctgtacctccaaagagaacagttaaaagaaatatacccaagctggatgctcagagattaatttcagagagaggacttccagccttaaggcatgtatttgataaggcaaaattcaaaggtaaaggtcatgaggctgaagacttgaagatgctaatcagacacatggagcactgggcacataggctattccctaaactgcagtttgaggattttattgacagagttgaatacctgggaagtaaaaaggaagttcagacctgtttaaaacgaattcgacttgatctccctattttacatgaagattttgttagcaataatgatgaagttgcggagaataatgaacatgatgtcacttctactgaattagatccctttctgacaaacttatctgaaagtgagatgtttgcttctgagttaagtagaagcctaacagaagagcaacaacaaagaattgagagaaataaacaactggccttggaaagaaggcaggcaaagctgctgagtaatagtcagaccctaggaaatgatatgttaatgaatacacccagggcacacacggttgaagaggttaatactgatgaggatcaaaaggaggagtcaaatggattaaacgaagacattctggacaatccatgtaatgatgctattgccaatactttaaatgaagaggaaacactgctggaccagtcttttaaaaatgtgcaacagcaacttgatgctacatccagaaatattactgaagctagataagtttccattaagagaaaatgtatctgttaagtcatcgtcctgcaagcttggcgttactatgtattttttcttcttggagtgaaaatccttagatagtaaaactgttatagattattgttt

SEQ ID NO: 356375 - DNA, 1293 bp, Homo sapiens
actgcctgggggcggggtccgtcgcggacgccgtggcgccctctgtcgccccgaggcaagcaggtggacccagctgagaagaagtctgtgtcgctgtgtgaggaaaagatgctagaaccacaggagaatggcgtgattgacctaccagattatgagcatgtagaagatgaaacttttcctcctttcccacctccagcctctccagagagacaagatggtgaaggaactgagcctgatgaagagtcaggaaatggagcacctgttcctgtacctccaaagagaacagttaaaagaaatatacccaagctggatgctcagagattaatttcagagagaggacttccagccttaaggcatgtatttgataaggcaaaattcaaaggtaaaggtcatgaggctgaagacttgaagatgctaatcagacacatggagcactgggcacataggctattccctaaactgcagtttgaggattttattgacagagttgaatacctgggaagtaaaaaggaagttcagacctgtttaaaacgaattcgacttgatctccctattttacatgaagattttgttagcaataatgatgaagttgcggagaataatgaacatgatgtcacttctactgaattagatccctttctgacaaacttatctgaaagtgagatgtttgcttctgagttaagtagaagcctaacagaagagcaacaacaaagaattgagagaaataaacaactggccttggaaagaaggcaggcaaagctgctgagtaatagtcagaccctaggaaatgatatgttaatgaatacacccagggcacacacggttgaagaggttaatactgatgaggatcaaaaggaggagtcaaatggattaaacgaagacattctggacaatccatgtaatgatgctattgccaatactttaaatgaagaggaaacactgctggaccagtcttttaaaaatgtgcaacagcaacttgatgctacatccagaaatattactgaagctagataagtttccattaagagaaaatgtatctgttaagtcatcgtcctgcaagcttggcgttactatgtattttttcttcttggagtgaaaatccttagatagtaaaactgttatagattattgtttaaaatctgataatctggtatttatttataattatgcttgtcactttagttaaatctatttgttctctttagtgtttgtttttatataggtatttcttcataaaatgattaggaggtaataagcacaaaaacaaaaaaaaactggcctcgatggactaca

SEQ ID NO: 356376 - DNA, 1363 bp, Homo sapiens
aagctccataaatcacttcattagcggcacaagcgcactaagtctgtgagacatggggtctgggctggtgtcctagggatatcctgggttgagacggaattgcattgcgtaattacatccaaccagagtagaaaatagagcgctgccagtgtgagccatacccgagactgtatcgtagacaactgtatcacaagatagagaagcttcttgcacgtgctctattcacctaggcattcctagtacatactacgcgaagatcacgaacgacggagtggctgatagtgaaactctgaagcgctcgcactggacacagtcaggaaatggagcacctgttcctgtacctccaaagagaacagttaaaagaaatatacccaagctggatgctcagagattaatttcagagagaggacttccagccttaaggcatgtatttgataaggcaaaattcaaaggtaaaggtcatgaggctgaagacttgaagatgctaatcagacacatggagcactgggcacataggctattccctaaactgcagtttgaggattttattgacagagttgaatacctgggaagtaaaaaggaagttcagacctgtttaaaacgaattcgacttgatctccctattttacatgaagattttgttagcaataatgatgaagttgcggagaataatgaacatgatgtcacttctactgaattagatccctttctgacaaacttatctgaaagtgagatgtttgcttctgagttaagtagaagcctaacagaagagcaacaacaaagaattgagagaaataaacaactggccttggaaagaaggcaggcaaagctgctgagtaatagtcagaccctaggaaatgatatgttaatgaatacacccagggcacacacggttgaagaggttaatactgatgaggatcaaaaggaggagtcaaatggattaaacgaagacattctggacaatccatgtaatgatgctattgccaatactttaaatgaagaggaaacactgctggaccagtcttttaaaaatgtgcaacagcaacttgatgctacatccagaaatattactgaagctagataagtttccattaagagaaaatgtatctgttaagtcatcgtcctgcaagcttggcgttactatgtattttttcttcttggagtgaaaatccttagatagtaaaactgttatagattattgtttaaaatctgataatctggtatttatttataattatgcttgtcactttagttaaatctatttgttctctttagtgtttgtttttatataggtatttcttcataaaatgattaggaggtaataagcacaaaaacaaaaaaaaactggcctcgatggactaca

SEQ ID NO: 356377 - DNA, 359 bp, Homo sapiens
aaaatgtgcaacagcaacttgatgctacatccagaaatattactgaagctagataagtttccattaagagaaaatgtatctgttaagtcatcgtcctgcaagcttggcgttactatgtattttttcttcttggagtgaaaatccttagatagtaaaactgttatagattattgtttaaaatctgataatctggtatttatttataattatgcttgtcactttagttaaatctatttgttctctttagtgtttgtttttatataggtatttcttcataaaatgattaggaggtaataagcagtttctgctgctggtctgtcattgaatgccttgttttcactaagttgggaggttttgtt

SEQ ID NO: 356378 - DNA, 937 bp, Homo sapiens
  misc_feature (790)..(790): n is a, c, g, or t
  misc_feature (792)..(792): n is a, c, g, or t
  misc_feature (795)..(796): n is a, c, g, or t
  misc_feature (798)..(799): n is a, c, g, or t
  misc_feature (806)..(806): n is a, c, g, or t
  misc_feature (810)..(810): n is a, c, g, or t
  misc_feature (816)..(816): n is a, c, g, or t
  misc_feature (829)..(829): n is a, c, g, or t
ttcccgagtatcgcgagaagcgcgcttagtctgcacgccgaggtccgcgctgtgtcccgtgttttctgcgtgagaggaaaagatgctagaaccacaggagaatggcgtgattgacctaccagattatgagcatgtagaagatgaaacttttcctcctttcccacctccagcctctccagagagacaagatggtgaaggaactgagcctgatgaagagtcaggaaatggagcacctgttcctgtacctccaaagagaacagttaaaagaaatatacccaagctggatgctcagagattaatttcagagagaggacttccagccttaaggcatgtatttgataaggcaaaattcaaaggtaaaggtcatgaggctgaagacttgaagatgctaatcagacacatggagcactgggcacataggctattccctaaactgcagtttgaggattttattgacagagttgaatacctgggaagtaaaaaggaagttcagacctgtttaaaacgaattcgacttgatctccctattttacatgaagattttgttagcaataatgatgaagttgcggagaataatgaacatgatgtcacttctactgaattagatccctttctgacaaacttatctgaaagtgagatgtttgcttctgagttaagtagaagcctaacagaagagcaacaacaaagaattgagagaaataaacaactggccttggaaagaaggcaggcaaagctgctgagtaatagtcagaccctaggaaatgattgtttgataccccgggcacacggngnagnntnntggtggntcangggggncatggttagaganttggacctggtgtgtttgcctttatggagaacggcgcgtttaaggcgtgtgtcaattaggattaaaatgccaggggttttgggagagttaaaagggggggtgggtggc

SEQ ID NO: 356379 - DNA, 778 bp, Homo sapiens
actgcctgggggcggggtccgtcgcggacgccgtggcgccctctgtcgccccgaggcaagcaggtggacccagctgagaagaagtctgtgtcgctgtgtggtcctttgccgtgtgtactgcgagagtgaagaccattctcattaatcagactgtcgacattccagaaaatgtcaacattactctgaagggacacacagttatcgtgaatggccccagaggaaccctgcggagggacttcaatcacatcaatgtagaactcagtcttcttggaaagaaaaaaaaagaggctctggttgacaaatggtggggtaacagaaaagaactggctaccgttcggactatttgtagtcatgtacagaacatgatcaagggtgttacactgggcttccgttacaagatgaggtctgtgtatgcttacttccccatcatcgtcgttatcccggagaatgggtctgttgttgaaatccgaaatttcttgggtgaaaaatacatccgcagggtgcggatgagaccaggtgttgcttgttcagtatctcaagcccagaaagatgaattaatctttgaaggaaatgacatcgagcttgtttcaaattcagcggctttgattcagcaagccacaacagtttaaaacaaggatatcaggaaatttttgaatggtatctatgtctctgaaaaaggaactgttcagcaggatgatgacataagatctaagagttatccagctacagaaagaagacgccagatgactcctaagacctacttgtgatatttaaatga

SEQ ID NO: 356380 - DNA, 1267 bp, Homo sapiens
ttcccgagtatcgcgagaagcgcgcttagtctgcacgccgaggtccgcgctgtgtcccgtgttttctgcgtgagaggaaaagatgctagaaccacaggagaatggcgtgattgacctaccagattatgagcatgtagaagatgaaacttttcctcctttcccacctccagcctctccagagagacaagatggtgaaggaactgagcctgatgaagagtcaggaaatggagcacctgttcctgtacctccaaagagaacagttaaaagaaatatacccaagctggatgctcagagattaatttcagagagaggacttccagccttaaggcatgtatttgataaggcaaaattcaaaggtaaaggtcatgaggctgaagacttgaagatgctaatcagacacatggagcactgggcacataggctattccctaaactgcagtttgaggattttattgacagagttgaatacctgggaagtaaaaaggaagttcagacctgtttaaaacgaattcgacttgatctccctattttacatgaagattttgttagcaataatgatgaagttgcggagaataatgaacatgatgtcacttctactgaattagatccctttctgacaaacttatctgaaagtgagatgtttgcttctgagttaagtagaagcctaacagaagagcaacaacaaagaattgagagaaataaacaactggccttggaaagaaggcaggcaaagctgctgagtaatagtcagaccctaggaaatgatatgttaatgaatacacccagggcacacacggttgaagaggttaatactgatgaggatcaaaaggaggagtcaaatggattaaacgaagacattctggacaatccatgtaatgatgctattgccaatactttaaatgaagaggaaacactgctggaccagtcttttaaaaatgtgcaacagcaacttgatgctacatccagaaatattactgaagctagataagtttccattaagagaaaatgtatctgttaagtcatcgtcctgcaagcttggcgttactatgtattttttcttcttggagtgaaaatccttagatagtaaaactgttatagattattgtttaaaatctgataatctggtatttatttataattatgcttgtcactttagttaaatctatttgttctctttagtgtttgtttttatataggtatttcttcataaaatgattaggaggtaataagcacaaaaacaaaaaaaaactggcctcgatggactaca

SEQ ID NO: 356381 - DNA, 1523 bp, Homo sapiens
actgcctgggggcggggtccgtcgcggacgccgtggcgccctctgtcgccccgaggcaagcaggtggacccagctgagaagaagtctgtgtcgctgtgtggtgagctctccaggccaggtgccgcgcggcctccacctctgcggtaaccggcctgcccccgacccctgtccccaagccgagccgtgttgacgaaaatgaaataacaaaataaataaggaaaaggaccccttcctgtgtccagaggagaggcagcgtggggaataggaaacttgtcgagaggctcctttgagcccaacaaactgacgcatataaattttgtttgtttaatgaggaaaagatgctagaaccacaggagaatggcgtgattgacctaccagattatgagcatgtagaagatgaaacttttcctcctttcccacctccagcctctccagagagacaagatggtgaaggaactgagcctgatgaagagtcaggaaatggagcacctgttcctgtacctccaaagagaacagttaaaagaaatatacccaagctggatgctcagagattaatttcagagagaggacttccagccttaaggcatgtatttgataaggcaaaattcaaaggtaaaggtcatgaggctgaagacttgaagatgctaatcagacacatggagcactgggcacataggctattccctaaactgcagtttgaggattttattgacagagttgaatacctgggaagtaaaaaggaagttcagacctgtttaaaacgaattcgacttgatctccctattttacatgaagattttgttagcaataatgatgaagttgcggagaataatgaacatgatgtcacttctactgaattagatccctttctgacaaacttatctgaaagtgagatgtttgcttctgagttaagtagaagcctaacagaagagcaacaacaaagaattgagagaaataaacaactggccttggaaagaaggcaggcaaagctgctgagtaatagtcagaccctaggaaatgatatgttaatgaatacacccagggcacacacggttgaagaggttaatactgatgaggatcaaaaggaggagtcaaatggattaaacgaagacattctggacaatccatgtaatgatgctattgccaatactttaaatgaagaggaaacactgctggaccagtcttttaaaaatgtgcaacagcaacttgatgctacatccagaaatattactgaagctagataagtttccattaagagaaaatgtatctgttaagtcatcgtcctgcaagcttggcgttactatgtattttttcttcttggagtgaaaatccttagatagtaaaactgttatagattattgtttaaaatctgataatctggtatttatttataattatgcttgtcactttagttaaatctatttgttctctttagtgtttgtttttatataggtatttcttcataaaatgattaggaggtaataagcacaaaaacaaaaaaaaactggcctcgatggactaca

SEQ ID NO: 356382 - DNA, 769 bp, Homo sapiens
gcagacagatcgaatcgagccggtaccccctagttttagaagtttcaatagcaataatgatgaagttgcggagaataatgaacatgatgtcacttctactgaattagatccctttctgacaaacttatctgaaagtgagatgtttgcttctgagttaagtagaagcctaacagaagagcaacaacaaagaattgagagaaataaacaactggccttggaaagaaggcaggcaaagctgctgagtaatagtcagaccctaggaaatgatatgttaatgaatacacccagggcacacacggttgaagaggttaatactgatgaggatcaaaaggaggagtcaaatggattaaacgaagacattctggacaatccatgtaatgatgctattgccaatactttaaatgaagaggaaacactgctggaccagtcttttaaaaatgtgcaacagcaacttgatgctacatccagaaatattactgaagctagataagtttccattaagagaaaatgtatctgttaagtcatcgtcctgcaagcttggcgttactatgtattttttcttcttggagtgaaaatccttagatagtaaaactgttatagattattgtttaaaatctgataatctggtatttatttataattatgcttgtcactttagttaaatctatttgttctctttagtgtttgtttttatataggtatttcttcataaaatgattaggaggtaataagcacaaaaacaaaaaaaaactggcctcgatggactaca

SEQ ID NO: 356383 - DNA, 258 bp, Homo sapiens
aatagcttatgccttttaatgcaaattcttggtgaatttaggagcgcgtcttctttttcctttaaaacgcacttgcaactgctgcgaatgagacgcgtgcattcagaccaacctgagtctgtcccttccacgctgcagtcctcaaacttggccccaacaaactatttctattcgttttgcctgttttctcctttaggttgaaaagctgacagcgggccccagacactgagggggcgccttcccagcttggcttcccct

SEQ ID NO: 356384 - DNA, 312 bp, Homo sapiens
gatttgacttttcaatgttttaagatccttcccagctctgaatttttatgattataacattgtagcttatctgccacttttcttgacattcttgcatctgataggaacttttagtagtatatccttagattggcatttcatttactggaactgattagtgtcaaatgcaaacttaaacatttcactctaaacctccagtcttaaatgtaagactcctaccctttatttcctagctttaatgagatctctatccattaattcatttatacactttttttttttaagagatgtgctctcgctctattgcccaga

SEQ ID NO: 356385 - DNA, 438 bp, Homo sapiens
caacgacaaaataaaaatgatctctctcacctctcagcttggagatacagaccatttactgggctgcttcctgacccctgtctgcaaccccacctaaaggactgcccacgccaaaggcagacgcgaatccgctcaacacaagttgaccaagtttttcgcctggctaagcggcaggggcgtcccctcctccctgcgccacctccccaccgactggcttcccctgacatttctcatgcgccccaccctgggcagtttgctttgacatttcagtgcctcattgctcaagctaccagcacgggcgtagccgacgccgggagagcccacagagtgcgagctccatggtgcctgtcaccagcccccgccaagggtcataaagcctggcaggagccgcggcgaacccgggagcggcggcgtcgcgggcaggctgcaggcggccgc

SEQ ID NO: 356386 - DNA, 648 bp, Homo sapiens
  misc_feature (504)..(504): n is a, c, g, or t
  misc_feature (509)..(509): n is a, c, g, or t
  misc_feature (514)..(514): n is a, c, g, or t
  misc_feature (532)..(532): n is a, c, g, or t
  misc_feature (627)..(627): n is a, c, g, or t
  misc_feature (648)..(648): n is a, c, g, or t
agcctcttcttcctgggggaactctgttcttcatccaaacctttgatcaccctcagagattgtccagaaggtacgaaatggtcagcggccatatttccggccaagcattgaccggacccaactgaatgaagagctagttttgctgatggagcgatgttgggctcaggacccagctgagcggccagactttggacagattaagggcttcattcggcgctttaacaagtgagagggcattatggggcaggggcttcccagggatagaagactcattagtcctagtgcatgaagtggggcaggtgggaccagagggtgggttggataggaagtcctgggaatcttcagaatcttagagcaagtgccttatcctggcctccctctagggagggtggcaccagcatattggacaacctcctgctgcgcatggaacagtatgccaataacttggagaagctggtggaggaacgcacacaggcctatctgagggggagagctgacagctgngcttngcagngtccattactcagtgcantgtgctcacagattgcagagaagcacccatgcagagtgcactcttatgactgatactgcttgtgcataatgcaacttgtgctcaggtagagctgngcgtgtcatgaaaccttatan

SEQ ID NO: 356387 - DNA, 4158 bp, Homo sapiens
cggccacataagatattatctacacaaaagcttatttaggaatgaccaatgagctcaacttaaatttattagaaatctgattagcattataaatcaactgacttttaggagcataggctttggcgctacagggatctggcttgaacctcattgaggccactgattggtgagtgaccttaagcaagtctctttaccttgttagggcacaatttcctctcggaattgtgaaatgggtttaattacaccagcttacatcccaaccatcagcaagtcctcttgtatgtaaccatctccaacacagaaaggggatctgcccatgttctaccatcctcacctttctccaagccactacaacctctcacaacagccttccaattggtctccctaaactcttatcccccctacaccccgttctcagtcctcagtccttgccctaggctggtagcccactccttgcccgccccccgccttcctcccatctccccctcctctccccggcccccagcaccttctgcatcccagcctacctagcctactcctcctcttcctggccctcttccccaggctccaggctggggggtgctcgcgtctcccctgtaggccagagcagccccaagttctgggggcggtggggctgctgctttatccccatggcgctgccatcacttctgctgttggtggcagccctggcaggtggggtgcgtcctcccggggcgcggaacctgacgctggcggtggtgctgccagaacacaacctgagctatgcctgggcctggccacgggtgggacccgctgtggcactagctgtggaggctctgggccgggcactgcccgtggacctgcggtttgtcagctccgaactggaaggcgcctgctctgagtacctggcaccgctgagcgctgtggacctcaagctgtaccatgaccccgacctgctgttaggtcccggttgcgtgtaccctgctgcctctgtggcccgctttgcctcccactggcgccttcccctgctgactgcgggtgctgtggcctctggtttttcggctaagaatgaccattatcgtaccctggttcgcactggcccctctgctcccaagctgggtgagtttgtggtgacactacacgggcacttcaattggactgcccgtgctgccttgctgtacctggatgctcgcacagatgaccggcctcactacttcaccatcgagggcgtctttgaggccctgcagggcagcaacctcagtgtgcagcaccaggtgtatgcccgagagccagggggccccgagcaggccacccacttcatccgggccaacgggcgcattgtgtatatctgcggccctctggagatgctgcatgagatcctgcttcaggcccagagggagaatctgaccaatggggattatgtcttcttttacctggatgtctttggggagagtctccgtgcaggccccacacgtgctacaggccggccctggcaggacaatcgcacccgggaacaggcccaggccctcagagaggcctttcagactgtattggtgatcacgtaccgagaacccccaaatcctgagtatcaggaattccagaatcgtctgctgataagagcccgggaagactttggtgtggagctgggcccttccctgatgaacctcatcgctggctgcttctatgatgggatcctgctatatgctgaagtcctgaatgagacaatacaggaaggaggcacccgggaggatggacttcgaattgtggaaaagatgcagggacgaagatatcacggtgtaactgggctggttgtcatggacaagaacaatgaccgagagactgactttgtcctctgggccatgggagacctggattctggggactttcagcctgcagcccactactcgggagctgagaagcagatttggtggacgggacggcctattccctgggtgaagggggctcctccctcggacaatcccccctgtgcctttgacttggacgacccatcctgtgataaaactccactttcaaccctggcaattgtggctctgggcacaggaatcaccttcatcatgtttggtgtttccagcttcctaattttccgaaagctgatgctggagaaggagctggctagcatgttgtggcgtattcgctgggaagaactgcagtttggcaactcagagcgttatcacaaaggtgcaggcagtcgcctcacactgtcgctgcggggatccagttacggctcgctcatgacagcccatgggaaataccagatctttgccaacaccggtcacttcaagggaaatgttgtcgccatcaaacatgtgaataagaagcgcattgagctgacccggcaggttctgtttgaactcaaacatatgagagatgttcagttcaaccatctcactcgcttcattggcgcctgcatagaccctcccaacatttgcattgtcactgaatactgtcctcgtgggagtttacaggatattctagaaaatgacagcatcaacttggactggatgtttcgttattcactcattaatgaccttgttaagggcatggcctttctccacaacagcattatttcatcgcatgggagtctcaagtcctccaactgtgtggtggatagtcgttttgtgctcaaaatcacagactatggcctggccagcttccgatcaactgctgaacctgatgacagccatgccctctatgccaagaagctgtggactgccccagaactgctcagtgggaaccccttgccaaccacaggcatgcagaaggctgacgtctatagctttgggatcatcctgcaggagatagcacttcgcagtggtcctttctacttggagggcctggacctcagccccaaagagattgtccagaaggtacgaaatggtcagcggccatatttccggccaagcattgaccggacccaactgaatgaagagctagttttgctgatggagcgatgttgggctcaggacccagctgagcggccagactttggacagattaagggcttcattcggcgctttaacaaggagggtggcaccagcatattggacaacctcctgctgcgcatggaacagtatgccaataacttggagaagctggtggaggaacgcacacaggcctatctggaggaaaaacgcaaggctgaagctctgctctaccaaatcctaccccattcagtggcagagcagttaaaacggggagagactgtacaggctgaggcctttgacagtgttaccatctacttcagtgacattgttggcttcacagcattgtcagcagagagcacccccatgcaggtagtgacacttcttaatgacctgtatacctgctttgatgccataattgacaactttgatgtctacaaggtggagacgattggggatgcttacatggtggtatctggcctcccaggccgaaatggtcaacgccatgcaccagaaattgctcgtatggccctagcattactagatgcagtttcttcctttcgcatccgccaccgaccccatgaccagctgaggctacgcataggggtccatactggtaaggctgactctcactccagccctagtctccacctttcccagactctcccaacctgtttcttctcaaagggccagtctgtgctggggttgttggcctgaagatgccccgttattgtctttttggagacacagtgaacactgcttctcgaatggagtctaatggtcaagcgctgaagatccatgtctcctctaccaccaaggatgccctagatgagctaggatgcttccagctagagcttcggggggatgtggaaatgaagggaaaaggaaagatgcgaacatactggctcttaggagagcggaaaggacctcctggactcctgtaaacccccattctttccaagtcagatagtcttctgctgctggtacctgggtgggcaatggccaccatgtctgcacacaccagaaatggacattttcatatgcaatggaaaacagccacaaaaaaacctaccttatatggaagttgtagccctctgcagctcagccctgtacatatacctgtccctctctggcttggtccccttcctccctactttctgtaaatatctgtatctaaaccagaatattttggtcaaatataaaacaataataaaaaaagttctgatgtcaaaatgtg

SEQ ID NO: 356388 - DNA, 4015 bp, Homo sapiens
cggccacataagatattatctacacaaaagcttatttaggaatgaccaatgagctcaacttaaatttattagaaatctgattagcattataaatcaactgacttttaggagcataggctttggcgctacagggatctggcttgaacctcattgaggccactgattggtgagtgaccttaagcaagtctctttaccttgttagggcacaatttcctctcggaattgtgaaatgggtttaattacaccagcttacatcccaaccatcagcaagtcctcttgtatgtaaccatctccaacacagaaaggggatctgcccatgttctaccatcctcacctttctccaagccactacaacctctcacaacagccttccaattggtctccctaaactcttatcccccctacaccccgttctcagtcctcagtccttgccctaggctggtagcccactccttgcccgccccccgccttcctcccatctccccctcctctccccggcccccagcaccttctgcatcccagcctacctagcctactcctcctcttcctggccctcttccccaggctccaggctggggggtgctcgcgtctcccctgtaggccagagcagccccaagttctgggggcggtggggctgctgctttatccccatggcgctgccatcacttctgctgttggtggcagccctggcaggtggggtgcgtcctcccggggcgcggaacctgacgctggcggtggtgctgccagaacacaacctgagctatgcctgggcctggccacgggtgggacccgctgtggcactagctgtggaggctctgggccgggcactgcccgtggacctgcggtttgtcagctccgaactggaaggcgcctgctctgagtacctggcaccgctgagcgctgtggacctcaagctgtaccatgaccccgacctgctgttaggtcccggttgcgtgtaccctgctgcctctgtggcccgctttgcctcccactggcgccttcccctgctgactgcgggtgctgtggcctctggtttttcggctaagaatgaccattatcgtaccctggttcgcactggcccctctgctcccaagctgggtgagtttgtggtgacactacacgggcacttcaattggactgcccgtgctgccttgctgtacctggatgctcgcacagatgaccggcctcactacttcaccatcgagggcgtctttgaggccctgcagggcagcaacctcagtgtgcagcaccaggtgtatgcccgagagccagggggccccgagcaggccacccacttcatccgggccaacgggcgcattgtgtatatctgcggccctctggagatgctgcatgagatcctgcttcaggcccagagggagaatctgaccaatggggattatgtcttcttttacctggatgtctttggggagagtctccgtgcaggccccacacgtgctacaggccggccctggcaggacaatcgcacccgggaacaggcccaggccctcagagaggcctttcagactgtattggtgatcacgtaccgagaacccccaaatcctgagtatcaggaattccagaatcgtctgctgataagagcccgggaagactttggtgtggagctgggcccttccctgatgaacctcatcgctggctgcttctatgatgggatcctgctatatgctgaagtcctgaatgagacaatacaggaaggaggcacccgggaggatggacttcgaattgtggaaaagatgcagggacgaagatatcacggtgtaactgggctggttgtcatggacaagaacaatgaccgagagactgactttgtcctctgggccatgggagacctggattctggggactttcagcctgcagcccactactcgggagctgagaagcagatttggtggacgggacggcctattccctgggtgaagggggctcctccctcggacaatcccccctgtgcctttgacttggacgacccatcctgtgataaaactccactttcaaccctggcaattgtggctctgggcacaggaatcaccttcatcatgtttggtgtttccagcttcctaattttccgaaagctgatgctggagaaggagctggctagcatgttgtggcgtattcgctgggaagaactgcagtttggcaactcagagcgttatcacaaaggtgcaggcagtcgcctcacactgtcgctgcggggatccagttacggctcgctcatgacagcccatgggaaataccagatctttgccaacaccggtcacttcaagggaaatgttgtcgccatcaaacatgtgaataagaagcgcattgagctgacccggcaggttctgtttgaactcaaacatatgagagatgttcagttcaaccatctcactcgcttcattggcgcctgcatagaccctcccaacatttgcattgtcactgaatactgtcctcgtgggagtttacagggcatggcctttctccacaacagcattatttcatcgcatgggagtctcaagtcctccaactgtgtggtggatagtcgttttgtgctcaaaatcacagactatggcctggccagcttccgatcaactgctgaacctgatgacagccatgccctctatgccaagaagctgtggactgccccagaactgctcagtgggaaccccttgccaaccacaggcatgcagaaggctgacgtctatagctttgggatcatcctgcaggagatagcacttcgcagtggtcctttctacttggagggcctggacctcagccccaaagagattgtccagaaggtacgaaatggtcagcggccatatttccggccaagcattgaccggacccaactgaatgaagagctagttttgctgatggagcgatgttgggctcaggacccagctgagcggccagactttggacagattaagggcttcattcggcgctttaacaaggagggtggcaccagcatattggacaacctcctgctgcgcatggaacagtatgccaataacttggagaagctggtggaggaacgcacacaggcctatctggaggaaaaacgcaaggctgaagctctgctctaccaaatcctaccccattcagtggcagagcagttaaaacggggagagactgtacaggctgaggcctttgacagtgttaccatctacttcagtgacattgttggcttcacagcattgtcagcagagagcacccccatgcaggtagtgacacttcttaatgacctgtatacctgctttgatgccataattgacaactttgatgtctacaaggtggagacgattggggatgcttacatggtggtatctggcctcccaggccgaaatggtcaacgccatgcaccagaaattgctcgtatggccctagcattactagatgcagtttcttcctttcgcatccgccaccgaccccatgaccagctgaggctacgcataggggtccatactgggccagtctgtgctggggttgttggcctgaagatgccccgttattgtctttttggagacacagtgaacactgcttctcgaatggagtctaatggtcaagcgctgaagatccatgtctcctctaccaccaaggatgccctagatgagctaggatgcttccagctagagcttcggggggatgtggaaatgaagggaaaaggaaagatgcgaacatactggctcttaggagagcggaaaggacctcctggactcctgtaaacccccattctttccaagtcagatagtcttctgctgctggtacctgggtgggcaatggccaccatgtctgcacacaccagaaatggacattttcatatgcaatggaaaacagccacaaaaaaacctaccttatatggaagttgtagccctctgcagctcagccctgtacatatacctgtccctctctggcttggtccccttcctccctactttctgtaaatatctgtatctaaaccagaatattttggtcaaatataaaacaataataaaaaaagttctgatgtcaaaatgtg

SEQ ID NO: 356389 - DNA, 904 bp, Homo sapiens
tccagcagagaaggatgattaatgatggtgtcaagcttgtctccctctactttttcccatccccatggatatagatagaggtgaccttttaatccccctctcaatcaggtggagacgattggggatgcttacatggtggtatctggcctcccaggccgaaatggtcaacgccatgcaccagaaattgctcgtatggccctagcattactagatgcagtttcttcctttcgcatccgccaccgaccccatgaccagctgaggctacgcataggggtccatactggtaaggctgactctcactccagccctagtctccacctttcccagactctcccaacctgtttcttctcaaagggccagtctgtgctggggttgttggcctgaagatgccccgttattgtctttttggagacacagtgaacactgcttctcgaatggagtctaatggtcaagcgctgaagatccatgtctcctctaccaccaaggatgccctagatgagctaggatgcttccagctagagcttcggggggatgtggaaatgaagggaaaaggaaagatgcgaacatactggctcttaggagagcggaaaggacctcctggactcctgtaaacccccattctttccaagtcagatagtcttctgctgctggtacctgggtgggcaatggccaccatgtctgcacacaccagaaatggacattttcatatgcaatggaaaacagccacaaaaaaacctaccttatatggaagttgtagccctctgcagctcagccctgtacatatacctgtccctctctggcttggtccccttcctccctactttctgtaaatatctgtatctaaaccagaatattttggtcaaatataaaacaataataaaaaaagttctgatgtcaaaatgtg

SEQ ID NO: 356390 - DNA, 4402 bp, Homo sapiens
cggccacataagatattatctacacaaaagcttatttaggaatgaccaatgagctcaacttaaatttattagaaatctgattagcattataaatcaactgacttttaggagcataggctttggcgctacagggatctggcttgaacctcattgaggccactgattggtgagtgaccttaagcaagtctctttaccttgttagggcacaatttcctctcggaattgtgaaatgggtttaattacaccagcttacatcccaaccatcagcaagtcctcttgtatgtaaccatctccaacacagaaaggggatctgcccatgttctaccatcctcacctttctccaagccactacaacctctcacaacagccttccaattggtctccctaaactcttatcccccctacaccccgttctcagtcctcagtccttgccctaggctggtagcccactccttgcccgccccccgccttcctcccatctccccctcctctccccggcccccagcaccttctgcatcccagcctacctagcctactcctcctcttcctggccctcttccccaggctccaggctggggggtgctcgcgtctcccctgtaggccagagcagccccaagttctgggggcggtggggctgctgctttatccccatggcgctgccatcacttctgctgttggtggcagccctggcaggtggggtgcgtcctcccggggcgcggaacctgacgctggcggtggtgctgccagaacacaacctgagctatgcctgggcctggccacgggtgggacccgctgtggcactagctgtggaggctctgggccgggcactgcccgtggacctgcggtttgtcagctccgaactggaaggcgcctgctctgagtacctggcaccgctgagcgctgtggacctcaagctgtaccatgaccccgacctgctgttaggtcccggttgcgtgtaccctgctgcctctgtggcccgctttgcctcccactggcgccttcccctgctgactgcgggtgctgtggcctctggtttttcggctaagaatgaccattatcgtaccctggttcgcactggcccctctgctcccaagctgggtgagtttgtggtgacactacacgggcacttcaattggactgcccgtgctgccttgctgtacctggatgctcgcacagatgaccggcctcactacttcaccatcgagggcgtctttgaggccctgcagggcagcaacctcagtgtgcagcaccaggtgtatgcccgagagccagggggccccgagcaggccacccacttcatccgggccaacgggcgcattgtgtatatctgcggccctctggagatgctgcatgagatcctgcttcaggcccagagggagaatctgaccaatggggattatgtcttcttttacctggatgtctttggggagagtctccgtgcaggccccacacgtgctacaggccggccctggcaggacaatcgcacccgggaacaggcccaggccctcagagaggcctttcagactgtattggtgatcacgtaccgagaacccccaaatcctgagtatcaggaattccagaatcgtctgctgataagagcccgggaagactttggtgtggagctgggcccttccctgatgaacctcatcgctggctgcttctatgatgggatcctgctatatgctgaagtcctgaatgagacaatacaggaaggaggcacccgggaggatggacttcgaattgtggaaaagatgcagggacgaagatatcacggtgtaactgggctggttgtcatggacaagaacaatgaccgagagactgactttgtcctctgggccatgggagacctggattctggggactttcagcctgcagcccactactcgggagctgagaagcagatttggtggacgggacggcctattccctgggtgaagggggctcctccctcggacaatcccccctgtgcctttgacttggacgacccatcctgtgataaaactccactttcaaccctggcaattgtggctctgggcacaggaatcaccttcatcatgtttggtgtttccagcttcctaattttccgaaagctgatgctggagaaggagctggctagcatgttgtggcgtattcgctgggaagaactgcagtttggcaactcagagcgttatcacaaaggtgcaggcagtcgcctcacactgtcgctgcggggatccagttacggctcgctcatgacagcccatgggaaataccagatctttgccaacaccggtcacttcaagggaaatgttgtcgccatcaaacatgtgaataagaagcgcattgagctgacccggcaggttctgtttgaactcaaacatatgagagatgttcagttcaaccatctcactcgcttcattggcgcctgcatagaccctcccaacatttgcattgtcactgaatactgtcctcgtgggagtttacaggatattctagaaaatgacagcatcaacttggactggatgtttcgttattcactcattaatgaccttgttaagggcatggcctttctccacaacagcattatttcatcgcatgggagtctcaagtcctccaactgtgtggtggatagtcgttttgtgctcaaaatcacagactatggcctggccagcttccgatcaactgctgaacctgatgacagccatgccctctatgccaagaagctgtggactgccccagaactgctcagtgggaaccccttgccaaccacaggcatgcagaaggctgacgtctatagctttgggatcatcctgcaggagatagcacttcgcagtggtcctttctacttggagggcctggacctcagccccaaagagattgtccagaaggtacgaaatggtcagcggccatatttccggccaagcattgaccggacccaactgaatgaagagctagttttgctgatggagcgatgttgggctcaggacccagctgagcggccagactttggacagattaagggcttcattcggcgctttaacaaggagggtggcaccagcatattggacaacctcctgctgcgcatggaacagtatgccaataacttggagaagctggtggaggaacgcacacaggcctatctggaggaaaaacgcaaggctgaagctctgctctaccaaatcctaccccattcagtggcagagcagttaaaacggggagagactgtacaggctgaggcctttgacagtgttaccatctacttcagtgacattgttggcttcacagcattgtcagcagagagcacccccatgcaggtagtgacacttcttaatgacctgtatacctgctttgatgccataattgacaactttgatgtctacaaggtggagacgattggggatgcttacatggtggtatctggcctcccaggccgaaatggtcaacgccatgcaccagaaattgctcgtatggccctagcattactagatgcagtttcttcctttcgcatccgccaccgaccccatgaccagctgaggctacgcataggggtccatactggtaaggctgactctcactccagccctagtctccacctttcccagactctcccaacctgtttcttctcaaagggccagtctgtgctggggttgttggcctgaagatgccccgttattgtctttttggagacacagtgaacactgcttctcgaatggagtctaatggtcaaggtaagacattagccctcaaccccactgttggcctcaatttatcttgcccttttcttcttttcataatccctccaatttcttaatctgagagaccacagttccttagtgtcgcatcctcgggcatattttggttctaatagatatgcattgggaggttgggcatattttggtcctaatagatatgcattgggagcttcccagggatggttggtcgggcacggtgctatacagtatcaccaattatttgattgccttttctttgattcctcattccaccatcctccccattccacccaccccagcgctgaagatccatgtctcctctaccaccaaggatgccctagatgagctaggatgcttccagctagagcttcggggggatgtggaaatgaagggaaaaggaaagatgcgaacatactggctcttaggagagcggaaaggacctcctggactcctgtaaacccccattctttccaagtcagatagtcttctgctgctggtacctgggtgggcaatggccaccatgtctgcacacaccagaaatggacattttcatatgcaatggaaaacagccacactgtccctctctggcttggtccccttcctccctactttctgtaaatatctgtatctaaaccagaatattttggtcaaatataaaacaataataaaaaaagttctgatgtcaaaatgtg

SEQ ID NO: 356391 - DNA, 4087 bp, Homo sapiens
cggccacataagatattatctacacaaaagcttatttaggaatgaccaatgagctcaacttaaatttattagaaatctgattagcattataaatcaactgacttttaggagcataggctttggcgctacagggatctggcttgaacctcattgaggccactgattggtgagtgaccttaagcaagtctctttaccttgttagggcacaatttcctctcggaattgtgaaatgggtttaattacaccagcttacatcccaaccatcagcaagtcctcttgtatgtaaccatctccaacacagaaaggggatctgcccatgttctaccatcctcacctttctccaagccactacaacctctcacaacagccttccaattggtctccctaaactcttatcccccctacaccccgttctcagtcctcagtccttgccctaggctggtagcccactccttgcccgccccccgccttcctcccatctccccctcctctccccggcccccagcaccttctgcatcccagcctacctagcctactcctcctcttcctggccctcttccccaggctccaggctggggggtgctcgcgtctcccctgtaggccagagcagccccaagttctgggggcggtggggctgctgctttatccccatggcgctgccatcacttctgctgttggtggcagccctggcaggtggggtgcgtcctcccggggcgcggaacctgacgctggcggtggtgctgccagaacacaacctgagctatgcctgggcctggccacgggtgggacccgctgtggcactagctgtggaggctctgggccgggcactgcccgtggacctgcggtttgtcagctccgaactggaaggcgcctgctctgagtacctggcaccgctgagcgctgtggacctcaagctgtaccatgaccccgacctgctgttaggtcccggttgcgtgtaccctgctgcctctgtggcccgctttgcctcccactggcgccttcccctgctgactgcgggtgctgtggcctctggtttttcggctaagaatgaccattatcgtaccctggttcgcactggcccctctgctcccaagctgggtgagtttgtggtgacactacacgggcacttcaattggactgcccgtgctgccttgctgtacctggatgctcgcacagatgaccggcctcactacttcaccatcgagggcgtctttgaggccctgcagggcagcaacctcagtgtgcagcaccaggtgtatgcccgagagccagggggccccgagcaggccacccacttcatccgggccaacgggcgcattgtgtatatctgcggccctctggagatgctgcatgagatcctgcttcaggcccagagggagaatctgaccaatggggattatgtcttcttttacctggatgtctttggggagagtctccgtgcaggccccacacgtgctacaggccggccctggcaggacaatcgcacccgggaacaggcccaggccctcagagaggcctttcagactgtattggtgatcacgtaccgagaacccccaaatcctgagtatcaggaattccagaatcgtctgctgataagagcccgggaagactttggtgtggagctgggcccttccctgatgaacctcatcgctggctgcttctatgatgggatcctgctatatgctgaagtcctgaatgagacaatacaggaaggaggcacccgggaggatggacttcgaattgtggaaaagatgcagggacgaagatatcacggtgtaactgggctggttgtcatggacaagaacaatgaccgagagactgactttgtcctctgggccatgggagacctggattctggggactttcagcctgcagcccactactcgggagctgagaagcagatttggtggacgggacggcctattccctgggtgaagggggctcctccctcggacaatcccccctgtgcctttgacttggacgacccatcctgtgataaaactccactttcaaccctggcaattgtggctctgggcacaggaatcaccttcatcatgtttggtgtttccagcttcctaattttccgaaagctgatgctggagaaggagctggctagcatgttgtggcgtattcgctgggaagaactgcagtttggcaactcagagcgttatcacaaaggtgcaggcagtcgcctcacactgtcgctgcggggatccagttacggctcgctcatgacagcccatgggaaataccagatctttgccaacaccggtcacttcaagggaaatgttgtcgccatcaaacatgtgaataagaagcgcattgagctgacccggcaggttctgtttgaactcaaacatatgagagatgttcagttcaaccatctcactcgcttcattggcgcctgcatagaccctcccaacatttgcattgtcactgaatactgtcctcgtgggagtttacaggatattctagaaaatgacagcatcaacttggactggatgtttcgttattcactcattaatgaccttgttaagggcatggcctttctccacaacagcattatttcatcgcatgggagtctcaagtcctccaactgtgtggtggatagtcgttttgtgctcaaaatcacagactatggcctggccagcttccgatcaactgctgaacctgatgacagccatgccctctatgccaagaagctgtggactgccccagaactgctcagtgggaaccccttgccaaccacaggcatgcagaaggctgacgtctatagctttgggatcatcctgcaggagatagcacttcgcagtggtcctttctacttggagggcctggacctcagccccaaagagattgtccagaaggtacgaaatggtcagcggccatatttccggccaagcattgaccggacccaactgaatgaagagctagttttgctgatggagcgatgttgggctcaggacccagctgagcggccagactttggacagattaagggcttcattcggcgctttaacaaggagggtggcaccagcatattggacaacctcctgctgcgcatggaacagtatgccaataacttggagaagctggtggaggaacgcacacaggcctatctggaggaaaaacgcaaggctgaagctctgctctaccaaatcctaccccattcagtggcagagcagttaaaacggggagagactgtacaggctgaggcctttgacagtgttaccatctacttcagtgacattgttggcttcacagcattgtcagcagagagcacccccatgcaggtagtgacacttcttaatgacctgtatacctgctttgatgccataattgacaactttgatgtctacaaggtggagacgattggggatgcttacatggtggtatctggcctcccaggccgaaatggtcaacgccatgcaccagaaattgctcgtatggccctagcattactagatgcagtttcttcctttcgcatccgccaccgaccccatgaccagctgaggctacgcataggggtccatactgggccagtctgtgctggggttgttggcctgaagatgccccgttattgtctttttggagacacagtgaacactgcttctcgaatggagtctaatggtcaagcgctgaagatccatgtctcctctaccaccaaggatgccctagatgagctaggatgcttccagctagagcttcggggggatgtggaaatgaagggaaaaggaaagatgcgaacatactggctcttaggagagcggaaaggacctcctggactcctgtaaacccccattctttccaagtcagatagtcttctgctgctggtacctgggtgggcaatggccaccatgtctgcacacaccagaaatggacattttcatatgcaatggaaaacagccacaaaaaaacctaccttatatggaagttgtagccctctgcagctcagccctgtacatatacctgtccctctctggcttggtccccttcctccctactttctgtaaatatctgtatctaaaccagaatattttggtcaaatataaaacaataataaaaaaagttctgatgtcaaaatgtg

SEQ ID NO: 356392 - DNA, 4460 bp, Homo sapiens
cggccacataagatattatctacacaaaagcttatttaggaatgaccaatgagctcaacttaaatttattagaaatctgattagcattataaatcaactgacttttaggagcataggctttggcgctacagggatctggcttgaacctcattgaggccactgattggtgagtgaccttaagcaagtctctttaccttgttagggcacaatttcctctcggaattgtgaaatgggtttaattacaccagcttacatcccaaccatcagcaagtcctcttgtatgtaaccatctccaacacagaaaggggatctgcccatgttctaccatcctcacctttctccaagccactacaacctctcacaacagccttccaattggtctccctaaactcttatcccccctacaccccgttctcagtcctcagtccttgccctaggctggtagcccactccttgcccgccccccgccttcctcccatctccccctcctctccccggcccccagcaccttctgcatcccagcctacctagcctactcctcctcttcctggccctcttccccaggctccaggctggggggtgctcgcgtctcccctgtaggccagagcagccccaagttctgggggcggtggggctgctgctttatccccatggcgctgccatcacttctgctgttggtggcagccctggcaggtggggtgcgtcctcccggggcgcggaacctgacgctggcggtggtgctgccagaacacaacctgagctatgcctgggcctggccacgggtgggacccgctgtggcactagctgtggaggctctgggccgggcactgcccgtggacctgcggtttgtcagctccgaactggaaggcgcctgctctgagtacctggcaccgctgagcgctgtggacctcaagctgtaccatgaccccgacctgctgttaggtcccggttgcgtgtaccctgctgcctctgtggcccgctttgcctcccactggcgccttcccctgctgactgcgggtgctgtggcctctggtttttcggctaagaatgaccattatcgtaccctggttcgcactggcccctctgctcccaagctgggtgagtttgtggtgacactacacgggcacttcaattggactgcccgtgctgccttgctgtacctggatgctcgcacagatgaccggcctcactacttcaccatcgagggcgtctttgaggccctgcagggcagcaacctcagtgtgcagcaccaggtgtatgcccgagagccagggggccccgagcaggccacccacttcatccgggccaacgggcgcattgtgtatatctgcggccctctggagatgctgcatgagatcctgcttcaggcccagagggagaatctgaccaatggggattatgtcttcttttacctggatgtctttggggagagtctccgtgcaggccccacacgtgctacaggccggccctggcaggacaatcgcacccgggaacaggcccaggccctcagagaggcctttcagactgtattggtgatcacgtaccgagaacccccaaatcctgagtatcaggaattccagaatcgtctgctgataagagcccgggaagactttggtgtggagctgggcccttccctgatgaacctcatcgctggctgcttctatgatgggatcctgctatatgctgaagtcctgaatgagacaatacaggaaggaggcacccgggaggatggacttcgaattgtggaaaagatgcagggacgaagatatcacggtgtaactgggctggttgtcatggacaagaacaatgaccgagagactgactttgtcctctgggccatgggagacctggattctggggactttcagcctgcagcccactactcgggagctgagaagcagatttggtggacgggacggcctattccctgggtgaagggggctcctccctcggacaatcccccctgtgcctttgacttggacgacccatcctgtgataaaactccactttcaaccctggcaattgtggctctgggcacaggaatcaccttcatcatgtttggtgtttccagcttcctaattttccgaaagctgatgctggagaaggagctggctagcatgttgtggcgtattcgctgggaagaactgcagtttggcaactcagagcgttatcacaaaggtgcaggcagtcgcctcacactgtcgctgcggggatccagttacggctcgctcatgacagcccatgggaaataccagatctttgccaacaccggtcacttcaagggaaatgttgtcgccatcaaacatgtgaataagaagcgcattgagctgacccggcaggttctgtttgaactcaaacatatgagagatgttcagttcaaccatctcactcgcttcattggcgcctgcatagaccctcccaacatttgcattgtcactgaatactgtcctcgtgggagtttacaggatattctagaaaatgacagcatcaacttggactggatgtttcgttattcactcattaatgaccttgttaagggcatggcctttctccacaacagcattatttcatcgcatgggagtctcaagtcctccaactgtgtggtggatagtcgttttgtgctcaaaatcacagactatggcctggccagcttccgatcaactgctgaacctgatgacagccatgccctctatgccaagaagctgtggactgccccagaactgctcagtgggaaccccttgccaaccacaggcatgcagaaggctgacgtctatagctttgggatcatcctgcaggagatagcacttcgcagtggtcctttctacttggagggcctggacctcagccccaaagagattgtccagaaggtacgaaatggtcagcggccatatttccggccaagcattgaccggacccaactgaatgaagagctagttttgctgatggagcgatgttgggctcaggacccagctgagcggccagactttggacagattaagggcttcattcggcgctttaacaaggagggtggcaccagcatattggacaacctcctgctgcgcatggaacagtatgccaataacttggagaagctggtggaggaacgcacacaggcctatctggaggaaaaacgcaaggctgaagctctgctctaccaaatcctaccccattcagtggcagagcagttaaaacggggagagactgtacaggctgaggcctttgacagtgttaccatctacttcagtgacattgttggcttcacagcattgtcagcagagagcacccccatgcaggtagtgacacttcttaatgacctgtatacctgctttgatgccataattgacaactttgatgtctacaaggtggagacgattggggatgcttacatggtggtatctggcctcccaggccgaaatggtcaacgccatgcaccagaaattgctcgtatggccctagcattactagatgcagtttcttcctttcgcatccgccaccgaccccatgaccagctgaggctacgcataggggtccatactggtaaggctgactctcactccagccctagtctccacctttcccagactctcccaacctgtttcttctcaaagggccagtctgtgctggggttgttggcctgaagatgccccgttattgtctttttggagacacagtgaacactgcttctcgaatggagtctaatggtcaaggtaagacattagccctcaaccccactgttggcctcaatttatcttgcccttttcttcttttcataatccctccaatttcttaatctgagagaccacagttccttagtgtcgcatcctcgggcatattttggttctaatagatatgcattgggaggttgggcatattttggtcctaatagatatgcattgggagcttcccagggatggttggtcgggcacggtgctatacagtatcaccaattatttgattgccttttctttgattcctcattccaccatcctccccattccacccaccccagcgctgaagatccatgtctcctctaccaccaaggatgccctagatgagctaggatgcttccagctagagcttcggggggatgtggaaatgaagggaaaaggaaagatgcgaacatactggctcttaggagagcggaaaggacctcctggactcctgtaaacccccattctttccaagtcagatagtcttctgctgctggtacctgggtgggcaatggccaccatgtctgcacacaccagaaatggacattttcatatgcaatggaaaacagccacaaaaaaacctaccttatatggaagttgtagccctctgcagctcagccctgtacatatacctgtccctctctggcttggtccccttcctccctactttctgtaaatatctgtatctaaaccagaatattttggtcaaatataaaacaataataaaaaaagttctgatgtcaaaatgtg

SEQ ID NO: 356393 - DNA, 3449 bp, Homo sapiens
cggccacataagatattatctacacaaaagcttatttaggaatgaccaatgagctcaacttaaatttattagaaatctgattagcattataaatcaactgacttttaggagcataggctttggcgctacagggatctggcttgaacctcattgaggccactgattggtgagtgaccttaagcaagtctctttaccttgttagggcacaatttcctctcggaattgtgaaatgggtttaattacaccagcttacatcccaaccatcagcaagtcctcttgtatgtaaccatctccaacacagaaaggggatctgcccatgttctaccatcctcacctttctccaagccactacaacctctcacaacagccttccaattggtctccctaaactcttatcccccctacaccccgttctcagtcctcagtccttgccctaggctggtagcccactccttgcccgccccccgccttcctcccatctccccctcctctccccggcccccagcaccttctgcatcccagcctacctagcctactcctcctcttcctggccctcttccccaggctccaggctggggggtgctcgcgtctcccctgtaggccagagcagccccaagttctgggggcggtggggctgctgctttatccccatggcgctgccatcacttctgctgttggtggcagccctggcaggtggggtgcgtcctcccggggcgcggaacctgacgctggcggtggtgctgccagaacacaacctgagctatgcctgggcctggccacgggtgggacccgctgtggcactagctgtggaggctctgggccgggcactgcccgtggacctgcggtttgtcagctccgaactggaaggcgcctgctctgagtacctggcaccgctgagcgctgtggacctcaagctgtaccatgaccccgacctgctgttaggtcccggttgcgtgtaccctgctgcctctgtggcccgctttgcctcccactggcgccttcccctgctgactgcgggtgctgtggcctctggtttttcggctaagaatgaccattatcgtaccctggttcgcactggcccctctgctcccaagctgggtgagtttgtggtgacactacacgggcacttcaattggactgcccgtgctgccttgctgtacctggatgctcgcacagatgaccggcctcactacttcaccatcgagggcgtctttgaggccctgcagggcagcaacctcagtgtgcagcaccaggtgtatgcccgagagccagggggccccgagcaggccacccacttcatccgggccaacgggcgcattgtgtatatctgcggccctctggagatgctgcatgagatcctgcttcaggcccagagggagaatctgaccaatggggattatgtcttcttttacctggatgtctttggggagagtctccgtgcaggccccacacgtgctacaggccggccctggcaggacaatcgcacccgggaacaggcccaggccctcagagaggcctttcagactgtattggtgatcacgtaccgagaacccccaaatcctgagtatcaggaattccagaatcgtctgctgataagagcccgggaagactttggtgtggagctgggcccttccctgatgaacctcatcgctggctgcttctatgatgggatcctgctatatgctgaagtcctgaatgagacaatacaggaaggaggcacccgggaggatggacttcgaattgtggaaaagatgcagggacgaagatatcacggtgtaactgggctggttgtcatggacaagaacaatgaccgagagactgactttgtcctctgggccatgggagacctggattctggggactttcagcctgcagcccactactcgggagctgagaagcagatttggtggacgggacggcctattccctgggtgaagggggctcctccctcggacaatcccccctgtgcctttgacttggacgacccatcctgtgataaaactccactttcaaccctggcaattgtggctctgggcacaggaatcaccttcatcatgtttggtgtttccagcttcctaattttccgaaagctgatgctggagaaggagctggctagcatgttgtggcgtattcgctgggaagaactgcagtttggcaactcagagcgttatcacaaaggtgcaggcagtcgcctcacactgtcgctgcggggatccagttacggctcgctcatgacagcccatgggaaataccagatctttgccaacaccggtcacttcaagggaaatgttgtcgccatcaaacatgtgaataagaagcgcattgagctgacccggcaggttctgtttgaactcaaacatatgagagatgttcagttcaaccatctcactcgcttcattggcgcctgcatagaccctcccaacatttgcattgtcactgaatactgtcctcgtgggagtttacaggatattctagaaaatgacagcatcaacttggactggatgtttcgttattcactcattaatgaccttgttaagggcatggcctttctccacaacagcattatttcatcgcatgggagtctcaagtcctccaactgtgtggtggatagtcgttttgtgctcaaaatcacagactatggcctggccagcttccgatcaactgctgaacctgatgacagccatgccctctatgccaagaagctgtggactgccccagaactgctcagtgggaaccccttgccaaccacaggcatgcagaaggctgacgtctatagctttgggatcatcctgcaggagatagcacttcgcagtggtcctttctacttggagggcctggacctcagccccaaagagattgtccagaaggtacgaaatggtcagcggccatatttccggccaagcattgaccggacccaactgaatgaagagctagttttgctgatggagcgatgttgggctcaggacccagctgagcggccagactttggacagattaagggcttcattcggcgctttaacaaggagggtggcaccagcatattggacaacctcctgctgcgcatggaacagtatgccaataacttggagaagctggtggaggaacgcacacaggcctatctggaggaaaaacgcaaggctgaagctctgctctaccaaatcctaccccattcagtggcagagcagttaaaacggggagagactgtacaggctgaggcctttgacagtgttaccatctacttcagtgacattgttggcttcacagcattgtcagcagagagcacccccatgcaggtagtgacacttcttaatgacctgtatacctgctttgatgccataattgacaactttgatgtctacaagctactttctgtaaatatctgtatctaaaccagaatattttggtcaaatataaaacaataataaaaaaagttctgatgtcaaaatgtg

SEQ ID NO: 356394 - DNA, 247 bp, Homo sapiens
caatattatagtagagtggttaagtgaattggaggtagaaaatgaagtcagcaaaatattataatagactggttaaagtagattcctggctctctcactctgtgctgaagtttccttatctataataaaatagggataatagtacttactttgtaagagtattgattaggtgaatacaatgaaaatatgaaaatgcttaaaacagtacctggcagatataaatttaaaaaaaaatcattgacttctt

SEQ ID NO: 356395 - DNA, 346 bp, Homo sapiens
tatggggcaagtggttcatatagttaagtgattgtatatatatatatatatatatgtattccagtgtagaaagtattggctgggtctgtaatcaagtattccacagaagtgccttcataggtgctgaaacaggattatgagagtgacagacacaggactgaagacagggagaaaatgtgcatggctgtgagaatatattgctttgattctttgacttctcatgatatatgaaaacaaataaagtgggggggggtgacttcaataatatcacgaacatatttaaaatgaaattctgagcatggagaaaaatttcaaattctggtacaaacaaatattctaaaaatat

SEQ ID NO: 356396 - DNA, 5112 bp, Homo sapiens
tgaaatatggagaatagtcttagatgtgtttgggtacccaagctggcttttgtactcttcggagcttccttgctcagcgcgcatcttcaagtaaccggttttcaaattaaagctttcacagcactgcgcttcctctcagaaccttctgatgccgtcacaatgcggggaggaaatgtcctcctcgactgctccgcggagtccgaccgaggagttccagtgatcaagtggaagaaagatggcattcatctggccttgggaatggatgaaaggaagcagcaactttcaaatgggtctctgctgatacaaaacatacttcattccagacaccacaagccagatgagggactttaccaatgtgaggcatctttaggagattctggctcaattattagtcggacagcaaaagttgcagtagcaggaccactgaggttcctttcacagacagaatctgtcacagccttcatgggagacacagtgctactcaagtgtgaagtcattggggagcccatgccaacaatccactggcagaagaaccaacaagacctgactccaatcccaggtgactcccgagtggtggtcttgccctctggagcattgcagatcagccgactccaaccgggggacattggaatttaccgatgctcagctcgaaatccagccagctcaagaacaggaaatgaagcagaagtcagaattttatcagatccaggactgcatagacagctgtattttctgcaaagaccatccaatgtagtagccattgaaggaaaagatgctgtcctggaatgttgtgtttctggctatcctccaccaagttttacctggttacgaggcgaggaagtcatccaactcaggtctaaaaagtattctttattgggtggaagcaacttgcttatctccaatgtgacagatgatgacagtggaatgtatacctgtgttgtcacatataaaaatgagaatattagtgcctctgcagagctcacagtcttggttccgccatggtttttaaatcatccttccaacctgtatgcctatgaaagcatggatattgagtttgaatgtacagtctctggaaagcctgtgcccactgtgaattggatgaagaatggagatgtggtcattcctagtgattattttcagatagtgggaggaagcaacttacggatacttggggtggtgaagtcagatgaaggcttttatcaatgtgtggctgaaaatgaggctggaaatgcccagaccagtgcacagctcattgtccctaagcctgcaatcccaagctccagtgtcctcccttcggctcccagagatgtggtccctgtcttggtttccagccgatttgtccgtctcagctggcgcccacctgcagaagcgaaagggaacattcaaactttcacggtctttttctccagagaaggtgacaacagggaacgagcattgaatacaacacagcctgggtcccttcagctcactgtgggaaacctgaagccagaagccatgtacacctttcgagttgtggcttacaatgaatggggaccgggagagagttctcaacccatcaaggtggccacacagcctgagttgcaagttccagggccagtagaaaacctgcaagctgtatctacctcacctacctcaattcttattacctgggaaccccctgcctatgcaaacggtccagtccaaggttacagattgttctgcactgaggtgtccacaggaaaagaacagaatatagaggttgatggactatcttataaactggaaggcctgaaaaaattcaccgaatatagtcttcgattcttagcttataatcgctatggtccgggcgtctctactgatgatataacagtggttacactttctgacgtgccaagtgccccgcctcagaacgtctccctggaagtggtcaattcaagaagtatcaaagttagctggctgcctcctccatcaggaacacaaaatggatttattaccggctataaaattcgacacagaaagacgacccgcaggggtgagatggaaacactggagccaaacaacctctggtacctattcacaggactggagaaaggaagtcagtacagtttccaggtgtcagccatgacagtcaatggtactggaccaccttccaactggtatactgcagagactccagagaatgatctagatgaatctcaagttcctgatcaaccaagctctcttcatgtgaggccccagactaactgcatcatcatgagttggactcctcccttgaacccaaacatcgtggtgcgaggttatattatcggttatggcgttgggagcccttacgctgagacagtgcgtgtggacagcaagcagcgatattattccattgagaggttagagtcaagttcccattatgtaatctccctaaaagcttttaacaatgccggagaaggagttcctctttatgaaagtgccaccaccaggtctataaccgatcccactgacccagttgattattatcctttgcttgatgatttccccacctcggtcccagatctctccacccccatgctcccaccagtaggtgtacaggctgtggctcttacccatgatgctgtgagggtcagctgggcagacaactctgtccctaagaaccaaaagacgtctgaggtgcgactttacaccgtccggtggagaaccagcttttctgcaagtgcaaaatacaagtcagaagacacaacatctctaagttacacagcaacaggcctcaaaccaaacacaatgtatgaattctcggtcatggtaacaaaaaacagaaggtccagtacttggagcatgactgcacatgccaccacgtatgaagcagcccccacctctgctcccaaggacttgacagtcattactagggaagggaagcctcgtgccgtcattgtgagttggcagcctcccttggaagccaatgggaaaattactgcttacatcttattttataccttggacaagaacatcccaattgatgactggattatggaaacaatcagtggtgataggcttactcatcaaatcatggatctcaaccttgatactatgtattactttcgaattcaagcacgaaattcaaaaggagtggggccactctctgatcctatcctcttcaggactctgaaagtggaacaccctgacaaaatggctaatgaccaaggtcgtcatggagatggaggttattggccagttgatactaatttgattgatagaagcaccctaaatgagccgccaattggacaaatgcaccccccgcatggcagtgtcactcctcagaagaacagcaacctgcttgtgatcattgtggtcaccgttggtgtcatcacagtgctggtagtggtcatcgtggctgtgatttgcacccgacgctcttcagcccagcagagaaagaaacgggccacccacagtgctggcaaaaggaagggcagccagaaggacctccgaccccctgatctttggatccatcatgaagaaatggagatgaaaaatattgaaaagccatctggcactgaccctgcaggaagggactctcccatccaaagttgccaagacctcacaccagtcagccacagccagtcagaaacccaactgggaagcaaaagcacctctcattcaggtcaagacactgaggaagcagggagctctatgtccactctggagaggtcgctggctgcacgccgagccccccgggccaagctcatgattcccatggatgcccagtccaacaatcctgctgtcgtgagcgccatcccggtgccaacgctagaaagtgcccagtacccaggaatcctcccgtctcccacctgtggatatccccacccgcagttcactctccggcctgtgccattcccaacactctcagtggaccgaggtttcggagcaggaagaagtcagtcagtgagtgaaggaccaactacccaacaaccacctatgctgcccccatctcagcctgagcattctagcagcgaggaggcaccaagcagaaccatccccacagcttgtgttcgaccaactcacccactccgcagctttgctaatcctttgctacctccaccaatgagtgcaatagaaccgaaagtcccttacacaccacttttgtctcagccagggcccactcttcctaagacccatgtgaaaacagcctcccttgggttggctggaaaagcaagatcccctttgcttcctgtgtctgtgccaacagcccctgaagtgtctgaggagagccacaaaccaacagaggattcagccaatgtgtatgaacaggatgatctgagtgaacaaatggcaagtttggaaggactcatgaagcagcttaatgccatcacaggctcagccttttaacatgtatttctgaatggatgaggtgaattttccgggaactttgcagcataccaattacccataaacagcacacctgtgtccaagaactctaaccagtgtacaggtcacccatcaggaccactcagttaaggaagatcctgaagcagttcagaaggaataagcattccttctttcacaggcatcaggaattgtcaaatgatgattatgagttccctaaacaaaagcaaagatgcattttcactgcaatgtcaaagtttaagctgctagaatagtcatgggcctttgtcactgcagtgaccacactgtcataactaatacctatgttttcctttgtcaaggcctgttgtttaatgtgtaggtctagtcttacaaaatgcaagtgcattatttaagcctgtaccatgccatggcaaaccagtgcaagctcactattttgttttcaacttaaacatacaaagcacccatgggaatctctcatgccatagcaccaaaggattggatgttttccttacagcacaaaaagtaaatagtaaacaaacaaaaggcagagaatgcttatgtttgtaactcagtcattcatcttgcacaagtggtggatattagtgagtggctaaaaattcacctattttggcaagtatttgtaaatccacccttggttaatatgtatgtctggagtccaggaatataaaaatctgcaactagtggcattctgccagcagcagtacatttctggaaagaggatataatatgcaatcttctcag

SEQ ID NO: 356397 - DNA, 571 bp, Homo sapiens
tctaactctccagtcaacgaaaacattcctctctcagctgctctggtgggtcatccaggctcacagtgaatgttcccggcaagaaagtgccttcctgctttccaaagaagtccttttcaaggtggcggagcactgaatagtacagaattcatcagtatattgagttcagatcctatctataacttaggtacttttgttttcctgttttaaagataacattaagaacctgctgttttttcctctatagaatctggcatttacagcactttctcatcgatcacaccactgagtgttaccattcctattttacagagggaaatgtgaggctgagaaagtttggacaacatagccatggcagtttataactcaaagtatatggatggatgacactcgctagagagttgcaacagccgatgcagctgtccccaggccccaaactcacttatatttcctgaaacaccaggaaaagcatcttttatttttatatgagagccctaagagattattttcatcttattcaaaaatgaaaagattttatttaattaaaaaatctatttctattatcttaaaa

SEQ ID NO: 356398 - DNA, 3280 bp, Homo sapiens
tgaaatatggagaatagtcttagatgtgtttgggtacccaagctggcttttgtactcttcggagcttccttgctcagcgcgcatcttcaagtaaccggttttcaaattaaagctttcacagcactgcgcttcctctcagaaccttctgatgccgtcacaatgcggggaggaaatgtcctcctcgactgctccgcggagtccgaccgaggagttccagtgatcaagtggaagaaagatggcattcatctggccttgggaatggatgaaaggaagcagcaactttcaaatgggtctctgctgatacaaaacatacttcattccagacaccacaagccagatgagggactttaccaatgtgaggcatctttaggagattctggctcaattattagtcggacagcaaaagttgcagtagcaggaccactgaggttcctttcacagacagaatctgtcacagccttcatgggagacacagtgctactcaagtgtgaagtcattggggagcccatgccaacaatccactggcagaagaaccaacaagacctgactccaatcccaggtgactcccgagtggtggtcttgccctctggagcattgcagatcagccgactccaaccgggggacattggaatttaccgatgctcagctcgaaatccagccagctcaagaacaggaaatgaagcagaagtcagaattttatcagatccaggactgcatagacagctgtattttctgcaaagaccatccaatgtagtagccattgaaggaaaagatgctgtcctggaatgttgtgtttctggctatcctccaccaagttttacctggttacgaggcgaggaagtcatccaactcaggtctaaaaagtattctttattgggtggaagcaacttgcttatctccaatgtgacagatgatgacagtggaatgtatacctgtgttgtcacatataaaaatgagaatattagtgcctctgcagagctcacagtcttggttccgccatggtttttaaatcatccttccaacctgtatgcctatgaaagcatggatattgagtttgaatgtacagtctctggaaagcctgtgcccactgtgaattggatgaagaatggagatgtggtcattcctagtgattattttcagatagtgggaggaagcaacttacggatacttggggtggtgaagtcagatgaaggcttttatcaatgtgtggctgaaaatgaggctggaaatgcccagaccagtgcacagctcattgtccctaagcctgcaatcccaagctccagtgtcctcccttcggctcccagagatgtggtccctgtcttggtttccagccgatttgtccgtctcagctggcgcccacctgcagaagcgaaagggaacattcaaactttcacggtctttttctccagagaaggtgacaacagggaacgagcattgaatacaacacagcctgggtcccttcagctcactgtgggaaacctgaagccagaagccatgtacacctttcgagttgtggcttacaatgaatggggaccgggagagagttctcaacccatcaaggtggccacacagcctgagttgcaagttccagggccagtagaaaacctgcaagctgtatctacctcacctacctcaattcttattacctgggaaccccctgcctatgcaaacggtccagtccaaggttacagattgttctgcactgaggtgtccacaggaaaagaacagaatatagaggttgatggactatcttataaactggaaggcctgaaaaaattcaccgaatatagtcttcgattcttagcttataatcgctatggtccgggcgtctctactgatgatataacagtggttacactttctgacgtgccaagtgccccgcctcagaacgtctccctggaagtggtcaattcaagaagtatcaaagttagctggctgcctcctccatcaggaacacaaaatggatttattaccggctataaaattcgacacagaaagacgacccgcaggggtgagatggaaacactggagccaaacaacctctggtacctattcacaggactggagaaaggaagtcagtacagtttccaggtgtcagccatgacagtcaatggtactggaccaccttccaactggtatactgcagagactccagagaatgatctagatgaatctcaagttcctgatcaaccaagctctcttcatgtgaggccccagactaactgcatcatcatgagttggactcctcccttgaacccaaacatcgtggtgcgaggttatattatcggttatggcgttgggagcccttacgctgagacagtgcgtgtggacagcaagcagcgatattattccattgagaggttagagtcaagttcccattatgtaatctccctaaaagcttttaacaatgccggagaaggagttcctctttatgaaagtgccaccaccaggtctataaccgatctctccacccccatgctcccaccagtaggtgtacaggctgtggctcttacccatgatgctgtgagggtcagctgggcagacaactctgtccctaagaaccaaaagacgtctgaggtgcgactttacaccgtccggtggagaaccagcttttctgcaagtgcaaaatacaagtcagaagacacaacatctctaagttacacagcaacaggcctcaaaccaaacacaatgtatgaattctcggtcatggtaacaaaaaacagaaggtccagtacttggagcatgactgcacatgccaccacgtatgaagcagcccccacctctgctcccaaggacttgacagtcattactagggaagggaagcctcgtgccgtcattgtgagttggcagcctcccttggaagccaatgggaaaattactgcttacatcttattttataccttggacaagaacatcccaattgatgactggattatggaaacaatcagtggtgataggcttactcatcaaatcatggatctcaaccttgatactatgtattactttcgaattcaagcacgaaattcaaaaggagtggggccactctctgatcctatcctcttcaggactctgaaagtggaacaccctgacaaaatggctaatgaccaagacactggcgtgacgattaatcttgttaatgaagttctgcttggctgaggctgcggctctgataaggaagatgtaaattttcttgagaggaaattgttttgtctccattctgaaggaccaattaaaatgtcaagcttctttgtatgaaataaatttttagtctctgtctgca

SEQ ID NO: 356399 - DNA, 5009 bp, Homo sapiens
tgtcttcccctccccccccccccattcccttcgctgtccccttccgcccccttggttttcaaattaaagctttcacagcactgcgcttcctctcagaaccttctgatgccgtcacaatgcggggaggaaatgtcctcctcgactgctccgcggagtccgaccgaggagttccagtgatcaagtggaagaaagatggcattcatctggccttgggaatggatgaaaggaagcagcaactttcaaatgggtctctgctgatacaaaacatacttcattccagacaccacaagccagatgagggactttaccaatgtgaggcatctttaggagattctggctcaattattagtcggacagcaaaagttgcagtagcaggaccactgaggttcctttcacagacagaatctgtcacagccttcatgggagacacagtgctactcaagtgtgaagtcattggggagcccatgccaacaatccactggcagaagaaccaacaagacctgactccaatcccaggtgactcccgagtggtggtcttgccctctggagcattgcagatcagccgactccaaccgggggacattggaatttaccgatgctcagctcgaaatccagccagctcaagaacaggaaatgaagcagaagtcagaattttatcagatccaggactgcatagacagctgtattttctgcaaagaccatccaatgtagtagccattgaaggaaaagatgctgtcctggaatgttgtgtttctggctatcctccaccaagttttacctggttacgaggcgaggaagtcatccaactcaggtctaaaaagtattctttattgggtggaagcaacttgcttatctccaatgtgacagatgatgacagtggaatgtatacctgtgttgtcacatataaaaatgagaatattagtgcctctgcagagctcacagtcttggttccgccatggtttttaaatcatccttccaacctgtatgcctatgaaagcatggatattgagtttgaatgtacagtctctggaaagcctgtgcccactgtgaattggatgaagaatggagatgtggtcattcctagtgattattttcagatagtgggaggaagcaacttacggatacttggggtggtgaagtcagatgaaggcttttatcaatgtgtggctgaaaatgaggctggaaatgcccagaccagtgcacagctcattgtccctaagcctgcaatcccaagctccagtgtcctcccttcggctcccagagatgtggtccctgtcttggtttccagccgatttgtccgtctcagctggcgcccacctgcagaagcgaaagggaacattcaaactttcacggtctttttctccagagaaggtgacaacagggaacgagcattgaatacaacacagcctgggtcccttcagctcactgtgggaaacctgaagccagaagccatgtacacctttcgagttgtggcttacaatgaatggggaccgggagagagttctcaacccatcaaggtggccacacagcctgagttgcaagttccagggccagtagaaaacctgcaagctgtatctacctcacctacctcaattcttattacctgggaaccccctgcctatgcaaacggtccagtccaaggttacagattgttctgcactgaggtgtccacaggaaaagaacagaatatagaggttgatggactatcttataaactggaaggcctgaaaaaattcaccgaatatagtcttcgattcttagcttataatcgctatggtccgggcgtctctactgatgatataacagtggttacactttctgacgtgccaagtgccccgcctcagaacgtctccctggaagtggtcaattcaagaagtatcaaagttagctggctgcctcctccatcaggaacacaaaatggatttattaccggctataaaattcgacacagaaagacgacccgcaggggtgagatggaaacactggagccaaacaacctctggtacctattcacaggactggagaaaggaagtcagtacagtttccaggtgtcagccatgacagtcaatggtactggaccaccttccaactggtatactgcagagactccagagaatgatctagatgaatctcaagttcctgatcaaccaagctctcttcatgtgaggccccagactaactgcatcatcatgagttggactcctcccttgaacccaaacatcgtggtgcgaggttatattatcggttatggcgttgggagcccttacgctgagacagtgcgtgtggacagcaagcagcgatattattccattgagaggttagagtcaagttcccattatgtaatctccctaaaagcttttaacaatgccggagaaggagttcctctttatgaaagtgccaccaccaggtctataaccgatctctccacccccatgctcccaccagtaggtgtacaggctgtggctcttacccatgatgctgtgagggtcagctgggcagacaactctgtccctaagaaccaaaagacgtctgaggtgcgactttacaccgtccggtggagaaccagcttttctgcaagtgcaaaatacaagtcagaagacacaacatctctaagttacacagcaacaggcctcaaaccaaacacaatgtatgaattctcggtcatggtaacaaaaaacagaaggtccagtacttggagcatgactgcacatgccaccacgtatgaagcagcccccacctctgctcccaaggacttgacagtcattactagggaagggaagcctcgtgccgtcattgtgagttggcagcctcccttggaagccaatgggaaaattactgcttacatcttattttataccttggacaagaacatcccaattgatgactggattatggaaacaatcagtggtgataggcttactcatcaaatcatggatctcaaccttgatactatgtattactttcgaattcaagcacgaaattcaaaaggagtggggccactctctgatcctatcctcttcaggactctgaaagtggaacaccctgacaaaatggctaatgaccaaggtcgtcatggagatggaggttattggccagttgatactaatttgattgatagaagcaccctaaatgagccgccaattggacaaatgcaccccccgcatggcagtgtcactcctcagaagaacagcaacctgcttgtgatcattgtggtcaccgttggtgtcatcacagtgctggtagtggtcatcgtggctgtgatttgcacccgacgctcttcagcccagcagagaaagaaacgggccacccacagtgctggcaaaaggaagggcagccagaaggacctccgaccccctgatctttggatccatcatgaagaaatggagatgaaaaatattgaaaagccatctggcactgaccctgcaggaagggactctcccatccaaagttgccaagacctcacaccagtcagccacagccagtcagaaacccaactgggaagcaaaagcacctctcattcaggtcaagacactgaggaagcagggagctctatgtccactctggagaggtcgctggctgcacgccgagccccccgggccaagctcatgattcccatggatgcccagtccaacaatcctgctgtcgtgagcgccatcccggtgccaacgctagaaagtgcccagtacccaggaatcctcccgtctcccacctgtggatatccccacccgcagttcactctccggcctgtgccattcccaacactctcagtggaccgaggtttcggagcaggaagaagtcagtcagtgagtgaaggaccaactacccaacaaccacctatgctgcccccatctcagcctgagcattctagcagcgaggaggcaccaagcagaaccatccccacagcttgtgttcgaccaactcacccactccgcagctttgctaatcctttgctacctccaccaatgagtgcaatagaaccgaaagtcccttacacaccacttttgtctcagccagggcccactcttcctaagacccatgtgaaaacagcctcccttgggttggctggaaaagcaagatcccctttgcttcctgtgtctgtgccaacagcccctgaagtgtctgaggagagccacaaaccaacagaggattcagccaatgtgtatgaacaggatgatctgagtgaacaaatggcaagtttggaaggactcatgaagcagcttaatgccatcacaggctcagccttttaacatgtatttctgaatggatgaggtgaattttccgggaactttgcagcataccaattacccataaacagcacacctgtgtccaagaactctaaccagtgtacaggtcacccatcaggaccactcagttaaggaagatcctgaagcagttcagaaggaataagcattccttctttcacaggcatcaggaattgtcaaatgatgattatgagttccctaaacaaaagcaaagatgcattttcactgcaatgtcaaagtttaagctgctagaatagtcatgggcctttgtcactgcagtgaccacactgtcataactaatacctatgttttcctttgtcaaggcctgttgtttaatgtgtaggtctagtcttacaaaatgcaagtgcattatttaagcctgtaccatgccatggcaaaccagtgcaagctcactattttgttttcaacttaaacatacaaagcacccatgggaatctctcatgccatagcaccaaaggattggatgttttccttacagcacaaaaagtaaatagtaaacaaacaaaaggcagagaatgcttatgtttgtaactcagtcattcatcttgcacaagtggtggatattagtgagtggctaaaaattcacctattttggcaagtatttgtaaatccacccttggttaatatgtatgtctggagtccaggaatataaaaatctgcaactagtggcattctgccagcagcagtacatttctggaaagaggatataatatgcaatcttctcag

SEQ ID NO: 356400 - DNA, 1111 bp, Homo sapiens
tgtcttcccctccccccccccccattcccttcgctgtccccttccgcccccttggttttcaaattaaagctttcacagcactgcgcttcctctcagaaccttctgatgccgtcacaatgcggggaggaaatgtcctcctcgactgctccgcggagtccgaccgaggagttccagtgatcaagtggaagaaagatggcattcatctggccttgggaatggatgaaaggaagcagcaactttcaaatgggtctctgctgatacaaaacatacttcattccagacaccacaagccagatgagggactttaccaatgtgaggcatctttaggagattctggctcaattattagtcggacagcaaaagttgcagtagcaggaccactgaggttcctttcacagacagaatctgtcacagccttcatgggagacacagtgctactcaagtgtgaagtcattggggagcccatgccaacaatccactggcagaagaaccaacaagacctgactccaatcccaggtgactcccgagtggtggtcttgccctctggagcattgcagatcagccgactccaaccgggggacattggaatttaccgatgctcagctcgaaatccagccagctcaagaacaggaaatgaagcagaagtcagaattttatcagatccaggactgcatagacagctgtattttctgcaaagaccatccaatgtagtagccattgaaggaaaagatgctgtcctggaatgttgtgtttctggctatcctccaccaagttttacctggttacgaggcgaggaagtcatccaactcaggtctaaaaagtattctttattgggtggaagcaacttgcttatctccaatgtgacagatgatgacagtggaatgtatacctgtgttgtcacatataaaaatgagaatattagtgcctctgcagagctcacagtcttggtaatcatcgataaagtattggtggacaccttttgggtataaggattgcactaggttctgggaagactacagaaacatctgaaacctggcttcagtgggcttcgtataattacaattcgtaaaatcagttggcctaatactgtctgaataaacttttatttaaa

SEQ ID NO: 356401 - DNA, 681 bp, Homo sapiens
tgtcttcccctccccccccccccattcccttcgctgtccccttccgcccccttggttttcaaattaaagctttcacagcactgcgcttcctctcagaaccttctgatgccgtcacaatgcggggaggaaatgtcctcctcgactgctccgcggagtccgaccgaggagttccagtgatcaagtggaagaaagatggcattcatctggccttgggaatggatgaaaggaagcagcaactttcaaatgggtctctgctgatacaaaacatacttcattccagacaccacaagccagatgagggactttaccaatgtgaggcatctttaggagattctggctcaattattagtcggacagcaaaagttgcagtagcagaggagcaaatataaaaattttgcctaaaagggcaacttcatcctgtgcagcagtctggaaaatgtatcccagggcccttgaatacgctcaaaattctatttgggaaggtttggttacagtgcaaagctttccattttacatttatagagatattgtttattttcaaatgataagcagaaaattaaattgctctgactctgtaattcttaatgacttaatgatcttcatttagctaaatgttcccattgttttgtagttaaagcatgagagaaagaaaaaataagaaataaatgtggtcttataagt

SEQ ID NO: 356402 - DNA, 5052 bp, Homo sapiens
tgaaatatggagaatagtcttagatgtgtttgggtacccaagctggcttttgtactcttcggagcttccttgctcagcgcgcatcttcaagtaaccggttttcaaattaaagctttcacagcactgcgcttcctctcagaaccttctgatgccgtcacaatgcggggaggaaatgtcctcctcgactgctccgcggagtccgaccgaggagttccagtgatcaagtggaagaaagatggcattcatctggccttgggaatggatgaaaggaagcagcaactttcaaatgggtctctgctgatacaaaacatacttcattccagacaccacaagccagatgagggactttaccaatgtgaggcatctttaggagattctggctcaattattagtcggacagcaaaagttgcagtagcaggaccactgaggttcctttcacagacagaatctgtcacagccttcatgggagacacagtgctactcaagtgtgaagtcattggggagcccatgccaacaatccactggcagaagaaccaacaagacctgactccaatcccaggtgactcccgagtggtggtcttgccctctggagcattgcagatcagccgactccaaccgggggacattggaatttaccgatgctcagctcgaaatccagccagctcaagaacaggaaatgaagcagaagtcagaattttatcagatccaggactgcatagacagctgtattttctgcaaagaccatccaatgtagtagccattgaaggaaaagatgctgtcctggaatgttgtgtttctggctatcctccaccaagttttacctggttacgaggcgaggaagtcatccaactcaggtctaaaaagtattctttattgggtggaagcaacttgcttatctccaatgtgacagatgatgacagtggaatgtatacctgtgttgtcacatataaaaatgagaatattagtgcctctgcagagctcacagtcttggttccgccatggtttttaaatcatccttccaacctgtatgcctatgaaagcatggatattgagtttgaatgtacagtctctggaaagcctgtgcccactgtgaattggatgaagaatggagatgtggtcattcctagtgattattttcagatagtgggaggaagcaacttacggatacttggggtggtgaagtcagatgaaggcttttatcaatgtgtggctgaaaatgaggctggaaatgcccagaccagtgcacagctcattgtccctaagcctgcaatcccaagctccagtgtcctcccttcggctcccagagatgtggtccctgtcttggtttccagccgatttgtccgtctcagctggcgcccacctgcagaagcgaaagggaacattcaaactttcacggtctttttctccagagaaggtgacaacagggaacgagcattgaatacaacacagcctgggtcccttcagctcactgtgggaaacctgaagccagaagccatgtacacctttcgagttgtggcttacaatgaatggggaccgggagagagttctcaacccatcaaggtggccacacagcctgagttgcaagttccagggccagtagaaaacctgcaagctgtatctacctcacctacctcaattcttattacctgggaaccccctgcctatgcaaacggtccagtccaaggttacagattgttctgcactgaggtgtccacaggaaaagaacagaatatagaggttgatggactatcttataaactggaaggcctgaaaaaattcaccgaatatagtcttcgattcttagcttataatcgctatggtccgggcgtctctactgatgatataacagtggttacactttctgacgtgccaagtgccccgcctcagaacgtctccctggaagtggtcaattcaagaagtatcaaagttagctggctgcctcctccatcaggaacacaaaatggatttattaccggctataaaattcgacacagaaagacgacccgcaggggtgagatggaaacactggagccaaacaacctctggtacctattcacaggactggagaaaggaagtcagtacagtttccaggtgtcagccatgacagtcaatggtactggaccaccttccaactggtatactgcagagactccagagaatgatctagatgaatctcaagttcctgatcaaccaagctctcttcatgtgaggccccagactaactgcatcatcatgagttggactcctcccttgaacccaaacatcgtggtgcgaggttatattatcggttatggcgttgggagcccttacgctgagacagtgcgtgtggacagcaagcagcgatattattccattgagaggttagagtcaagttcccattatgtaatctccctaaaagcttttaacaatgccggagaaggagttcctctttatgaaagtgccaccaccaggtctataaccgatctctccacccccatgctcccaccagtaggtgtacaggctgtggctcttacccatgatgctgtgagggtcagctgggcagacaactctgtccctaagaaccaaaagacgtctgaggtgcgactttacaccgtccggtggagaaccagcttttctgcaagtgcaaaatacaagtcagaagacacaacatctctaagttacacagcaacaggcctcaaaccaaacacaatgtatgaattctcggtcatggtaacaaaaaacagaaggtccagtacttggagcatgactgcacatgccaccacgtatgaagcagcccccacctctgctcccaaggacttgacagtcattactagggaagggaagcctcgtgccgtcattgtgagttggcagcctcccttggaagccaatgggaaaattactgcttacatcttattttataccttggacaagaacatcccaattgatgactggattatggaaacaatcagtggtgataggcttactcatcaaatcatggatctcaaccttgatactatgtattactttcgaattcaagcacgaaattcaaaaggagtggggccactctctgatcctatcctcttcaggactctgaaagtggaacaccctgacaaaatggctaatgaccaaggtcgtcatggagatggaggttattggccagttgatactaatttgattgatagaagcaccctaaatgagccgccaattggacaaatgcaccccccgcatggcagtgtcactcctcagaagaacagcaacctgcttgtgatcattgtggtcaccgttggtgtcatcacagtgctggtagtggtcatcgtggctgtgatttgcacccgacgctcttcagcccagcagagaaagaaacgggccacccacagtgctggcaaaaggaagggcagccagaaggacctccgaccccctgatctttggatccatcatgaagaaatggagatgaaaaatattgaaaagccatctggcactgaccctgcaggaagggactctcccatccaaagttgccaagacctcacaccagtcagccacagccagtcagaaacccaactgggaagcaaaagcacctctcattcaggtcaagacactgaggaagcagggagctctatgtccactctggagaggtcgctggctgcacgccgagccccccgggccaagctcatgattcccatggatgcccagtccaacaatcctgctgtcgtgagcgccatcccggtgccaacgctagaaagtgcccagtacccaggaatcctcccgtctcccacctgtggatatccccacccgcagttcactctccggcctgtgccattcccaacactctcagtggaccgaggtttcggagcaggaagaagtcagtcagtgagtgaaggaccaactacccaacaaccacctatgctgcccccatctcagcctgagcattctagcagcgaggaggcaccaagcagaaccatccccacagcttgtgttcgaccaactcacccactccgcagctttgctaatcctttgctacctccaccaatgagtgcaatagaaccgaaagtcccttacacaccacttttgtctcagccagggcccactcttcctaagacccatgtgaaaacagcctcccttgggttggctggaaaagcaagatcccctttgcttcctgtgtctgtgccaacagcccctgaagtgtctgaggagagccacaaaccaacagaggattcagccaatgtgtatgaacaggatgatctgagtgaacaaatggcaagtttggaaggactcatgaagcagcttaatgccatcacaggctcagccttttaacatgtatttctgaatggatgaggtgaattttccgggaactttgcagcataccaattacccataaacagcacacctgtgtccaagaactctaaccagtgtacaggtcacccatcaggaccactcagttaaggaagatcctgaagcagttcagaaggaataagcattccttctttcacaggcatcaggaattgtcaaatgatgattatgagttccctaaacaaaagcaaagatgcattttcactgcaatgtcaaagtttaagctgctagaatagtcatgggcctttgtcactgcagtgaccacactgtcataactaatacctatgttttcctttgtcaaggcctgttgtttaatgtgtaggtctagtcttacaaaatgcaagtgcattatttaagcctgtaccatgccatggcaaaccagtgcaagctcactattttgttttcaacttaaacatacaaagcacccatgggaatctctcatgccatagcaccaaaggattggatgttttccttacagcacaaaaagtaaatagtaaacaaacaaaaggcagagaatgcttatgtttgtaactcagtcattcatcttgcacaagtggtggatattagtgagtggctaaaaattcacctattttggcaagtatttgtaaatccacccttggttaatatgtatgtctggagtccaggaatataaaaatctgcaactagtggcattctgccagcagcagtacatttctggaaagaggatataatatgcaatcttctcag

SEQ ID NO: 356403 - DNA, 4399 bp, Homo sapiens
tgaaatatggagaatagtcttagatgtgtttgggtacccaagctggcttttgtactcttcggagcttccttgctcagcgcgcatcttcaagtaaccggttttcaaattaaagctttcacagcactgcgcttcctctcagaaccttctgatgccgtcacaatgcggggaggaaatgtcctcctcgactgctccgcggagtccgaccgaggagttccagtgatcaagtggaagaaagatggcattcatctggccttgggaatggatgaaaggaagcagcaactttcaaatgggtctctgctgatacaaaacatacttcattccagacaccacaagccagatgagggactttaccaatgtgaggcatctttaggagattctggctcaattattagtcggacagcaaaagttgcagtagcaggaccactgaggttcctttcacagacagaatctgtcacagccttcatgggagacacagtgctactcaagtgtgaagtcattggggagcccatgccaacaatccactggcagaagaaccaacaagacctgactccaatcccaggtgactcccgagtggtggtcttgccctctggagcattgcagatcagccgactccaaccgggggacattggaatttaccgatgctcagctcgaaatccagccagctcaagaacaggaaatgaagcagaagtcagaattttatcagatccaggactgcatagacagctgtattttctgcaaagaccatccaatgtagtagccattgaaggaaaagatgctgtcctggaatgttgtgtttctggctatcctccaccaagttttacctggttacgaggcgaggaagtcatccaactcaggtctaaaaagtattctttattgggtggaagcaacttgcttatctccaatgtgacagatgatgacagtggaatgtatacctgtgttgtcacatataaaaatgagaatattagtgcctctgcagagctcacagtcttggttccgccatggtttttaaatcatccttccaacctgtatgcctatgaaagcatggatattgagtttgaatgtacagtctctggaaagcctgtgcccactgtgaattggatgaagaatggagatgtggtcattcctagtgattattttcagatagtgggaggaagcaacttacggatacttggggtggtgaagtcagatgaaggcttttatcaatgtgtggctgaaaatgaggctggaaatgcccagaccagtgcacagctcattgtccctaagcctgcaatcccaagctccagtgtcctcccttcggctcccagagatgtggtccctgtcttggtttccagccgatttgtccgtctcagctggcgcccacctgcagaagcgaaagggaacattcaaactttcacggtctttttctccagagaaggtgacaacagggaacgagcattgaatacaacacagcctgggtcccttcagctcactgtgggaaacctgaagccagaagccatgtacacctttcgagttgtggcttacaatgaatggggaccgggagagagttctcaacccatcaaggtggccacacagcctgagttgcaagttccagggccagtagaaaacctgcaagctgtatctacctcacctacctcaattcttattacctgggaaccccctgcctatgcaaacggtccagtccaaggttacagattgttctgcactgaggtgtccacaggaaaagaacagaatatagaggttgatggactatcttataaactggaaggcctgaaaaaattcaccgaatatagtcttcgattcttagcttataatcgctatggtccgggcgtctctactgatgatataacagtggttacactttctgacgtgccaagtgccccgcctcagaacgtctccctggaagtggtcaattcaagaagtatcaaagttagctggctgcctcctccatcaggaacacaaaatggatttattaccggctataaaattcgacacagaaagacgacccgcaggggtgagatggaaacactggagccaaacaacctctggtacctattcacaggactggagaaaggaagtcagtacagtttccaggtgtcagccatgacagtcaatggtactggaccaccttccaactggtatactgcagagactccagagaatgatctagatgaatctcaagttcctgatcaaccaagctctcttcatgtgaggccccagactaactgcatcatcatgagttggactcctcccttgaacccaaacatcgtggtgcgaggttatattatcggttatggcgttgggagcccttacgctgagacagtgcgtgtggacagcaagcagcgatattattccattgagaggttagagtcaagttcccattatgtaatctccctaaaagcttttaacaatgccggagaaggagttcctctttatgaaagtgccaccaccaggtctataaccgatctctccacccccatgctcccaccagtaggtgtacaggctgtggctcttacccatgatgctgtgagggtcagctgggcagacaactctgtccctaagaaccaaaagacgtctgaggtgcgactttacaccgtccggtggagaaccagcttttctgcaagtgcaaaatacaagtcagaagacacaacatctctaagttacacagcaacaggcctcaaaccaaacacaatgtatgaattctcggtcatggtaacaaaaaacagaaggtccagtacttggagcatgactgcacatgccaccacgtatgaagcagcccccacctctgctcccaaggacttgacagtcattactagggaagggaagcctcgtgccgtcattgtgagttggcagcctcccttggaagccaatgggaaaattactgcttacatcttattttataccttggacaagaacatcccaattgatgactggattatggaaacaatcagtggtgataggcttactcatcaaatcatggatctcaaccttgatactatgtattactttcgaattcaagcacgaaattcaaaaggagtggggccactctctgatcctatcctcttcaggactctgaaagtggaacaccctgacaaaatggctaatgaccaaggtcgtcatggagatggaggttattggccagttgatactaatttgattgatagaagcaccctaaatgagccgccaattggacaaatgcaccccccgcatggcagtgtcactcctcagaagaacagcaacctgcttgtgatcattgtggtcaccgttggtgtcatcacagtgctggtagtggtcatcgtggctgtgatttgcacccgacgctcttcagcccagcagagaaagaaacgggccacccacagtgctggcaaaaggaagggcagccagaaggacctccgaccccctgatctttggatccatcatgaagaaatggagatgaaaaatattgaaaagccatctggcactgaccctgcaggaagggactctcccatccaaagttgccaagacctcacaccagtcagccacagccagtcagaaacccaactgggaagcaaaagcacctctcattcaggtcaagacactgaggaagcagggagctctatgtccactctggagaggtcgctggctgcacgccgagccccccgggccaagctcatgattcccatggatgcccagtccaacaatcctgctgtcgtgagcgccatcccggtgccaacgctagaaagtgcccagtacccaggaatcctcccgtctcccacctgtggatatccccacccgcagttcactctccggcctgtgccattcccaacactctcagtggaccgaggtttcggagcaggaagaagtcagtcagtgagtgaaggaccaactacccaacaaccacctatgctgcccccatctcagcctgagcattctagcagcgaggaggcaccaagcagaaccatccccacagcttgtgttcgaccaactcacccactccgcagctttgctaatcctttgctacctccaccaatgagtgcaatagaaccgaaagtcccttacacaccacttttgtctcagccagggcccactcttcctaagacccatgtgaaaacagcctcccttgggttggctggaaaagcaagatcccctttgcttcctgtgtctgtgccaacagcccctgaagtgtctgaggagagccacaaaccaacagaggattcagccaatgtaagggcatctttaaaattcatgcttcatcaagggacagattgactggcgctgtgtaatagcatctaaaccaatgagtactgtccattcaccccaggccaccccaggccaccccaggccattgttgttcttattgttgtttgttcctttgttttcctgcacttaaatatgaagaggaaataaaagctatgaaaaaaaa

SEQ ID NO: 356404 - DNA, 636 bp, Homo sapiens
tgtcttcccctccccccccccccattcccttcgctgtccccttccgcccccttggttttcaaattaaagctttcacagcactgcgcttcctctcagaaccttctgatgccgtcacaatgcggggaggaaatgtcctcctcgactgctccgcggagtccgaccgaggagttccagtgatcaagtggaagaaagatggcattcatctggccttgggaatggatgaaaggaagcagcaactttcaaatgggtctctgctgatacaaaacatacttcattccagacaccacaagccagatgagggactttaccaatgtgaggcatctttaggagattctggctcaattattagtcggacagcaaaagttgcagtagcagagagggaaatgtgaggctgagaaagtttggacaacatagccatggcagtttataactcaaagtatatggatggatgacactcgctagagagttgcaacagccgatgcagctgtccccaggccccaaactcacttatatttcctgaaacaccaggaaaagcatcttttatttttatatgagagccctaagagattattttcatcttattcaaaaatgaaaagattttatttaattaaaaaatctatttctattatcttaaaa

SEQ ID NO: 356405 - DNA, 479 bp, Homo sapiens
actcatgacagcaatgtagttatagatctgattttctttcagcaactatgctggcattaaacttaacaggcaaggtgtgcccctcctgagactgagttttcctcagtgtggaatgcttaagcttctgagaagccttagatgaaagctccctacgtaatggctgggggtgctgcccaacattcagtagagccccaggaagtttctgttgaatgaatgaatgaagtagctgtgtttttctccccccttttccactttctgctcccacctccaagcaaattagtgtatgcgtcctttcaaatttggtcaaatacctaaaacaatgtgagcaaatcctggtagagtgagcttcagcaagtgcatgtcctctaaccaaaattaagaaacgtgccaccaacatggcacatgtatacatatgtaacaaactctgacattgtgcacatgtaccctaaaacttaaagtataataataataaaaaaaaa

SEQ ID NO: 356406 - DNA, 576 bp, Homo sapiens
  misc_feature (109)..(109): n is a, c, g, or t
gtcctagcttcgccaatggtcctgcctgtcctagcctcgccagtgtcctagcctcgccagtgtcactagcctcgccagtgtcctagcctcgccagtgtcctagcctcgncagtgaacctaagagtgagaactacacctacatttggtggctaaatggtcagagcctccctgtcagtcccagggtaaagcgacccattgaaaacaggatcctcattctacccaatgtcacgagaaatgaaacaggaccttatcaatgtgaaatacgggaccgatatggtggcatccgcagtgacccagtcaccctgaatgtcctctatggtccagacctccccagcatttacccttcattcacctattaccgttcaggagaaaacctctacttgtcctgcttcgcggaatctaacccaccggcagagtatttttggacaattaatgggaagtttcagcaatcaggacaaaagctctctatcccccaaattactacaaagcatagagggctctatacttgctctgttcgtaactcagccactggcaaggctaggacactggcgaggctagacactggcgaggctagga

SEQ ID NO: 356407 - DNA, 295 bp, Homo sapiens
  misc_feature (1)..(1): n is a, c, g, or t
  misc_feature (3)..(3): n is a, c, g, or t
ngngaaggaggaaggacagcacagcctacagccgtgctcaggaagtttctggatcctaggctcagctccacagaggagaacacgcaggcgcagagaccatggggcccctctcagcccctccctgcacacagcacatcacctggaagggggtcctgctcacagcatgactttttaaaagtcatggaacttgtctatcgccggccatgtcatacattgaagtatgacaggacggacggatagcggcggacttcagatagtggagagggttaacatagtcggtaacagtctcgtagat

SEQ ID NO: 356408 - DNA, 1899 bp, Homo sapiens
  misc_feature (1)..(1): n is a, c, g, or t
  misc_feature (3)..(3): n is a, c, g, or t
  misc_feature (1644)..(1644): n is a, c, g, or t
  misc_feature (1691)..(1691): n is a, c, g, or t
  misc_feature (1696)..(1696): n is a, c, g, or t
  misc_feature (1699)..(1699): n is a, c, g, or t
  misc_feature (1710)..(1710): n is a, c, g, or t
  misc_feature (1712)..(1712): n is a, c, g, or t
  misc_feature (1714)..(1714): n is a, c, g, or t
  misc_feature (1719)..(1719): n is a, c, g, or t
  misc_feature (1722)..(1722): n is a, c, g, or t
  misc_feature (1724)..(1724): n is a, c, g, or t
  misc_feature (1726)..(1726): n is a, c, g, or t
  misc_feature (1730)..(1730): n is a, c, g, or t
  misc_feature (1746)..(1746): n is a, c, g, or t
ngngaaggaggaaggacagcacagcctacagccgtgctcaggaagtttctggatcctaggctcagctccacagaggagaacacgcaggcgcagagaccatggggcccctctcagcccctccctgcacacagcacatcacctggaagggggtcctgctcacagcatcacttttaaacttctggaacctgcctatcactgctcaagtcacgattgaagccctgccacccaaagtttccgaggggaaggatgttcttctacttgtccacaatttgcctcagaatcttgctggctacatctggtacaaaggacaactgatggacctctaccattacattacatcatatgtagtagacggtcaaataaatatatatgggcctgcatacactggacgagaaacagtatattccaatgcatccctgctgatccagaatgtcacccgggaagacgcaggatcctacaccttacacatcataaagcgaggtgataggactagaggagtaactggatatttcaccttcaacttatacctgaagctgcccaagccctacatcaccatcaacaactcaaaacccagggagaataaggatgtcttagccttcacctgtgaacctaagagtgagaactacacctacatttggtggctaaatggtcagagcctcccggtcagtcccagggtaaagcaacccattgaaaacaggatcctcattctacccagtgtcacgagaaatgaaacaggaccctatgaatgtgaaatacgggaccgagatggtggcatgcacagtgacccagtcaccctgaatgtcctctatggtccagacctccccagcatttacccttcattcacctattaccgttcaggagaaaacctctacttgtcctgcttcgcggaatctaacccaccggcagagtatttttggacaattaatgggaagtttcagcaatcaggacaaaagctctctatcccccaaattactacaaagcatagagggctctatacttgctctgttcgtaactcagccactggcaaggaaagctccaaatccatgacagtcgaagtctctgctccttcaggaataggacgtcttcctctccttaatccaatatagcagccgtgaagtcatttctgtatttcaggaagactggcagacagttgctttgattcttcctcaaactacttacaatcacctacagtccaaaattgctttttcttcaaggagatttatggaaaagactctgacaaggactcttgaatacaagttcctgataacttcaagatcataccactggactaagaactttcaaaattttaatgaacaggctgataccttcatgaaattctagacaaagaagaaaaaaactccatgttattggactaaataatcaaaagcataatgttttcataattttctatttgaaaatgtgctgattctttgaatgttttattctccagatttatgaactttttttcttgagcaattggtaaagtatacttttgtaaacaaaaattgaaacatttgcttttgctctctatctgagtgccccagaattgggaaactattcatgagtattcatatgtttatggtaataaagttatctgcacaagttcaaaaaaaaaaaacaaacaacaaaaaaaaatttttgggnggcttgggccttggaaaaggtttcttaaaaccatttgtttgggggcnggggngcncattgggttantntnacacnggncnanaggngtcccagagaaaaccncggggcgagaacatagggctgtggattctccccccatataaaaaaacggcgcgggggacaacgcgaagcctttctggaccaaattccaagatgggattcgggggaccaaggggggtcctcccaagagggactccagggagccgaataaatagc

SEQ ID NO: 356409 - DNA, 2007 bp, Homo sapiens
  misc_feature (1)..(1): n is a, c, g, or t
  misc_feature (3)..(3): n is a, c, g, or t
  misc_feature (1752)..(1752): n is a, c, g, or t
  misc_feature (1799)..(1799): n is a, c, g, or t
  misc_feature (1804)..(1804): n is a, c, g, or t
  misc_feature (1807)..(1807): n is a, c, g, or t
  misc_feature (1818)..(1818): n is a, c, g, or t
  misc_feature (1820)..(1820): n is a, c, g, or t
  misc_feature (1822)..(1822): n is a, c, g, or t
  misc_feature (1827)..(1827): n is a, c, g, or t
  misc_feature (1830)..(1830): n is a, c, g, or t
  misc_feature (1832)..(1832): n is a, c, g, or t
  misc_feature (1834)..(1834): n is a, c, g, or t
  misc_feature (1838)..(1838): n is a, c, g, or t
  misc_feature (1854)..(1854): n is a, c, g, or t
ngngaaggaggaaggacagcacagcctacagccgtgctcaggaagtttctggatcctaggctcagctccacagaggagaacacgcaggcgcagagaccatggggcccctctcagcccctccctgcacacagcacatcacctggaagggggtcctgctcacagcatcacttttaaacttctggaacctgcctatcactgctcaagtcacgattgaagccctgccacccaaagtttccgaggggaaggatgttcttctacttgtccacaatttgcctcagaatcttgctggctacatctggtacaaaggacaactgatggacctctaccattacattacatcatatgtagtagacggtcaaataaatatatatgggcctgcatacactggacgagaaacagtatattccaatgcatccctgctgatccagaatgtcacccgggaagacgcaggatcctacaccttacacatcataaagcgaggtgataggactagaggagtaactggatatttcaccttcaacttatacctgaagctgcccaagccctacatcaccatcaacaactcaaaacccagggagaataaggatgtcttagccttcacctgtgaacctaagagtgagaactacacctacatttggtggctaaatggtcagagcctcccggtcagtcccagggtaaagcaacccattgaaaacaggatcctcattctacccagtgtcacgagaaatgaaacaggaccctatgaatgtgaaatacgggaccgagatggtggcatgcacagtgacccagtcaccctgaatgtcctctatggtccagacctccccagcatttacccttcattcacctattaccgttcaggagaaaacctctacttgtcctgcttcgcggaatctaacccaccggcagagtatttttggacaattaatgggaagtttcagcaatcaggacaaaagctctctatcccccaaattactacaaagcatagagggctctatacttgctctgttcgtaactcagccactggcaaggaaagctccaaatccatgacagtcgaagtctctgctccttcaggaataggacgtcttcctctccttaatccaatatagcagccgtgaagtcatttctgtatttcaggaagactggcagacagttgctttgattcttcctcaaactacttacaatcacctacagtccaaaattgctttttcttcaaggagatttatggaaaagactctgacaaggactcttgaatacaagttcctgataacttcaagatcataccactggactaagaactttcaaaattttaatgaacaggctgataccttcatgaaattctagacaaagaagaaaaaaactccatgttattggactaaataatcaaaagcataatgttttcataattttctatttgaaaatgtgctgattctttgaatgttttattctccagatttatgaactttttttcttgagcaattggtaaagtatacttttgtaaacaaaaattgaaacatttgcttttgctctctatctgagtgccccagaattgggaaactattcatgagtattcatatgtttatggtaataaagttatctgcacaagttcaaaaacaaaaaacaacaaaaacaacgaaaaacaacaaaaacataaaaaagtcgaaacacaaaacacacacaaaaaaagaccaaaaaaaacaccaacaagggacaacacaaaaaaaaaaaacaaacaacaaaaaaaaatttttgggnggcttgggccttggaaaaggtttcttaaaaccatttgtttgggggcnggggngcncattgggttantntnacacnggncnanaggngtcccagagaaaaccncggggcgagaacatagggctgtggattctccccccatataaaaaaacggcgcgggggacaacgcgaagcctttctggaccaaattccaagatgggattcgggggaccaaggggggtcctcccaagagggactccagggagccgaataaatagc

SEQ ID NO: 356410 - DNA, 1831 bp, Homo sapiens
  misc_feature (1)..(1): n is a, c, g, or t
  misc_feature (3)..(3): n is a, c, g, or t
  misc_feature (1576)..(1576): n is a, c, g, or t
  misc_feature (1623)..(1623): n is a, c, g, or t
  misc_feature (1628)..(1628): n is a, c, g, or t
  misc_feature (1631)..(1631): n is a, c, g, or t
  misc_feature (1642)..(1642): n is a, c, g, or t
  misc_feature (1644)..(1644): n is a, c, g, or t
  misc_feature (1646)..(1646): n is a, c, g, or t
  misc_feature (1651)..(1651): n is a, c, g, or t
  misc_feature (1654)..(1654): n is a, c, g, or t
  misc_feature (1656)..(1656): n is a, c, g, or t
  misc_feature (1658)..(1658): n is a, c, g, or t
  misc_feature (1662)..(1662): n is a, c, g, or t
  misc_feature (1678)..(1678): n is a, c, g, or t
ngngaaggaggaaggacagcacagcctacagccgtgctcaggaagtttctggatcctaggctcagctccacagaggagaacacgcaggcgcagagaccatggggcccctctcagcccctccctgcacacagcacatcacctggaagggggtcctgctcacagcatcacttttaaacttctggaacctgcctatcactgctcaagtcacgattgaagccctgccacccaaagtttccgaggggaaggatgttcttctacttgtccacaatttgcctcagaatcttgctggctacatctggtacaaaggacaactgatggacctctaccattacattacatcatatgtagtagacggtcaaataaatatatatgggcctgcatacactggacgagaaacagtatattccaatgcatccctgctgatccagaatgtcacccgggaagacgcaggatcctacaccttacacatcataaagcgaggtgataggactagaggagtaactggatatttcaccttcaacttatacctgaagctgcccaagccctacatcaccatcaacaactcaaaacccagggagaataaggatgtcttagccttcacctgtgaacctaagagtgagaactacacctacatttggtggctaaatggtcagagcctcccggtcagtcccagggtaaagcaacccattgaaaacaggatcctcattctacccagtgtcacgagaaatgaaacaggaccctatgaatgtgaaatacgggaccgagatggtggcatgcacagtgacccagtcaccctgaatgtcctctatggtccagacctccccagcatttacccttcattcacctattaccgttcaggagaaaacctctacttgtcctgcttcgcggaatctaacccaccggcagagtatttttggacaattaatgggaagtttcagcaatcaggacaaaagctctctatcccccaaattactacaaagcatagagggctctatacttgctctgttcgtaactcagccactggcaaggaaagctccaaatccatgacagtcgaagtctctgctccttcaggaataggacgtcttcctctccttaatccaatatagcagccgtgaagtcatttctgtatttcaggaagactggcaggagatttatggaaaagactctgacaaggactcttgaatacaagttcctgataacttcaagatcataccactggactaagaactttcaaaattttaatgaacaggctgataccttcatgaaattctagacaaagaagaaaaaaactccatgttattggactaaataatcaaaagcataatgttttcataattttctatttgaaaatgtgctgattctttgaatgttttattctccagatttatgaactttttttcttgagcaattggtaaagtatacttttgtaaacaaaaattgaaacatttgcttttgctctctatctgagtgccccagaattgggaaactattcatgagtattcatatgtttatggtaataaagttatctgcacaagttcaaaaaaaaaaaacaaacaacaaaaaaaaatttttgggnggcttgggccttggaaaaggtttcttaaaaccatttgtttgggggcnggggngcncattgggttantntnacacnggncnanaggngtcccagagaaaaccncggggcgagaacatagggctgtggattctccccccatataaaaaaacggcgcgggggacaacgcgaagcctttctggaccaaattccaagatgggattcgggggaccaaggggggtcctcccaagagggactccagggagccgaataaatagc

SEQ ID NO: 356411 - DNA, 1326 bp, Homo sapiens
  misc_feature (1071)..(1071): n is a, c, g, or t
  misc_feature (1118)..(1118): n is a, c, g, or t
  misc_feature (1123)..(1123): n is a, c, g, or t
  misc_feature (1126)..(1126): n is a, c, g, or t
  misc_feature (1137)..(1137): n is a, c, g, or t
  misc_feature (1139)..(1139): n is a, c, g, or t
  misc_feature (1141)..(1141): n is a, c, g, or t
  misc_feature (1146)..(1146): n is a, c, g, or t
  misc_feature (1149)..(1149): n is a, c, g, or t
  misc_feature (1151)..(1151): n is a, c, g, or t
  misc_feature (1153)..(1153): n is a, c, g, or t
  misc_feature (1157)..(1157): n is a, c, g, or t
  misc_feature (1173)..(1173): n is a, c, g, or t
gggagaataaggatgtcttagccttcacctgtgaacctaagagtgagaactacacctacatttggtggctaaacggtcagagcctccccgtcagtcccggggtaaagcgacccattgaaaacaggatactcattctacccagtgtcacgagaaatgaaacaggaccctatcaatgtgaaatacgggaccgatatggtggcctccgcagtaacccagtcatcctaaatgtcctctatggtccagacctccccagcatttacccttcattcacctattaccgttcaggagaaaacctctacttgtcctgcttcgcggaatctaacccaccggcagagtatttttggacaattaatgggaagtttcagcaatcaggacaaaagctctctatcccccaaattactacaaagcatagagggctctatacttgctctgttcgtaactcagccactggcaaggaaagctccaaatccatgacagtcgaagtctctgctccttcaggaataggacgtcttcctctccttaatccaatatagcagccgtgaagtcatttctgtatttcaggaagactggcagacagttgctttgattcttcctcaaactacttacaatcacctacagtccaaaattgctttttcttcaaggagatttatggaaaagactctgacaaggactcttgaatacaagttcctgataacttcaagatcataccactggactaagaactttcaaaattttaatgaacaggctgataccttcatgaaattctagacaaagaagaaaaaaactccatgttattggactaaataatcaaaagcataatgttttcataattttctatttgaaaatgtgctgattctttgaatgttttattctccagatttatgaactttttttcttgagcaattggtaaagtatacttttgtaaacaaaaattgaaacatttgcttttgctctctatctgagtgccccagaattgggaaactattcatgagtattcatatgtttatggtaataaagttatctgcacaagttcaaaaaaaaaaaacaaacaacaaaaaaaaatttttgggnggcttgggccttggaaaaggtttcttaaaaccatttgtttgggggcnggggngcncattgggttantntnacacnggncnanaggngtcccagagaaaaccncggggcgagaacatagggctgtggattctccccccatataaaaaaacggcgcgggggacaacgcgaagcctttctggaccaaattccaagatgggattcgggggaccaaggggggtcctcccaagagggactccagggagccgaataaatagc

SEQ ID NO: 356412 - DNA, 1357 bp, Homo sapiens
  misc_feature (1)..(1): n is a, c, g, or t
  misc_feature (3)..(3): n is a, c, g, or t
ngngaaggaggaaggacagcacagcctacagccgtgctcaggaagtttctggatcctaggctcagctccacagaggagaacacgcaggcgcagagaccatggggcccctctcagcccctccctgcacacagcacatcacctggaagggggtcctgctcacagcatcacttttaaacttctggaacctgcctatcactgctcaagtcacgattgaagccctgccacccaaagtttccgaggggaaggatgttcttctacttgtccacaatttgcctcagaatcttgctggctacatctggtacaaaggacaactgatggacctctaccattacattacatcatatgtagtagacggtcaaataaatatatatgggcctgcatacactggacgagaaacagtatattccaatgcatccctgctgatccagaatgtcacccgggaagacgcaggatcctacaccttacacatcataaagcgaggtgataggactagaggagtaactggatatttcaccttcaacttatacctgaagctgcccaagccctacatcaccatcaacaactcaaaacccagggagaataaggatgtcttagccttcacctgtgaacctaagagtgagaactacacctacatttggtggctaaatggtcagagcctcccggtcagtcccagggtaaagcaacccattgaaaacaggatcctcattctacccagtgtcacgagaaatgaaacaggaccctatgaatgtgaaatacgggaccgagatggtggcatgcacagtgacccagtcaccctgaatgtcctctatggtccagacctccccagcatttacccttcattcacctattaccgttcaggagaaaacctctacttgtcctgcttcgcggaatctaacccaccggcagagtatttttggacaattaatgggaagtttcagcaatcaggacaaaagctctctatcccccaaattactacaaagcatagagggctctatacttgctctgttcgtaactcagccactggcaaggaaagctccaaatccatgacagtcgaagtctctgctccttcaggaataggacgtcttcctctccttaatccaatatagcagccgtgaagtcatttctgtatttcaggaagactggcagacagttgctttgattcttcctcaaactacttacaatcacctacagtccaaaattgctttttcttcaaggagatttatggaaaagactctgacaaggactcttgaatacaagttcctgataacttcaagatcataccactggactaagaactttcaaaattttaatgaacaggctgataccatccttggttctcttagtacggtcgcaggta

SEQ ID NO: 356413 - DNA, 1650 bp, Homo sapiens
  misc_feature (1395)..(1395): n is a, c, g, or t
  misc_feature (1442)..(1442): n is a, c, g, or t
  misc_feature (1447)..(1447): n is a, c, g, or t
  misc_feature (1450)..(1450): n is a, c, g, or t
  misc_feature (1461)..(1461): n is a, c, g, or t
  misc_feature (1463)..(1463): n is a, c, g, or t
  misc_feature (1465)..(1465): n is a, c, g, or t
  misc_feature (1470)..(1470): n is a, c, g, or t
  misc_feature (1473)..(1473): n is a, c, g, or t
  misc_feature (1475)..(1475): n is a, c, g, or t
  misc_feature (1477)..(1477): n is a, c, g, or t
  misc_feature (1481)..(1481): n is a, c, g, or t
  misc_feature (1497)..(1497): n is a, c, g, or t
actgactacttgtgggagagaaggaaaaaaagctaagtgcaaagaatcaagcctgatatgttagtttttaccaactgagatgcacccaagatgggattagacatacaagataatttatcagggaggacacctgtgagggaatgtggggcagacatgaaggcagtatgggagaacccacagaccactatgcagagctgattcctgtgaaaaagaaagagaaagaagttttaggtaccaatgcagttctaagagtttttgcaaggctgagggggagtcctccaaccagtcaccctttagagttaaagagagcctcagagaactaggcttgctttcacgcccttcctgggagcctgtgggaaagaagctttctgtgcaaaggaggtgatgaatgtgaaatgcacggacgtgggccttctgtcaatcagctccctgccatggagacctgacagagtctcattcatggctgccacaacagagagactgagaaaaagatgcaaccatgaaaaggtgaaaaggtggtaagttctaatgacatagaaaatagcaatcagcctttcttatgtctgaaagccttccaaaatatctgagtgcagtagagatttgacagaggactgatcaccatcctagaaacatggtgagagggaaaaaaaaaactgcaagaatataatcatctcccatcaatttcccaagaggaataatgtagtacttgaagaaacaattatagagtacctcatgctacatgcctcttcctgaggctcccccatgtaaaataacatcaccttcattccttctttacttttctttccatgacagctccttcaggaataggacgtcttcctctccttaatccaatatagcagccgtgaagtcatttctgtatttcaggaagactggcagacagttgctttgattcttcctcaaactacttacaatcacctacagtccaaaattgctttttcttcaaggagatttatggaaaagactctgacaaggactcttgaatacaagttcctgataacttcaagatcataccactggactaagaactttcaaaattttaatgaacaggctgataccttcatgaaattctagacaaagaagaaaaaaactccatgttattggactaaataatcaaaagcataatgttttcataattttctatttgaaaatgtgctgattctttgaatgttttattctccagatttatgaactttttttcttgagcaattggtaaagtatacttttgtaaacaaaaattgaaacatttgcttttgctctctatctgagtgccccagaattgggaaactattcatgagtattcatatgtttatggtaataaagttatctgcacaagttcaaaaaaaaaaaacaaacaacaaaaaaaaatttttgggnggcttgggccttggaaaaggtttcttaaaaccatttgtttgggggcnggggngcncattgggttantntnacacnggncnanaggngtcccagagaaaaccncggggcgagaacatagggctgtggattctccccccatataaaaaaacggcgcgggggacaacgcgaagcctttctggaccaaattccaagatgggattcgggggaccaaggggggtcctcccaagagggactccagggagccgaataaatagc

SEQ ID NO: 356414 - DNA, 1931 bp, Homo sapiens
  misc_feature (1)..(1): n is a, c, g, or t
  misc_feature (3)..(3): n is a, c, g, or t
  misc_feature (1676)..(1676): n is a, c, g, or t
  misc_feature (1723)..(1723): n is a, c, g, or t
  misc_feature (1728)..(1728): n is a, c, g, or t
  misc_feature (1731)..(1731): n is a, c, g, or t
  misc_feature (1742)..(1742): n is a, c, g, or t
  misc_feature (1744)..(1744): n is a, c, g, or t
  misc_feature (1746)..(1746): n is a, c, g, or t
  misc_feature (1751)..(1751): n is a, c, g, or t
  misc_feature (1754)..(1754): n is a, c, g, or t
  misc_feature (1756)..(1756): n is a, c, g, or t
  misc_feature (1758)..(1758): n is a, c, g, or t
  misc_feature (1762)..(1762): n is a, c, g, or t
  misc_feature (1778)..(1778): n is a, c, g, or t
ngngaaggaggaaggacagcacagcctacagccgtgctcaggaagtttctggatcctaggctcagctccacagaggagaacacgcaggcgcagagaccatggggcccctctcagcccctccctgcacacagcacatcacctggaagggggtcctgctcacagcatcacttttaaacttctggaacctgcctatcactgctcaagtcacgattgaagccctgccacccaaagtttccgaggggaaggatgttcttctacttgtccacaatttgcctcagaatcttgctggctacatctggtacaaaggacaactgatggacctctaccattacattacatcatatgtagtagacggtcaaataaatatatatgggcctgcatacactggacgagaaacagtatattccaatgcatccctgctgatccagaatgtcacccgggaagacgcaggatcctacaccttacacatcataaagcgaggtgataggactagaggagtaactggatatttcaccttcaacttatacctgaagctgcccaagccctacatcaccatcaacaactcaaaacccagggagaataaggatgtcttagccttcacctgtgaacctaagagtgagaactacacctacatttggtggctaaatggtcagagcctcccggtcagtcccagggtaaagcaacccattgaaaacaggatcctcattctacccagtgtcacgagaaatgaaacaggaccctatgaatgtgaaatacgggaccgagatggtggcatgcacagtgacccagtcaccctgaatgtcctctatggtccagacctccccagcatttacccttcattcacctattaccgttcaggagaaaacctctacttgtcctgcttcgcggaatctaacccaccggcagagtatttttggacaattaatgggaagtttcagcaatcaggacaaaagctctctatcccccaaattactacaaagcatagagggctctatacttgctctgttcgtaactcagccactggcaaggaaagctccaaatccatgacagtcgaagtctctgtttgtccagaagtggaattgctggatcaaatgctccttcaggaataggacgtcttcctctccttaatccaatatagcagccgtgaagtcatttctgtatttcaggaagactggcagacagttgctttgattcttcctcaaactacttacaatcacctacagtccaaaattgctttttcttcaaggagatttatggaaaagactctgacaaggactcttgaatacaagttcctgataacttcaagatcataccactggactaagaactttcaaaattttaatgaacaggctgataccttcatgaaattctagacaaagaagaaaaaaactccatgttattggactaaataatcaaaagcataatgttttcataattttctatttgaaaatgtgctgattctttgaatgttttattctccagatttatgaactttttttcttgagcaattggtaaagtatacttttgtaaacaaaaattgaaacatttgcttttgctctctatctgagtgccccagaattgggaaactattcatgagtattcatatgtttatggtaataaagttatctgcacaagttcaaaaaaaaaaaacaaacaacaaaaaaaaatttttgggnggcttgggccttggaaaaggtttcttaaaaccatttgtttgggggcnggggngcncattgggttantntnacacnggncnanaggngtcccagagaaaaccncggggcgagaacatagggctgtggattctccccccatataaaaaaacggcgcgggggacaacgcgaagcctttctggaccaaattccaagatgggattcgggggaccaaggggggtcctcccaagagggactccagggagccgaataaatagc

SEQ ID NO: 356415 - DNA, 1815 bp, Homo sapiens
  misc_feature (1)..(1): n is a, c, g, or t
  misc_feature (3)..(3): n is a, c, g, or t
  misc_feature (1560)..(1560): n is a, c, g, or t
  misc_feature (1607)..(1607): n is a, c, g, or t
  misc_feature (1612)..(1612): n is a, c, g, or t
  misc_feature (1615)..(1615): n is a, c, g, or t
  misc_feature (1626)..(1626): n is a, c, g, or t
  misc_feature (1628)..(1628): n is a, c, g, or t
  misc_feature (1630)..(1630): n is a, c, g, or t
  misc_feature (1635)..(1635): n is a, c, g, or t
  misc_feature (1638)..(1638): n is a, c, g, or t
  misc_feature (1640)..(1640): n is a, c, g, or t
  misc_feature (1642)..(1642): n is a, c, g, or t
  misc_feature (1646)..(1646): n is a, c, g, or t
  misc_feature (1662)..(1662): n is a, c, g, or t
ngngaaggaggaaggacagcacagcctacagccgtgctcaggaagtttctggatcctaggctcagctccacagaggagaacacgcaggcgcagagaccatggggcccctctcagcccctccctgcacacagcacatcacctggaagggggtcctgctcacagcatcacttttaaacttctggaacctgcctatcactgctcaagtcacgattgaagccctgccacccaaagtttccgaggggaaggatgttcttctacttgtccacaatttgcctcagaatcttgctggctacatctggtacaaaggacaactgatggacctctaccattacattacatcatatgtagtagacggtcaaataaatatatatgggcctgcatacactggacgagaaacagtatattccaatgcatccctgctgatccagaatgtcacccgggaagacgcaggatcctacaccttacacatcataaagcgaggtgataggactagaggagtaactggatatttcaccttcaacttatacctgaagctgcccaagccctacatcaccatcaacaactcaaaacccagggagaataaggatgtcttagccttcacctgtgaacctaagagtgagaactacacctacatttggtggctaaatggtcagagcctcccggtcagtcccagggtaaagcaacccattgaaaacaggatcctcattctacccagtgtcacgagaaatgaaacaggaccctatgaatgtgaaatacgggaccgagatggtggcatgcacagtgacccagtcaccctgaatgtcctctatggtccagacctccccagcatttacccttcattcacctattaccgttcaggagaaaacctctacttgtcctgcttcgcggaatctaacccaccggcagagtatttttggacaattaatgggaagtttcagcaatcaggacaaaagctctctatcccccaaattactacaaagcatagagggctctatacttgctctgttcgtaactcagccactggcaaggaaagctccaaatccatgacagtcgaagtctctgacagttgctttgattcttcctcaaactacttacaatcacctacagtccaaaattgctttttcttcaaggagatttatggaaaagactctgacaaggactcttgaatacaagttcctgataacttcaagatcataccactggactaagaactttcaaaattttaatgaacaggctgataccttcatgaaattctagacaaagaagaaaaaaactccatgttattggactaaataatcaaaagcataatgttttcataattttctatttgaaaatgtgctgattctttgaatgttttattctccagatttatgaactttttttcttgagcaattggtaaagtatacttttgtaaacaaaaattgaaacatttgcttttgctctctatctgagtgccccagaattgggaaactattcatgagtattcatatgtttatggtaataaagttatctgcacaagttcaaaaaaaaaaaacaaacaacaaaaaaaaatttttgggnggcttgggccttggaaaaggtttcttaaaaccatttgtttgggggcnggggngcncattgggttantntnacacnggncnanaggngtcccagagaaaaccncggggcgagaacatagggctgtggattctccccccatataaaaaaacggcgcgggggacaacgcgaagcctttctggaccaaattccaagatgggattcgggggaccaaggggggtcctcccaagagggactccagggagccgaataaatagc

SEQ ID NO: 356416 - DNA, 892 bp, Homo sapiens
  misc_feature (637)..(637): n is a, c, g, or t
  misc_feature (684)..(684): n is a, c, g, or t
  misc_feature (689)..(689): n is a, c, g, or t
  misc_feature (692)..(692): n is a, c, g, or t
  misc_feature (703)..(703): n is a, c, g, or t
  misc_feature (705)..(705): n is a, c, g, or t
  misc_feature (707)..(707): n is a, c, g, or t
  misc_feature (712)..(712): n is a, c, g, or t
  misc_feature (715)..(715): n is a, c, g, or t
  misc_feature (717)..(717): n is a, c, g, or t
  misc_feature (719)..(719): n is a, c, g, or t
  misc_feature (723)..(723): n is a, c, g, or t
  misc_feature (739)..(739): n is a, c, g, or t
cataactcagccactggcaaggaaatctccaaatccatgacagtcaaagtctctgctccttcaggaataggacgtcttcctctccttaatccaatatagcagccgtgaagtcatttctgtatttcaggaagactggcagacagttgctttgattcttcctcaaactacttacaatcacctacagtccaaaattgctttttcttcaaggagatttatggaaaagactctgacaaggactcttgaatacaagttcctgataacttcaagatcataccactggactaagaactttcaaaattttaatgaacaggctgataccttcatgaaattctagacaaagaagaaaaaaactccatgttattggactaaataatcaaaagcataatgttttcataattttctatttgaaaatgtgctgattctttgaatgttttattctccagatttatgaactttttttcttgagcaattggtaaagtatacttttgtaaacaaaaattgaaacatttgcttttgctctctatctgagtgccccagaattgggaaactattcatgagtattcatatgtttatggtaataaagttatctgcacaagttcaaaaaaaaaaaacaaacaacaaaaaaaaatttttgggnggcttgggccttggaaaaggtttcttaaaaccatttgtttgggggcnggggngcncattgggttantntnacacnggncnanaggngtcccagagaaaaccncggggcgagaacatagggctgtggattctccccccatataaaaaaacggcgcgggggacaacgcgaagcctttctggaccaaattccaagatgggattcgggggaccaaggggggtcctcccaagagggactccagggagccgaataaatagc

SEQ ID NO: 356417 - DNA, 1290 bp, Homo sapiens
actgactacttgtgggagagaaggaaaaaaagctaagtgcaaagaatcaagcctgatatgttagtttttaccaactgagatgcacccaagatgggattagacatacaagataatttatcagggaggacacctgtgagggaatgtggggcagacatgaaggcagtatgggagaacccacagaccactatgcagagctgattcctgtgaaaaagaaagagaaagaagttttaggtaccaatgcagttctaagagtttttgcaaggctgagggggagtcctccaaccagtcaccctttagagttaaagagagcctcagagaactaggcttgctttcacgcccttcctgggagcctgtgggaaagaagctttctgtgcaaaggaggtgatgaatgtgaaatgcacggacgtgggccttctgtcaatcagctccctgccatggagacctgacagagtctcattcatggctgccacaacagagagactgagaaaaagatgcaaccatgaaaaggtgaaaaggtggtaagttctaatgacatagaaaatagcaatcagcctttcttatgtctgaaagccttccaaaatatctgagtgcagtagagatttgacagaggactgatcaccatcctagaaacatggtgagagggaaaaaaaaaactgcaagaatataatcatctcccatcaatttcccaagaggaataatgtagtacttgaagaaacaattatagagtacctcatgctacatgcctcttcctgaggctcccccatgtaaaataacatcaccttcattccttctttacttttctttccatgacagctccttcaggaataggacgtcttcctctccttaatccaatatagcagccgtgaagtcatttctgtatttcaggaagactggcaggagatttatggaaaagactctgacaaggactcttgaatacaagttcctgataacttcaagatcataccactggactaagaactttcaaaattttaatgaacaggctgataccttcatgaaattctagacaaagaagaaaaaaactccatgttattggactaaataatcaaaagcataatgttttcataattttctatttgaaaatgtgctgattctttgaatgttttattctccagatttatgaactttttttcttgagcaattggtaaagtatacttttgtaaacaaaaattgaaacatttgcttttgctctctatctgagtgccccagaattgggaaactattcatgagtattcatatgtttatggtaataaagttatctgcacaagttca

SEQ ID NO: 356418 - DNA, 1209 bp, Homo sapiens
  misc_feature (1)..(1): n is a, c, g, or t
  misc_feature (3)..(3): n is a, c, g, or t
  misc_feature (1149)..(1149): n is a, c, g, or t
  misc_feature (1179)..(1179): n is a, c, g, or t
ngngaaggaggaaggacagcacagcctacagccgtgctcaggaagtttctggatcctaggctcagctccacagaggagaacacgcaggcgcagagaccatggggcccctctcagcccctccctgcacacagcacatcacctggaagggggtcctgctcacagcatcacttttaaacttctggaacctgcctatcactgctcaagtcacgattgaagccctgccacccaaagtttccgaggggaaggatgttcttctacttgtccacaatttgcctcagaatcttgctggctacatctggtacaaaggacaactgatggacctctaccattacattacatcatatgtagtagacggtcaaataaatatatatgggcctgcatacactggacgagaaacagtatattccaatgcatccctgctgatccagaatgtcacccgggaagacgcaggatcctacaccttacacatcataaagcgaggtgataggactagaggagtaactggatatttcaccttcaacttatacctgaagctgcccaagccctacatcaccatcaacaactcaaaacccagggagaataaggatgtcttagccttcacctgtgaacctaagagtgagaactacacctacatttggtggctaaatggtcagagcctcccggtcagtcccagggtaaagcaacccattgaaaacaggatcctcattctacccagtgtcacgagaaatgaaacaggaccctatgaatgtgaaatacgggaccgagatggtggcatgcacagtgacccagtcaccctgaatgtcctctatggtccagacctccccagcatttacccttcattcacctattaccgttcaggagaaaacctctacttgtcctgcttcgcggaatctaacccaccggcagagtatttttggacaattaatgggaagtttcagcaatcaggacaaaagctctctatcccccaaattactacaaagcatagagggctctatacttgctctgttcgtaactcagccactggcaaggaaagctccaaatccatgacagtcgaagtctctgctccttcaggaataggacgtcttcctctccttaatccaatatagcagccgtgaagtcatttctgtatttcaggaagactggcagacngttgctttgattcttcctcaaatactaacnatcacatcacgggggatcctctggaacagc

SEQ ID NO: 356419 - DNA, 1734 bp, Homo sapiens
  misc_feature (1)..(1): n is a, c, g, or t
  misc_feature (3)..(3): n is a, c, g, or t
ngngaaggaggaaggacagcacagcctacagccgtgctcaggaagtttctggatcctaggctcagctccacagaggagaacacgcaggcgcagagaccatggggcccctctcagcccctccctgcacacagcacatcacctggaagggggtcctgctcacagcatcacttttaaacttctggaacctgcctatcactgctcaagtcacgattgaagccctgccacccaaagtttccgaggggaaggatgttcttctacttgtccacaatttgcctcagaatcttgctggctacatctggtacaaaggacaactgatggacctctaccattacattacatcatatgtagtagacggtcaaataaatatatatgggcctgcatacactggacgagaaacagtatattccaatgcatccctgctgatccagaatgtcacccgggaagacgcaggatcctacaccttacacatcataaagcgaggtgataggactagaggagtaactggatatttcaccttcaacttatacctgaagctgcccaagccctacatcaccatcaacaactcaaaacccagggagaataaggatgtcttagccttcacctgtgaacctaagagtgagaactacacctacatttggtggctaaatggtcagagcctcccggtcagtcccagggtaaagcaacccattgaaaacaggatcctcattctacccagtgtcacgagaaatgaaacaggaccctatgaatgtgaaatacgggaccgagatggtggcatgcacagtgacccagtcaccctgaatgtcctctatggtccagacctccccagcatttacccttcattcacctattaccgttcaggagaaaacctctacttgtcctgcttcgcggaatctaacccaccggcagagtatttttggacaattaatgggaagtttcagcaatcaggacaaaagctctctatcccccaaattactacaaagcatagagggctctatacttgctctgttcgtaactcagccactggcaaggaaagctccaaatccatgacagtcgaagtctctgctccttcaggaataggacgtcttcctctccttaatccaatatagcagccgtgaagtcatttctgtatttcaggaagactggcaggcaacatctgacctcatggagaacggagactttaggattaacatgtgaacctgagactcagaacacaacctatgtgtggttgagatcttttcctgatgaccagttcatgtgttcaaaaaacatacagaaatgaagaaggcaaggtccctaccccaggagacataaagcctaagacaggaaatgagacctgaaaataatcatgataccaaaatagaaaaaattgaatgccacaagaaatcagagaaatctgatgggaaatagagctacacattggaatcactggaaagcatttttaaaagtggatgctcaagccccacccattagttccagtttaaaggtctggagagggaccaaggcattggtaatttttaagtcttccttgacactactaacatgtaacaaggatggagaactcttgttgtaataggtagaacttaaaactaaatgaatgattttcagctagaagtactggaattacctaaggacctttttcaacatacataagactatacatttttggccctatttatgaatgggctacaccaagaactcagtaatcctcttgagaaacagaagctgaatggaaaa

SEQ ID NO: 356420 - DNA, 1068 bp, Homo sapiens
  misc_feature (1)..(1): n is a, c, g, or t
  misc_feature (3)..(3): n is a, c, g, or t
ngngaaggaggaaggacagcacagcctacagccgtgctcaggaagtttctggatcctaggctcagctccacagaggagaacacgcaggcgcagagaccatggggcccctctcagcccctccctgcacacagcacatcacctggaagggggtcctgctcacagcatcacttttaaacttctggaacctgcctatcactgctcaagtcacgattgaagccctgccacccaaagtttccgaggggaaggatgttcttctacttgtccacaatttgcctcagaatcttgctggctacatctggtacaaaggacaactgatggacctctaccattacattacatcatatgtagtagacggtcaaataaatatatatgggcctgcatacactggacgagaaacagtatattccaatgcatccctgctgatccagaatgtcacccgggaagacgcaggatcctacaccttacacatcataaagcgaggtgataggactagaggagtaactggatatttcaccttcaacttatacctgaagctgcccaagccctacatcaccatcaacaactcaaaacccagggagaataaggatgtcttagccttcacctgtgaacctaagagtgagaactacacctacatttggtggctaaatggtcagagcctcccggtcagtcccagggtaaagcaacccattgaaaacaggatcctcattctacccagtgtcacgagaaatgaaacaggaccctatgaatgtgaaatacgggaccgagatggtggcatgcacagtgacccagtcaccctgaatgtcctctatggtccagacctccccagcatttacccttcattcacctattaccgttcaggagaaaacctctacttgtcctgcttcgcggaatctaacccaccggcagagtatttttggacaattaatgggaagtttcagcaatcaggacaaaagctctctatcccccaaattactacaaagcatagagggctctatacttgctctgttcgtaactcagccactggcaaggctaggacactggcgaggctagacactggcgaggctagga

SEQ ID NO: 356421 - DNA, 746 bp, Homo sapiens
attctttgaatgttttattctccagatttatgaactttttttcttgagcaattggtaaagtatacttttgtaaacaaaaattgaaacatttgcttttgctctctatctgagtgccccagaattgggaaactattcatgagtattcatatgtttatggtaataaagttatctgcacaagttcagtaaggatctgctctctttataacaggacacatttgaaaacattggttatattaccaaggctttgactgcgatgttatatttgagaatatatatagaataaacccatagggaatgcaggcaaagtctgaagtgggccttggtttggcttcctagtttcaagaggtttttggaagtttaatctgagattcttattaaaaacttctagcaaagagaagtttaaaaagagcctctattgtccattgctactctttccgcacttagctaaaaaatctgggcaagttcggtgagactcaacctattttgcaaacaaattcatcctactggaattatctttggtaaaaatagagactcctatagacagaaaaactatgttgaaaagaaaaactgtagtacacctgttaccagattgaaccactgttcattatctctgagtatttataatccactggtagactggactggaccctgaattcttttagttcttccaattcaattttctccaatgaaatcattaagaacaagagcggctctgttcctgaagccatataagttggaggtggaca

SEQ ID NO: 356422 - DNA, 1607 bp, Homo sapiens
  misc_feature (1)..(1): n is a, c, g, or t
  misc_feature (3)..(3): n is a, c, g, or t
ngngaaggaggaaggacagcacagcctacagccgtgctcaggaagtttctggatcctaggctcagctccacagaggagaacacgcaggcgcagagaccatggggcccctctcagcccctccctgcacacagcacatcacctggaagggggtcctgctcacagcatcacttttaaacttctggaacctgcctatcactgctcaagtcacgattgaagccctgccacccaaagtttccgaggggaaggatgttcttctacttgtccacaatttgcctcagaatcttgctggctacatctggtacaaaggacaactgatggacctctaccattacattacatcatatgtagtagacggtcaaataaatatatatgggcctgcatacactggacgagaaacagtatattccaatgcatccctgctgatccagaatgtcacccgggaagacgcaggatcctacaccttacacatcataaagcgaggtgataggactagaggagtaactggatatttcaccttcaacttatacctgaagctgcccaagccctacatcaccatcaacaactcaaaacccagggagaataaggatgtcttagccttcacctgtgaacctaagagtgagaactacacctacatttggtggctaaatggtcagagcctcccggtcagtcccagggtaaagcaacccattgaaaacaggatcctcattctacccagtgtcacgagaaatgaaacaggaccctatgaatgtgaaatacgggaccgagatggtggcatgcacagtgacccagtcaccctgaatgtcctctatggtccagacctccccagcatttacccttcattcacctattaccgttcaggagaaaacctctacttgtcctgcttcgcggaatctaacccaccggcagagtatttttggacaattaatgggaagtttcagcaatcaggacaaaagctctctatcccccaaattactacaaagcatagagggctctatacttgctctgttcgtaactcagccactggcaaggaaagctccaaatccatgacagtcgaagtctctgctccttcaggaataggacgtcttcctctccttaatccaatatagcagccgtgaagtcatttctgtatttcaggaagactggcagacagttgctttgattcttcctcaaactacttacaatcacctacagtccaaaattgctttttcttcaaggagatttatggaaaagactctgacaaggactcttgaatacaagttcctgataacttcaagatcataccactggactaagaactttcaaaattttaatgaacaggctgataccttcatgaaattctagacaaagaagaaaaaaactccatgttattggactaaataatcaaaagcataatgttttcataattttctatttgaaaatgtgctgattctttgaatgttttattctccagatttatgaactttttttcttgagcaattggtaaagtatacttttgtaaacaaaaattgaaacatttgcttttgctctctatctgagtgccccagaattgggaaactattcatgagtattcatatgtttatggtaataaagttatctgcacaagttca

SEQ ID NO: 356423 - DNA, 718 bp, Homo sapiens
  misc_feature (1)..(1): n is a, c, g, or t
  misc_feature (3)..(3): n is a, c, g, or t
ngngaaggaggaaggacagcacagcctacagccgtgctcaggaagtttctggatcctaggctcagctccacagaggagaacacgcaggcgcagagaccatggggcccctctcagcccctccctgcacacagcacatcacctggaagggggtcctgctcacagcatcacttttaaacttctggaacctgcctatcactgctcaagtcacgattgaagccctgccacccaaagtttccgaggggaaggatgttcttctacttgtccacaatttgcctcagaatcttgctggctacatctggtacaaaggacaactgatggacctctaccattacattacatcatatgtagtagacggtcaaataaatatatatgggcctgcatacactggacgagaaacagtatattccaatgcatccctgctgatccagaatgtcacccgggaagacgcaggatcctacaccttacacatcataaagcgaggtgataggactagaggagtaactggatatttcaccttcaacttataccaccctgctccagcacaggcccagcgagagacacacactcaggagctctcacataacaaatgaaggaatggaatgaagaaatgaatgatccaaaacctctttagagactggatgttggatgcagaatcctaggaggttctagccacacctgtcccttgtccttcagaggctgacatccatgtttcatcccc

SEQ ID NO: 356424 - DNA, 1539 bp, Homo sapiens
  misc_feature (1)..(1): n is a, c, g, or t
  misc_feature (3)..(3): n is a, c, g, or t
ngngaaggaggaaggacagcacagcctacagccgtgctcaggaagtttctggatcctaggctcagctccacagaggagaacacgcaggcgcagagaccatggggcccctctcagcccctccctgcacacagcacatcacctggaagggggtcctgctcacagcatcacttttaaacttctggaacctgcctatcactgctcaagtcacgattgaagccctgccacccaaagtttccgaggggaaggatgttcttctacttgtccacaatttgcctcagaatcttgctggctacatctggtacaaaggacaactgatggacctctaccattacattacatcatatgtagtagacggtcaaataaatatatatgggcctgcatacactggacgagaaacagtatattccaatgcatccctgctgatccagaatgtcacccgggaagacgcaggatcctacaccttacacatcataaagcgaggtgataggactagaggagtaactggatatttcaccttcaacttatacctgaagctgcccaagccctacatcaccatcaacaactcaaaacccagggagaataaggatgtcttagccttcacctgtgaacctaagagtgagaactacacctacatttggtggctaaatggtcagagcctcccggtcagtcccagggtaaagcaacccattgaaaacaggatcctcattctacccagtgtcacgagaaatgaaacaggaccctatgaatgtgaaatacgggaccgagatggtggcatgcacagtgacccagtcaccctgaatgtcctctatggtccagacctccccagcatttacccttcattcacctattaccgttcaggagaaaacctctacttgtcctgcttcgcggaatctaacccaccggcagagtatttttggacaattaatgggaagtttcagcaatcaggacaaaagctctctatcccccaaattactacaaagcatagagggctctatacttgctctgttcgtaactcagccactggcaaggaaagctccaaatccatgacagtcgaagtctctgctccttcaggaataggacgtcttcctctccttaatccaatatagcagccgtgaagtcatttctgtatttcaggaagactggcaggagatttatggaaaagactctgacaaggactcttgaatacaagttcctgataacttcaagatcataccactggactaagaactttcaaaattttaatgaacaggctgataccttcatgaaattctagacaaagaagaaaaaaactccatgttattggactaaataatcaaaagcataatgttttcataattttctatttgaaaatgtgctgattctttgaatgttttattctccagatttatgaactttttttcttgagcaattggtaaagtatacttttgtaaacaaaaattgaaacatttgcttttgctctctatctgagtgccccagaattgggaaactattcatgagtattcatatgtttatggtaataaagttatctgcacaagttca

SEQ ID NO: 356425 - DNA, 1407 bp, Homo sapiens
  misc_feature (109)..(109): n is a, c, g, or t
  misc_feature (1152)..(1152): n is a, c, g, or t
  misc_feature (1199)..(1199): n is a, c, g, or t
  misc_feature (1204)..(1204): n is a, c, g, or t
  misc_feature (1207)..(1207): n is a, c, g, or t
  misc_feature (1218)..(1218): n is a, c, g, or t
  misc_feature (1220)..(1220): n is a, c, g, or t
  misc_feature (1222)..(1222): n is a, c, g, or t
  misc_feature (1227)..(1227): n is a, c, g, or t
  misc_feature (1230)..(1230): n is a, c, g, or t
  misc_feature (1232)..(1232): n is a, c, g, or t
  misc_feature (1234)..(1234): n is a, c, g, or t
  misc_feature (1238)..(1238): n is a, c, g, or t
  misc_feature (1254)..(1254): n is a, c, g, or t
gtcctagcttcgccaatggtcctgcctgtcctagcctcgccagtgtcctagcctcgccagtgtcactagcctcgccagtgtcctagcctcgccagtgtcctagcctcgncagtgaacctaagagtgagaactacacctacatttggtggctaaatggtcagagcctccctgtcagtcccagggtaaagcgacccattgaaaacaggatcctcattctacccaatgtcacgagaaatgaaacaggaccttatcaatgtgaaatacgggaccgatatggtggcatccgcagtgacccagtcaccctgaatgtcctctatggtccagacctccccagcatttacccttcattcacctattaccgttcaggagaaaacctctacttgtcctgcttcgcggaatctaacccaccggcagagtatttttggacaattaatgggaagtttcagcaatcaggacaaaagctctctatcccccaaattactacaaagcatagagggctctatacttgctctgttcgtaactcagccactggcaaggaaagctccaaatccatgacagtcgaagtctctgctccttcaggaataggacgtcttcctctccttaatccaatatagcagccgtgaagtcatttctgtatttcaggaagactggcagacagttgctttgattcttcctcaaactacttacaatcacctacagtccaaaattgctttttcttcaaggagatttatggaaaagactctgacaaggactcttgaatacaagttcctgataacttcaagatcataccactggactaagaactttcaaaattttaatgaacaggctgataccttcatgaaattctagacaaagaagaaaaaaactccatgttattggactaaataatcaaaagcataatgttttcataattttctatttgaaaatgtgctgattctttgaatgttttattctccagatttatgaactttttttcttgagcaattggtaaagtatacttttgtaaacaaaaattgaaacatttgcttttgctctctatctgagtgccccagaattgggaaactattcatgagtattcatatgtttatggtaataaagttatctgcacaagttcaaaaaaaaaaaacaaacaacaaaaaaaaatttttgggnggcttgggccttggaaaaggtttcttaaaaccatttgtttgggggcnggggngcncattgggttantntnacacnggncnanaggngtcccagagaaaaccncggggcgagaacatagggctgtggattctccccccatataaaaaaacggcgcgggggacaacgcgaagcctttctggaccaaattccaagatgggattcgggggaccaaggggggtcctcccaagagggactccagggagccgaataaatagc

SEQ ID NO: 356426 - DNA, 1365 bp, Homo sapiens
  misc_feature (1)..(1): n is a, c, g, or t
  misc_feature (3)..(3): n is a, c, g, or t
  misc_feature (1110)..(1110): n is a, c, g, or t
  misc_feature (1157)..(1157): n is a, c, g, or t
  misc_feature (1162)..(1162): n is a, c, g, or t
  misc_feature (1165)..(1165): n is a, c, g, or t
  misc_feature (1176)..(1176): n is a, c, g, or t
  misc_feature (1178)..(1178): n is a, c, g, or t
  misc_feature (1180)..(1180): n is a, c, g, or t
  misc_feature (1185)..(1185): n is a, c, g, or t
  misc_feature (1188)..(1188): n is a, c, g, or t
  misc_feature (1190)..(1190): n is a, c, g, or t
  misc_feature (1192)..(1192): n is a, c, g, or t
  misc_feature (1196)..(1196): n is a, c, g, or t
  misc_feature (1212)..(1212): n is a, c, g, or t
ngngaaggaggaaggacagcacagcctacagccgtgctcaggaagtttctggatcctaggctcagctccacagaggagaacacgcaggcgcagagaccatggggcccctctcagcccctccctgcacacagcacatcacctggaagggggtcctgctcacagcatcacttttaaacttctggaacctgcctatcactgctcaagtcacgattgaagccctgccacccaaagtttccgaggggaaggatgttcttctacttgtccacaatttgcctcagaatcttgctggctacatctggtacaaaggacaactgatggacctctaccattacattacatcatatgtagtagacggtcaaataaatatatatgggcctgcatacactggacgagaaacagtatattccaatgcatccctgctgatccagaatgtcacccgggaagacgcaggatcctacaccttacacatcataaagcgaggtgataggactagaggagtaactggatatttcaccttcaacttataccctccttcaggaataggacgtcttcctctccttaatccaatatagcagccgtgaagtcatttctgtatttcaggaagactggcagacagttgctttgattcttcctcaaactacttacaatcacctacagtccaaaattgctttttcttcaaggagatttatggaaaagactctgacaaggactcttgaatacaagttcctgataacttcaagatcataccactggactaagaactttcaaaattttaatgaacaggctgataccttcatgaaattctagacaaagaagaaaaaaactccatgttattggactaaataatcaaaagcataatgttttcataattttctatttgaaaatgtgctgattctttgaatgttttattctccagatttatgaactttttttcttgagcaattggtaaagtatacttttgtaaacaaaaattgaaacatttgcttttgctctctatctgagtgccccagaattgggaaactattcatgagtattcatatgtttatggtaataaagttatctgcacaagttcaaaaaaaaaaaacaaacaacaaaaaaaaatttttgggnggcttgggccttggaaaaggtttcttaaaaccatttgtttgggggcnggggngcncattgggttantntnacacnggncnanaggngtcccagagaaaaccncggggcgagaacatagggctgtggattctccccccatataaaaaaacggcgcgggggacaacgcgaagcctttctggaccaaattccaagatgggattcgggggaccaaggggggtcctcccaagagggactccagggagccgaataaatagc

SEQ ID NO: 356427 - DNA, 1523 bp, Homo sapiens
  misc_feature (1)..(1): n is a, c, g, or t
  misc_feature (3)..(3): n is a, c, g, or t
ngngaaggaggaaggacagcacagcctacagccgtgctcaggaagtttctggatcctaggctcagctccacagaggagaacacgcaggcgcagagaccatggggcccctctcagcccctccctgcacacagcacatcacctggaagggggtcctgctcacagcatcacttttaaacttctggaacctgcctatcactgctcaagtcacgattgaagccctgccacccaaagtttccgaggggaaggatgttcttctacttgtccacaatttgcctcagaatcttgctggctacatctggtacaaaggacaactgatggacctctaccattacattacatcatatgtagtagacggtcaaataaatatatatgggcctgcatacactggacgagaaacagtatattccaatgcatccctgctgatccagaatgtcacccgggaagacgcaggatcctacaccttacacatcataaagcgaggtgataggactagaggagtaactggatatttcaccttcaacttatacctgaagctgcccaagccctacatcaccatcaacaactcaaaacccagggagaataaggatgtcttagccttcacctgtgaacctaagagtgagaactacacctacatttggtggctaaatggtcagagcctcccggtcagtcccagggtaaagcaacccattgaaaacaggatcctcattctacccagtgtcacgagaaatgaaacaggaccctatgaatgtgaaatacgggaccgagatggtggcatgcacagtgacccagtcaccctgaatgtcctctatggtccagacctccccagcatttacccttcattcacctattaccgttcaggagaaaacctctacttgtcctgcttcgcggaatctaacccaccggcagagtatttttggacaattaatgggaagtttcagcaatcaggacaaaagctctctatcccccaaattactacaaagcatagagggctctatacttgctctgttcgtaactcagccactggcaaggaaagctccaaatccatgacagtcgaagtctctgacagttgctttgattcttcctcaaactacttacaatcacctacagtccaaaattgctttttcttcaaggagatttatggaaaagactctgacaaggactcttgaatacaagttcctgataacttcaagatcataccactggactaagaactttcaaaattttaatgaacaggctgataccttcatgaaattctagacaaagaagaaaaaaactccatgttattggactaaataatcaaaagcataatgttttcataattttctatttgaaaatgtgctgattctttgaatgttttattctccagatttatgaactttttttcttgagcaattggtaaagtatacttttgtaaacaaaaattgaaacatttgcttttgctctctatctgagtgccccagaattgggaaactattcatgagtattcatatgtttatggtaataaagttatctgcacaagttca

SEQ ID NO: 356428 - DNA, 1830 bp, Homo sapiens
  misc_feature (1)..(1): n is a, c, g, or t
  misc_feature (3)..(3): n is a, c, g, or t
  misc_feature (1519)..(1520): n is a, c, g, or t
  misc_feature (1524)..(1524): n is a, c, g, or t
  misc_feature (1526)..(1526): n is a, c, g, or t
  misc_feature (1531)..(1531): n is a, c, g, or t
  misc_feature (1538)..(1538): n is a, c, g, or t
  misc_feature (1549)..(1549): n is a, c, g, or t
  misc_feature (1551)..(1551): n is a, c, g, or t
  misc_feature (1567)..(1569): n is a, c, g, or t
  misc_feature (1573)..(1573): n is a, c, g, or t
  misc_feature (1578)..(1578): n is a, c, g, or t
  misc_feature (1583)..(1583): n is a, c, g, or t
  misc_feature (1587)..(1588): n is a, c, g, or t
  misc_feature (1592)..(1595): n is a, c, g, or t
  misc_feature (1598)..(1599): n is a, c, g, or t
  misc_feature (1603)..(1603): n is a, c, g, or t
  misc_feature (1608)..(1608): n is a, c, g, or t
  misc_feature (1610)..(1610): n is a, c, g, or t
  misc_feature (1614)..(1614): n is a, c, g, or t
  misc_feature (1616)..(1616): n is a, c, g, or t
  misc_feature (1626)..(1626): n is a, c, g, or t
  misc_feature (1630)..(1631): n is a, c, g, or t
  misc_feature (1647)..(1648): n is a, c, g, or t
ngngaaggaggaaggacagcacagcctacagccgtgctcaggaagtttctggatcctaggctcagctccacagaggagaacacgcaggcgcagagaccatggggcccctctcagcccctccctgcacacagcacatcacctggaagggggtcctgctcacagcatcacttttaaacttctggaacctgcctatcactgctcaagtcacgattgaagccctgccacccaaagtttccgaggggaaggatgttcttctacttgtccacaatttgcctcagaatcttgctggctacatctggtacaaaggacaactgatggacctctaccattacattacatcatatgtagtagacggtcaaataaatatatatgggcctgcatacactggacgagaaacagtatattccaatgcatccctgctgatccagaatgtcacccgggaagacgcaggatcctacaccttacacatcataaagcgaggtgataggactagaggagtaactggatatttcaccttcaacttatacctgaagctgcccaagccctacatcaccatcaacaactcaaaacccagggagaataaggatgtcttagccttcacctgtgaacctaagagtgagaactacacctacatttggtggctaaatggtcagagcctcccggtcagtcccagggtaaagcaacccattgaaaacaggatcctcattctacccagtgtcacgagaaatgaaacaggaccctatgaatgtgaaatacgggaccgagatggtggcatgcacagtgacccagtcaccctgaatgtcctctatggtccagacctccccagcatttacccttcattcacctattaccgttcaggagaaaacctctacttgtcctgcttcgcggaatctaacccaccggcagagtatttttggacaattaatgggaagtttcagcaatcaggacaaaagctctctatcccccaaattactacaaagcatagagggctctatacttgctctgttcgtaactcagccactggcaaggaaagctccaaatccatgacagtcgaagtctctggtaagtggatcccagcatccttggcaatagggttttaggtggagtctacctggctttcagagaagagttaggaaaacatttttattcccagcctgtgtcccatgggcacaagcaaatcccaaattctcctcctgaacccttccaatttgtctctacagactctcttctccttgtttttctgttttctcatggctgaccttgtgtctggcctaagaaagttagggagggggctttatcagccctgagccctatgtggtagaggaggcttcacagagggatgagaaggagagtcctcaagatcaagttgcttctcgatgtcaccaacacatccccttctgccatgtctttgtttccttgtacctattccatgagctacaaggaacatctgaggctctgaaacaagctcacacttttcccccaaatgagacgaggaagccccttgggtgagggaggaccnncccncnccccnccccccnccctcgccccncncccccccgcgcgaccnnncccnccccncccancccnncccnnnnccnncacnccccnanaaananccctcgcgcncccnnccccgaattccgcccnnatcgagctgccagttgaagccaagcctcccccgggccaggctgcagggaaataagaagagagggagcctcagggaagactcctgcgttgcgtcctggctctgaagtcaccggttgtatgaggttgtgggcacagcatgtgggacacagcacggaggatagtgactgatgcagagctggagaa

SEQ ID NO: 356429 - DNA, 619 bp, Homo sapiens
  misc_feature (1)..(1): n is a, c, g, or t
  misc_feature (3)..(3): n is a, c, g, or t
ngngaaggaggaaggacagcacagcctacagccgtgctcaggaagtttctggatcctaggctcagctccacagaggagaacacgcaggcgcagagaccatggggcccctctcagcccctccctgcacacagcacatcacctggaagggggtcctgctcacagcatcacttttaaacttctggaacctgcctatcactgctcaagtcacgattgaagccctgccacccaaagtttccgaggggaaggatgttcttctacttgtccacaatttgcctcagaatcttgctggctacatctggtacaaaggacaactgatggacctctaccattacattacatcatatgtagtagacggtcaaataaatatatatgggcctgcatacactggacgagaaacagtatattccaatgcatccctgctgatccagaatgtcacccgggaagacgcaggatcctacaccttacacatcataaagcgaggtgataggactagaggagtaactggagaaaatccacacagacatggggaaaaggtgcaaatttcacaaagacattagcctcaaccatgaattaattttttttcccatcaacattataacaaagtaacattatctgagca

SEQ ID NO: 356430 - DNA, 1123 bp, Homo sapiens
tgccccggcaaccgcgccgcccgcggcacgttccggccgctcaccccgcccaagggccgtgcgtacgtgcgtcgtctctatggtggcggcggatttggagggaccctacgaaccaggagtcaggcgagccgatctggggctgcaggtgttacctctgatctaggccgggggcttcagggatccgagccgagggagaaagccttgggggcttcatcacacttatttggctcgcgggcttggggccatcgggtggtcctgtgtcatccccattcctcctctgcgattcccccgtcgccccaaaacagccctgggactcccctgtcttgctcctcgagaccctcccccatcaccgtcctctgggcaccccatcctatgacccagtctcaggcatcttccgaaatgctcgatgatagccgccctcgggcatctccgctgcgtctgtttgtagcgcgcctggtgattcggctgcacccccacacaggatgttccgctgggagcgctccattcccctgcgaggctcggccgccgccctgtgcaacaacctcagtgtgctgcagctgccggctcgcaacctcacgtattttggcgtggttcatggaccaagcgcccagcttctcagcgctgctcctgagggtgtgcccttggcccagcgccagctccacgctaaggagggtgctggagtgagtcccccacttatcactcaggtgaggcatggagctgggagtgatgttgctgaacccagtcctacccccagccttttctctccaaaccttcaggagcaggcatgtcctaacctcagaatctccccaggcatgtcctaacctcagaatctcccctctcctgccgggcgcggtggctcacgcctgtaatcccaacactttgggaggctgagacgggcacttgaggccaggagttcgagaccagcctggccaacatggtgaaacctcttctctactaagaatacaaaaaaaattaaccgggtgtggtggcgtgcacctgtaatcccagctacttgggtggctgaggcaggagaatcgcttgaacccaggaggctgaggttgcagtgagccgagatggcgccactgcactccagcctgggccacagagcaagactccgtcccca

SEQ ID NO: 356431 - DNA, 1541 bp, Homo sapiens
tgccccggcaaccgcgccgcccgcggcacgttccggccgctcaccccgcccaagggccgtgcgtacgtgcgtcgtctctatggtggcggcggatttggagggaccctacgaaccaggagtcaggcgagccgatctggggctgcaggtgttacctctgatctaggccgggggcttcagggatccgagccgagggagaaagccttgggggcttcatcacacttatttggctcgcgggcttggggccatcgggtggtcctgtgtcatccccattcctcctctgcgattcccccgtcgccccaaaacagccctgggactcccctgtcttgctcctcgagaccctcccccatcaccgtcctctgggcaccccatcctatgacccagtctcaggcatcttccgaaatgctcgatgatagccgccctcgggcatctccgctgcgtctgtttgtagcgcgcctggtgattcggctgcacccccacacaggatgttccgctgggagcgctccattcccctgcgaggctcggccgccgccctgtgcaacaacctcagtgtgctgcagctgccggctcgcaacctcacgtattttggcgtggttcatggaccaagcgcccagcttctcagcgctgctcctgagggtgtgcccttggcccagcgccagctccacgctaaggagggtgctggagtgagtcccccacttatcactcaggtccactggtgtgtcctccccttccgagtgctgctggtactcacctcacatcgaggaatacagatgtacgagtccaatggctacaccatggtctactggcatgcactggactctggagatgcctccccagtacaggctgtgtttgcccggggaattgctgccagtggccacttcatctgtgtgggaacgtggtcaggccgggtgctggtgtttgacatcccagcaaagggtcccaacattgtactgagcgaggagctggctgggcaccagatgccaatcacagacattgccaccgagcctgcccagggacaggattgtgtggctgacatggtgacggcagatgactcaggcttgctgtgtgtctggcggtcagggccagaattcacattattgacccgcattccaggatttggagttccgtgcccctctgtgcagctgtggcaggggatcatagcagcaggctatgggaacggacaagtgcatctatatgaggccactacaggaaatctacatgtccagatcaatgcccatgcccgggccatctgcgccctggacctggcttctgaggtgggcaagctactctctgcaggtgaggacacctttgtgcatatctggaagctgagcagaaacccagagagtggctacattgaggtggaacactgtcatggtgagtgtgtcgccgacacccagctgtgtggtgctcgattttgtgattcctcaggcaactcctttgctgtgactggctatgaccttgcggagatccggagattcagcagtgtgtgagaagagcagccttcctttgtccctgtggtattcataaagtacccgctccaccca

SEQ ID NO: 356432 - DNA, 982 bp, Homo sapiens
tgccccggcaaccgcgccgcccgcggcacgttccggccgctcaccccgcccaagggccgtgcgtacgtgcgtcgtctctatggtggcggcggatttggagggaccctacgaaccaggagtcaggcgagccgatctggggctgcaggtccactggtgtgtcctccccttccgagtgctgctggtactcacctcacatcgaggaatacagatgtacgagtccaatggctacaccatggtctactggcatgcactggactctggagatgcctccccagtacaggctgtgtttgcccggggaattgctgccagtggccacttcatctgtgtgggaacgtggtcaggccgggtgctggtgtttgacatcccagcaaagggtcccaacattgtactgagcgaggagctggctgggcaccagatgccaatcacagacattgccaccgagcctgcccagggacaggattgtgtggctgacatggtgacggcagatgactcaggcttgctgtgtgtctggcggtcagggccagaattcacattattgacccgcattccaggatttggagttccgtgcccctctgtgcagctgtggcaggggatcatagcagcaggctatgggaacggacaagtgcatctatatgaggccactacaggaaatctacatgtccagatcaatgcccatgcccgggccatctgcgccctggacctggcttctgaggtgggcaagctactctctgcaggtgaggacacctttgtgcatatctggaagctgagcagaaacccagagagtggctacattgaggtggaacactgtcatggtgagtgtgtcgccgacacccagctgtgtggtgctcgattttgtgattcctcaggcaactcctttgctgtgactggctatgaccttgcggagatccggagattcagcagtgtgtgagaagagcagccttcctttgtccctgtggtattcataaagtacccgctccaccca

SEQ ID NO: 356433 - DNA, 1021 bp, Homo sapiens
tgccccggcaaccgcgccgcccgcggcacgttccggccgctcaccccgcccaagggccgtgcgtacgtgcgtcgtctctatggtggcggcggatttggagggaccctacgaaccaggagtcaggcgagccgatctggggctgcaggatgttccgctgggagcgctccattcccctgcgaggctcggccgccgccctgtgcaacaacctcagtgtgctgcagctgccggctcgcaacctcacgtattttggcgtggttcatggaccaagcgcccagcttctcagcgctgctcctgagggtgtgcccttggcccagcgccagctccacgctaaggagggtgctggagtgagtcccccacttatcactcaggaacgtggtcaggccgggtgctggtgtttgacatcccagcaaagggtcccaacattgtactgagcgaggagctggctgggcaccagatgccaatcacagacattgccaccgagcctgcccagggacaggattgtgtggctgacatggtgacggcagatgactcaggcttgctgtgtgtctggcggtcagggccagaattcacattattgacccgcattccaggatttggagttccgtgcccctctgtgcagctgtggcaggggatcatagcagcaggctatgggaacggacaagtgcatctatatgaggccactacaggaaatctacatgtccagatcaatgcccatgcccgggccatctgcgccctggacctggcttctgaggtgggcaagctactctctgcaggtgaggacacctttgtgcatatctggaagctgagcagaaacccagagagtggctacattgaggtggaacactgtcatggtgagtgtgtcgccgacacccagctgtgtggtgctcgattttgtgattcctcaggcaactcctttgctgtgactggctatgaccttgcggagatccggagattcagcagtgtgtgagaagagcagccttcctttgtccctgtggtattcataaagtacccgctccaccca

SEQ ID NO: 356434 - DNA, 978 bp, Homo sapiens
cctcttgagaacagggtgtatattttcttattcatattctccattgtacctggcatagggctaggcccataggttgtgttggctgcctggtgttgggggtgcaggggcccagggtctagtcatgactgtgactggttcactacgagacctccagaaggtcacgacactgtggcctcagttttatcatccatccagtgaggcaattatgcaccccctcctaatgttattgggggatgggactccatgaagaaattcaaggaaagcagttcatgcttcccaagggaaccctggtggtaggggtggtttctgatgggtctagctagtgagagctccacaccttgccctttccctggagaggcaaagatgcacacactgcctcccttcccctcctgccctgtatacaggaccatagcaggggagaaagggaagggttgatcttgcctttcccttcaggattgtgtggctgacatggtgacggcagatgactcaggcttgctgtgtgtctggcggtcagggccagaattcacattattgacccgcattccaggatttggagttccgtgcccctctgtgcagctgtggcaggggatcatagcagcaggctatgggaacggacaagtgcatctatatgaggccactacaggaaatctacatgtccagatcaatgcccatgcccgggccatctgcgccctggacctggcttctgaggtgggcaagctactctctgcaggtgaggacacctttgtgcatatctggaagctgagcagaaacccagagagtggctacattgaggtggaacactgtcatggtgagtgtgtcgccgacacccagctgtgtggtgctcgattttgtgattcctcaggcaactcctttgctgtgactggctatgaccttgcggagatccggagattcagcagtgtgtgagaagagcagccttcctttgtccctgtggtattcataaagtacccgctccaccca

SEQ ID NO: 356435 - DNA, 448 bp, Homo sapiens
caggaccatagcaggggagaaagggaagggttgatcttgcctttcccttcaggattgtgtggctgacatggtgacggcagatgactcaggcttgctgtgtgtctggcggtcagggccagaattcacattattgacccgcattccaggatttgggtaggtgaggcagaaagggtagagggcttcctgagatagcttcaggctggggagtaggatttgatctgggcaaaacaaagttgggtgtcacccttgcagagttccgtgcccctctgtgcagctgtggcaggggatcatagcagcaggctatgggaacggacaagtgcatctatatgaggccactacaggaaatctacatgtccagatcaatgcccatgcccgggccatctgcgccctggacctggcttctgaggtgggcaaggtaagtctcctcctctgtacctacatacccttt

SEQ ID NO: 356436 - DNA, 504 bp, Homo sapiens
tgatctgggcaaaacaaagttgggtgtcacccttgcagagttccgtgcccctctgtgcagctgtggcaggggatcatagcagcaggctatgggaacggacaagtgcatctatatgaggccactacaggaaatctacatgtccagatcaatgcccatgcccgggccatctgcgccctggacctggcttctgaggtgggcaaggtaagtctcctcctctgtacctacataccctttttcctggcagtggaatgttgagagaacaccacaggcttgtctttgcaactcagtgtagccccctcccctggggcacctggactggggattccagcttatagctgtcccgtcagggcattctgactccccctcttcctcctccacagctactctctgcaggtgaggacacctttgtgcatatctggaagctgagcagaaacccagagagtggctacattgaggtatgtgtcatggggtgggtggaatgggggggcccaagcatggggcagc

SEQ ID NO: 356437 - DNA, 1205 bp, Homo sapiens
tgccccggcaaccgcgccgcccgcggcacgttccggccgctcaccccgcccaagggccgtgcgtacgtgcgtcgtctctatggtggcggcggatttggagggaccctacgaaccaggagtcaggcgagccgatctggggctgcaggatgttccgctgggagcgctccattcccctgcgaggctcggccgccgccctgtgcaacaacctcagtgtgctgcagctgccggctcgcaacctcacgtattttggcgtggttcatggaccaagcgcccagcttctcagcgctgctcctgagggtgtgcccttggcccagcgccagctccacgctaaggagggtgctggagtgagtcccccacttatcactcaggtccactggtgtgtcctccccttccgagtgctgctggtactcacctcacatcgaggaatacagatgtacgagtccaatggctacaccatggtctactggcatgcactggactctggagatgcctccccagtacaggctgtgtttgcccggggaattgctgccagtggccacttcatctgtgtgggaacgtggtcaggccgggtgctggtgtttgacatcccagcaaagggtcccaacattgtactgagcgaggagctggctgggcaccagatgccaatcacagacattgccaccgagcctgcccagggacaggattgtgtggctgacatggtgacggcagatgactcaggcttgctgtgtgtctggcggtcagggccagaattcacattattgacccgcattccaggatttggagttccgtgcccctctgtgcagctgtggcaggggatcatagcagcaggctatgggaacggacaagtgcatctatatgaggccactacaggaaatctacatgtccagatcaatgcccatgcccgggccatctgcgccctggacctggcttctgaggtgggcaagctactctctgcaggtgaggacacctttgtgcatatctggaagctgagcagaaacccagagagtggctacattgaggtggaacactgtcatggtgagtgtgtcgccgacacccagctgtgtggtgctcgattttgtgattcctcaggcaactcctttgctgtgactggctatgaccttgcggagatccggagattcagcagtgtgtgagaagagcagccttcctttgtccctgtggtattcataaagtacccgctccaccca

SEQ ID NO: 356438 - DNA, 1911 bp, Homo sapiens
tgccccggcaaccgcgccgcccgcggcacgttccggccgctcaccccgcccaagggccgtgcgtacgtgcgtcgtctctatggtggcggcggatttggagggaccctacgaaccaggagtcaggcgagccgatctggggctgcaggatgttccgctgggagcgctccattcccctgcgaggctcggccgccgccctgtgcaacaacctcagtgtgctgcagctgccggctcgcaacctcacgtattttggcgtggttcatggaccaagcgcccagcttctcagcgctgctcctgagggtgtgcccttggcccagcgccagctccacgctaaggagggtgctggagtgagtcccccacttatcactcaggtccactggtgtgtcctccccttccgagtgctgctggtactcacctcacatcgaggaatacagatgtacgagtccaatggctacaccatggtctactggcatgcactggactctggagatgcctccccagtacaggctgtgtttgcccggggaattgctgccagtggccacttcatctgtgtgggaacgtggtcaggccgggtgctggtgtttgacatcccagcaaagggtcccaacattgtactgagcgaggagctggctgggcaccagatgccaatcacagacattgccaccgagcctgcccagggacaggattgtgtggctgacatggtgacggcagatgactcaggcttgctgtgtgtctggcggtcagggccagaattcacattattgacccgcattccaggatttggagttccgtgcccctctgtgcagctgtggcaggggatcatagcagcaggctatgggaacggacaagtgcatctatatgaggccactacaggaaatctacatgtccagatcaatgcccatgcccgggccatctgcgccctggacctggcttctgaggtgggcaagctactctctgcaggtgaggacacctttgtgcatatctggaagctgagcagaaacccagagagtggctacattgaggtggaacactgtcatggtgagtgtgtcgccgacacccagctgtgtggtgctcgattttgtgattcctcaggcaactcctttgctgtgactggctatgaccttgcggagatccggagattcagcagtgtgtgagaagagcagccttcctttgtccctgtggtattcataaagtacccgctccacccaaaaaaaaaaaaaaaaaaaaaaaaaaaaaaaaaaaaaaaaaaaaaaaaaaaaaaaaaaaaaaaaaaaaaggggggggggggcaaaatctccgcggggggcggaccaccgttgagtcagacccggatggtgtgttatgtcaacacaagggggggggcccaatgggggcgggggtcgcatctaaattacacgacgagagcggccggcggcgatgaaaacacaacacggtggcgagagcgcgggaaacaaccgccggagccagagggcatcctggcgaacgaggcagagaccacaactaggcgggcgggggaccgaggcacacggggggccacaccaccaaccaaggaagatccaaaggcgcgacggggacaaaacactatcgggcggtgcatagagggggaccaccaccaagcggaacaatctccgggggggcggaagaaccttggcccagcgagcgattagtggccggcacaattatacccgagcgcgggtgaccgagaaaaccgcagcaacccatgaaacacagccgggcataaaacagactgacacagtggcgagcaatgcagcagacagaagacaacaaggaggagaagacacaacggacagacgcaatgcaagacgccaacaacagagacagcggacacacacagtcgacaacagcggacgcgcaggaccatgaacagaaacaaccagcaagagagaacacgag

SEQ ID NO: 356439 - DNA, 1183 bp, Homo sapiens
tgccccggcaaccgcgccgcccgcggcacgttccggccgctcaccccgcccaagggccgtgcgtacgtgcgtcgtctctatggtggcggcggatttggagggaccctacgaaccaggagtcaggatgttccgctgggagcgctccattcccctgcgaggctcggccgccgccctgtgcaacaacctcagtgtgctgcagctgccggctcgcaacctcacgtattttggcgtggttcatggaccaagcgcccagcttctcagcgctgctcctgagggtgtgcccttggcccagcgccagctccacgctaaggagggtgctggagtgagtcccccacttatcactcaggtccactggtgtgtcctccccttccgagtgctgctggtactcacctcacatcgaggaatacagatgtacgagtccaatggctacaccatggtctactggcatgcactggactctggagatgcctccccagtacaggctgtgtttgcccggggaattgctgccagtggccacttcatctgtgtgggaacgtggtcaggccgggtgctggtgtttgacatcccagcaaagggtcccaacattgtactgagcgaggagctggctgggcaccagatgccaatcacagacattgccaccgagcctgcccagggacaggattgtgtggctgacatggtgacggcagatgactcaggcttgctgtgtgtctggcggtcagggccagaattcacattattgacccgcattccaggatttggagttccgtgcccctctgtgcagctgtggcaggggatcatagcagcaggctatgggaacggacaagtgcatctatatgaggccactacaggaaatctacatgtccagatcaatgcccatgcccgggccatctgcgccctggacctggcttctgaggtgggcaagctactctctgcaggtgaggacacctttgtgcatatctggaagctgagcagaaacccagagagtggctacattgaggtggaacactgtcatggtgagtgtgtcgccgacacccagctgtgtggtgctcgattttgtgattcctcaggcaactcctttgctgtgactggctatgaccttgcggagatccggagattcagcagtgtgtgagaagagcagccttcctttgtccctgtggtattcataaagtacccgctccaccca

SEQ ID NO: 356440 - DNA, 1110 bp, Homo sapiens
tgccccggcaaccgcgccgcccgcggcacgttccggccgctcaccccgcccaagggccgtgcgtacgtgcgtcgtctctatggtggcggcggatttggagggaccctacgaaccaggagtcaggcgagccgatctggggctgcaggtccactggtgtgtcctccccttccgagtgctgctggtactcacctcacatcgaggaatacaggataaaaatagtacctacatcccagatttgttttgaggattaaatgggctaaggctaacacggatatgtgaagtactcagcagaggtcagttgggttatgccccctggttcttgccccggtcttccagatgtacgagtccaatggctacaccatggtctactggcatgcactggactctggagatgcctccccagtacaggctgtgtttgcccggggaattgctgccagtggccacttcatctgtgtgggaacgtggtcaggccgggtgctggtgtttgacatcccagcaaagggtcccaacattgtactgagcgaggagctggctgggcaccagatgccaatcacagacattgccaccgagcctgcccagggacaggattgtgtggctgacatggtgacggcagatgactcaggcttgctgtgtgtctggcggtcagggccagaattcacattattgacccgcattccaggatttggagttccgtgcccctctgtgcagctgtggcaggggatcatagcagcaggctatgggaacggacaagtgcatctatatgaggccactacaggaaatctacatgtccagatcaatgcccatgcccgggccatctgcgccctggacctggcttctgaggtgggcaagctactctctgcaggtgaggacacctttgtgcatatctggaagctgagcagaaacccagagagtggctacattgaggtggaacactgtcatggtgagtgtgtcgccgacacccagctgtgtggtgctcgattttgtgattcctcaggcaactcctttgctgtgactggctatgaccttgcggagatccggagattcagcagtgtgtgagaagagcagccttcctttgtccctgtggtattcataaagtacccgctccaccca

SEQ ID NO: 356441 - DNA, 1783 bp, Homo sapiens
cctcttgagaacagggtgtatattttcttattcatattctccattgtacctggcatagggctaggcccataggttgtgttggctgcctggtgttgggggtgcaggggcccagggtctagtcatgactgtgactggttcactacgagacctccagaaggtcacgacactgtggcctcagttttatcatccatccagtgaggcaattatgcaccccctcctaatgttattgggggatgggactccatgaagaaattcaaggaaagcagttcatgcttcccaagggaaccctggtggtaggggtggtttctgatgggtctagctagtgagagctccacaccttgccctttccctggagaggcaaagatgcacacactgcctcccttcccctcctgccctgtatacaggaccatagcaggggagaaagggaagggttgatcttgcctttcccttcaggattgtgtggctgacatggtgacggcagatgactcaggcttgctgtgtgtctggcggtcagggccagaattcacattattgacccgcattccaggatttgggtaggtgaggcagaaagggtagagggcttcctgagatagcttcaggctggggagtaggatttgatctgggcaaaacaaagttgggtgtcacccttgcagagttccgtgcccctctgtgcagctgtggcaggggatcatagcagcaggctatgggaacggacaagtgcatctatatgaggccactacaggaaatctacatgtccagatcaatgcccatgcccgggccatctgcgccctggacctggcttctgaggtgggcaagctactctctgcaggtgaggacacctttgtgcatatctggaagctgagcagaaacccagagagtggctacattgaggtggaacactgtcatggtgagtgtgtcgccgacacccagctgtgtggtgctcgattttgtgattcctcaggcaactcctttgctgtgactggctatgaccttgcggagatccggagattcagcagtgtgtgagaagagcagccttcctttgtccctgtggtattcataaagtacccgctccacccaaaaaaaaaaaaaaaaaaaaaaaaaaaaaaaaaaaaaaaaaaaaaaaaaaaaaaaaaaaaaaaaaaaaaggggggggggggcaaaatctccgcggggggcggaccaccgttgagtcagacccggatggtgtgttatgtcaacacaagggggggggcccaatgggggcgggggtcgcatctaaattacacgacgagagcggccggcggcgatgaaaacacaacacggtggcgagagcgcgggaaacaaccgccggagccagagggcatcctggcgaacgaggcagagaccacaactaggcgggcgggggaccgaggcacacggggggccacaccaccaaccaaggaagatccaaaggcgcgacggggacaaaacactatcgggcggtgcatagagggggaccaccaccaagcggaacaatctccgggggggcggaagaaccttggcccagcgagcgattagtggccggcacaattatacccgagcgcgggtgaccgagaaaaccgcagcaacccatgaaacacagccgggcataaaacagactgacacagtggcgagcaatgcagcagacagaagacaacaaggaggagaagacacaacggacagacgcaatgcaagacgccaacaacagagacagcggacacacacagtcgacaacagcggacgcgcaggaccatgaacagaaacaaccagcaagagagaacacgag

SEQ ID NO: 356442 - DNA, 1197 bp, Homo sapiens
tgagatggagtttcgctctcattgcccaggctgtagtgcagtggtgcgatctcagctcaccttgaacctccgccttctgggttcaagcgattctcctgcctcagcctcccgagtagctgggattacaggcgtgtgccaccacacccagttaattttgtattttttttagtagagacgggggtttcaccatgttggtcaggctggtcttgaactcctgatctcaggtgatccacccgccttggtctcccagagtgctgggattacaagagtgagccactgcgcctggccaaaattttgtttttaaattagcctggcgtggtgggtgcgtgcctatagtcccagctatttgggaggcggaggtggaggcgggaggacgcttgagcccaggagtttgagtgagccatgattgcgccactgcagcctgggtgacagccccaccctgtctctcaattttatttattaatttttttttgagacacagtctcgctctgtcgcccaggctggagtgcagtggcgcgatctcggcttactgcaacctccgcctcccgggttcaagcagttctcctgcctcagcctcccgagtagctgggattacaggcgcacaccaccacatccggctaattttgtatttttagtagagacgggctttttccgtgttggtcaggctggtcttgaattcccaacctcagatgatctgcccaccttggtctccccaagtgctgggattaaaggtgtgagccactgtgcccagcccagtatttttttgtttgtttttaccgagatggagtcccgccccattgcccaggctagagtgcagtggcgtgatctcagtacactgcaacctccacttcccaggttcaagcgattctcctgcctcagcctcctgagcagttgggattacaggcacgcacttccacacctggcttacttttgtatttttagtagagacggggtttcaccatgttggccaggctggtctccaattcctgaccccaagggatccaccttaggcctggccgccaacattctgaaccttgtcttttctctgtcatgtattcaaagtccacgctggaaactccaatttcaggtcccttcagttttttgtccgttgtctttcgttctttgtccacgttgcccgtcccttgtgaactggatgctgtgtgtgagcaccagggactgaaaagctccagtgcagtg

SEQ ID NO: 356443 - DNA, 643 bp, Homo sapiens
cggccgagtcctgccctgcagcattctcccctgtggccactgtgctgactgggccggtggtccccagggagcgcatgaacctgaaggtgcccatctacttctccacggggctgaccgagaaggccaaccactactacaagctgttcatcccctggaccaaccagaagatccgcaagacttttgtgcagaggaacatgtttgagttcaagcacatcaaggccttcgaccgggcttttgctgacaacccaggaccgatggttgtgtttgccacgccaggaatgctgcacgctgggcagtccctgcagatcttccggaaatgggccggaaacgaaaagaacatgggtgagggcatggtgaggtgtgggaatctggaagctggaggccgacgggttgtccttccacccatgctgtctctgagctctcactggcttggcctcgtgctggccaagggacgtggctgctgctgctggggaacgggggcgatgtccgcctggagctgctcagtctctgtgacacagcttgtccacctcgggcagaacagccccagcccagccctggacagtcttgtgccaaaacctgagccctttggagtctgcagctaggcttggtcgggcgccgctggcaggtggaaacagcttccagg

SEQ ID NO: 356444 - DNA, 1843 bp, Homo sapiens
accggaagttgcagcgaggtggttgcgcctgcgcagtgcatcaccgcaggcgggcctcgcgggtccgggagcgcggcggagacgatgcctgagatcagagtcacgcccttgggggccggccaggacgtgggccgaagctgcatcctggtctccattgcgggcaagaatgtcatgctggactgtggaatgcacatgggcttcaatgacgacgtagatgatgagctggagatcaaggcctactatgcaggccacgtgctgggggcagccatgttccagattaaagtgggctcagagtctgtggtctacacgggtgattataacatgaccccagaccgacacttaggagctgcctggattgacaagtgccgccccaacctgctcatcacagagtccacgtacgccacgaccatccgtgactccaagcgctgccgggagcgagacttcctgaagaaagtccacgagaccgtggagcgtggtgggaaggtgctgatacctgtgttcgcgctgggccgcgcccaggagctctgcatcctcctggagaccttctgggagcgcatgaacctgaaggtgcccatctacttctccacggggctgaccgagaaggccaaccactactacaagctgttcatcccctggaccaaccagaagatccgcaagacttttgtgcagaggaacatgtttgagttcaagcacatcaaggccttcgaccgggcttttgctgacaacccaggaccgatggttgtgtttgccacgccaggaatgctgcacgctgggcagtccctgcagatcttccggaaatgggccggaaacgaaaagaacatggtcatcatgcccggctactgcgtgcagggcaccgtcggccacaagatcctcagcgggcagcggaagctcgagatggaggggcggcaggtgctggaggtcaagatgcaggtggagtacatgtcattcagcgcacacgcggacgccaagggcatcatgcagctggtgggccaggcagagccggagagcgtgctgctggtgcatggcgaggccaagaagatggagttcctgaagcagaagatcgagcaggagctccgggtcaactgctacatgccggccaatggcgagacggtgacgctgcccacaagccccagcatccccgtaggcatctcgctggggctgctgaagcgggagatggcgcaggggctgctccctgaggccaagaagcctcggctcctgcacggcaccctgatcatgaaggacagcaacttccggctggtgtcctcagagcaagccctcaaagagctgggtctggctgagcaccagctgcgcttcacctgccgcgtgcacctgcatgacacacgcaaggagcaggagacggcattgcgcgtctacagccacctcaagagcgtcctgaaggaccactgtgtgcagcacctcccggacggctctgtgactgtggagtccgtcctcctccaggccgccgccccttctgaggacccaggcaccaaggtgctgctggtctcctggacctaccaggacgaggagctggggagcttcctcacatctctgctgaagaagggcctcccccaggcccccagctgaggccggcaactcacccagccgccacctctgccctctcccagctggacagaccctgggcctgcacttcaggactgtgggtgccctgggtgaacagaccctgcaggtcccatccctggggacagaggccttgtgtcacctgcctgcccaggcagctgtttgcagctgaagaaacaaactggtctccaggctgtcttgcctttattcctggttagggcaggtggtcctagacagcagtttccagtaaaagctgaacaaaaga

SEQ ID NO: 356445 - DNA, 2011 bp, Homo sapiens
accggaagttgcagcgaggtggttgcgcctgcgcagtgcatcaccgcaggcgggcctcgcgggtccgggagcgcggcggagacgatgcctgagatcagagtcacgcccttgggggccggccaggacgtgggccgaagctgcatcctggtctccattgcgggcaagaatgtcatgctggactgtggaatgcacatgggcttcaatgacgaccgacgcttccctgacttctcctacatcacccagaacggccgcctaacagacttcctggactgtgtgatcattagccacttccacctggaccactgcggggcactcccctacttcagcgagatggtgggctacgacggccccatctacatgactcaccccacccaggccatctgccccatcttgctggaggactaccgcaagatcgccgtagacaagaagggcgaggccaacttcttcacctcccagatgatcaaagactgcatgaagaaggtggtggctgtccacctccaccagacggtccagattaaagtgggctcagagtctgtggtctacacgggtgattataacatgaccccagaccgacacttaggagctgcctggattgacaagtgccgccccaacctgctcatcacagagtccacgtacgccacgaccatccgtgactccaagcgctgccgggagcgagacttcctgaagaaagtccacgagaccgtggagcgtggtgggaaggtgctgatacctgtgttcgcgctgggccgcgcccaggagctctgcatcctcctggagaccttctgggagcgcatgaacctgaaggtgcccatctacttctccacggggctgaccgagaaggccaaccactactacaagctgttcatcccctggaccaaccagaagatccgcaagacttttgtgcagaggaacatgtttgagttcaagcacatcaaggccttcgaccgggcttttgctgacaacccaggaccgatggttgtgtttgccacgccaggaatgctgcacgctgggcagtccctgcagatcttccggaaatgggccggaaacgaaaagaacatggtcatcatgcccggctactgcgtgcagggcaccgtcggccacaagatcctcagcgggcagcggaagctcgagatggaggggcggcaggtgctggaggtcaagatgcaggtggagtacatgtcattcagcgcacacgcggacgccaagggcatcatgcagctggtgggccaggcagagccggagagcgtgctgctggtgcatggcgaggccaagaagatggagttcctgaagcagaagatcgagcaggagctccgggtcaactgctacatgccggccaatggcgagacggtgacgctgcccacaagccccagcatccccgtaggcatctcgctggggctgctgaagcgggagatggcgcaggggctgctccctgaggccaagaagcctcggctcctgcacggcaccctgatcatgaaggacagcaacttccggctggtgtcctcagagcaagccctcaaagagctgggtctggctgagcaccagctgcgcttcacctgccgcgtgcacctgcatgacacacgcaaggagcaggagacggcattgcgcgtctacagccacctcaagagcgtcctgaaggaccactgtgtgcagcacctcccggacggctctgtgactgtggagtccgtcctcctccaggccgccgccccttctgaggacccaggcaccaaggtgctgctggtctcctggacctaccaggacgaggagctggggagcttcctcacatctctgctgaagaagggcctcccccaggcccccagctgaggccggcaactcacccagccgccacctctgccctgtcccatccctggggacagaggccttgtgtcacctgcctgcccaggcagctgtttgcagctgaagaaacaaactggtctccaggctgtcttgcctttattcctggttagggcaggtggtcctagacagcagtttccagtaaaagctgaacaaaaga

SEQ ID NO: 356446 - DNA, 3542 bp, Homo sapiens
accggaagttgcagcgaggtggttgcgcctgcgcagtgcatcaccgcaggcgggcctcgcgggtccgggagcgcggcggagacgatgcctgagatcagagtcacgcccttgggggccggccaggacgtgggccgaagctgcatcctggtctccattgcgggcaagaatgtcatgctggactgtggaatgcacatgggcttcaatgacgacgtgagtcccttgggcaggaggcccagaggctgggagagccggccatccacagctggaccctgggcctcagagccgggacagtggggtggtgggcagcagtggttgtgcttggatggctgcaccctgtggggagcagggatgggtgggcctggccgaggtgagcccctgcatggtggggtccccctgtgctggcgctgagccccagccccggggtcctgtaggctggactccgtgagaccctgggctcagcttccagctcacatctgtcagtgaggttgggggtaacctcggcccctccggatgctgtgagcagccaggggtcctggtgccacctgcgggatgggagtgcccagcctgagtctgcacatagaaccccccttcctgggggcccctccctggggcatgggtggccccagatgctgcctggagaccactgtgcaacctgaaacccccacatccttcctagcgacgcttccctgacttctcctacatcacccagaacggccgcctaacagacttcctggactgtgtgatcattaggtgggttcctgttgggggccttgagggtcccatgtctgtgcctgtggggcttgggccaccttgcttggtctcggcagcgtttggcaaggggcctgtgccatccttgatcctcagggggcttctaggccccaggatctgctccctgcctgccttactggtcacacacatggcctggtctctgtctgttcttccggccctgccctctgaaccctactttctgaacccggccctccaggcttcaccctctctgatgccttcactgtctcaggatctttaaaccccactgtcttgttggcgattccagagtcccgagtctgccctgaccccagcctttagggttcagcagctcatgacccgctggtctgggtggcctcgtctggacggccacagcactcctgctggccccctgcccttccctgccctgtcctcccagcagccaggcccgtgaagcctggagaagccccttctcctctccggaggcagtgtcctcagctgcccctgagcccctcgtggttgtggtttcttctcagacacggtggggtccccaatgccttcctggggcttgccaggcgctgcccttgccctcaggtctgtgccaccttcacctgcagctccactcagcctgtcctgactgcctgaaaagccagcggctcccctatgcgcggttccctcagcagctttgcattgtctcgcgagcatgtcgccgtcaccgacgtgttcaatttcccgtttgcttattgccttgctagactttgagactgaaagttccagggagacagttttgtgtttgctcattactgactcttcggtactcgggatgaggcctggcgcacagcaggcgaatgaaggggccagtgacccacaagcccagagcgggggtgaaggctggggcagggtgggcccaggctgacctgtgctgcgtccccctagccacttccacctggaccactgcggggcactcccctacttcagcgagatggtgggctacgacggccccatctacatgactcaccccacccaggccatctgccccatcttgctggaggactaccgcaagatcgccgtagacaagaagggcgaggccaacttcttcacctcccagatgatcaaagactgcatgaagaaggtggtggctgtccacctccaccagacggtccaggtagatgatgagctggagatcaaggcctactatgcaggccacgtgctgggggcagccatgttccagattaaagtgggctcagagtctgtggtctacacgggtgattataacatgaccccagaccgacacttaggagctgcctggattgacaagtgccgccccaacctgctcatcacagagtccacgtacgccacgaccatccgtgactccaagcgctgccgggagcgagacttcctgaagaaagtccacgagaccgtggagcgtggtgggaaggtgctgatacctgtgttcgcgctgggccgcgcccaggagctctgcatcctcctggagaccttctgggagcgcatgaacctgaaggtgcccatctacttctccacggggctgaccgagaaggccaaccactactacaagctgttcatcccctggaccaaccagaagatccgcaagacttttgtgcagaggaacatgtttgagttcaagcacatcaaggccttcgaccgggcttttgctgacaacccaggaccgatggttgtgtttgccacgccaggaatgctgcacgctgggcagtccctgcagatcttccggaaatgggccggaaacgaaaagaacatggtcatcatgcccggctactgcgtgcagggcaccgtcggccacaagatcctcagcgggcagcggaagctcgagatggaggggcggcaggtgctggaggtcaagatgcaggtggagtacatgtcattcagcgcacacgcggacgccaagggcatcatgcagctggtgggccaggcagagccggagagcgtgctgctggtgcatggcgaggccaagaagatggagttcctgaagcagaagatcgagcaggagctccgggtcaactgctacatgccggccaatggcgagacggtgacgctgcccacaagccccagcatccccgtaggcatctcgctggggctgctgaagcgggagatggcgcaggggctgctccctgaggccaagaagcctcggctcctgcacggcaccctgatcatgaaggacagcaacttccggctggtgtcctcagagcaagccctcaaagagctgggtctggctgagcaccagctgcgcttcacctgccgcgtgcacctgcatgacacacgcaaggagcaggagacggcattgcgcgtctacagccacctcaagagcgtcctgaaggaccactgtgtgcagcacctcccggacggctctgtgactgtggagtccgtcctcctccaggccgccgccccttctgaggacccaggcaccaaggtgctgctggtctcctggacctaccaggacgaggagctggggagcttcctcacatctctgctgaagaagggcctcccccaggcccccagctgaggccggcaactcacccagccgccacctctgccctctcccagctggacagaccctgggcctgcacttcaggactgtgggtgccctgggtgaacagaccctgcaggtcccatccctggggacagaggccttgtgtcacctgcctgcccaggcagctgtttgcagctgaagaaacaaactggtctccaggctgtcttgcctttattcctggttagggcaggtggtcctagacagcagtttccagtaaaagctgaacaaaaga

SEQ ID NO: 356447 - DNA, 4616 bp, Homo sapiens
accggaagttgcagcgaggtggttgcgcctgcgcagtgcatcaccgcaggcgggcctcgcgggtccgggagcgcggcggagacgatgcctgagatcagagtcacgcccttgggggccggccaggacgtgggccgaagctgcatcctggtctccattgcgggcaagaatgtcatgctggactgtggaatgcacatgggcttcaatgacgacgtgagtcccttgggcaggaggcccagaggctgggagagccggccatccacagctggaccctgggcctcagagccgggacagtggggtggtgggcagcagtggttgtgcttggatggctgcaccctgtggggagcagggatgggtgggcctggccgaggtgagcccctgcatggtggggtccccctgtgctggcgctgagccccagccccggggtcctgtaggctggactccgtgagaccctgggctcagcttccagctcacatctgtcagtgaggttgggggtaacctcggcccctccggatgctgtgagcagccaggggtcctggtgccacctgcgggatgggagtgcccagcctgagtctgcacatagaaccccccttcctgggggcccctccctggggcatgggtggccccagatgctgcctggagaccactgtgcaacctgaaacccccacatccttcctagcgacgcttccctgacttctcctacatcacccagaacggccgcctaacagacttcctggactgtgtgatcattaggtgggttcctgttgggggccttgagggtcccatgtctgtgcctgtggggcttgggccaccttgcttggtctcggcagcgtttggcaaggggcctgtgccatccttgatcctcagggggcttctaggccccaggatctgctccctgcctgccttactggtcacacacatggcctggtctctgtctgttcttccggccctgccctctgaaccctactttctgaacccggccctccaggcttcaccctctctgatgccttcactgtctcaggatctttaaaccccactgtcttgttggcgattccagagtcccgagtctgccctgaccccagcctttagggttcagcagctcatgacccgctggtctgggtggcctcgtctggacggccacagcactcctgctggccccctgcccttccctgccctgtcctcccagcagccaggcccgtgaagcctggagaagccccttctcctctccggaggcagtgtcctcagctgcccctgagcccctcgtggttgtggtttcttctcagacacggtggggtccccaatgccttcctggggcttgccaggcgctgcccttgccctcaggtctgtgccaccttcacctgcagctccactcagcctgtcctgactgcctgaaaagccagcggctcccctatgcgcggttccctcagcagctttgcattgtctcgcgagcatgtcgccgtcaccgacgtgttcaatttcccgtttgcttattgccttgctagactttgagactgaaagttccagggagacagttttgtgtttgctcattactgactcttcggtactcgggatgaggcctggcgcacagcaggcgaatgaaggggccagtgacccacaagcccagagcgggggtgaaggctggggcagggtgggcccaggctgacctgtgctgcgtccccctagccacttccacctggaccactgcggggcactcccctacttcagcgagatggtgggctacgacggccccatctacatgactcaccccacccaggccatctgccccatcttgctggaggactaccgcaagatcgccgtagacaagaagggcgaggccaacttcttcacctcccagatgatcaaagactgcatgaagaaggtggtggctgtccacctccaccagacggtccagaggtcaggttcccagggccacagctggcacagtcactgcccacccccacaccaaccatgccctccgcccgttctacacagtttctggaaggctggggcctcagggtgagcccaccccacctcactcttgcgtccagcaccgtggggacaccaggaggcgtcagcgcgaggatgcgggtcccagaccagactgggcgccgacccgggagagcacgtgcagggtgggggtatgcactggcttacgaacccaccaggctctgtccgagcggcattgaaatggccagagtgggacaggctggtgccctcagagcgcttggagcggccagagactcgctggagctcccggggtgttgccgggcagggaggcaggggctggaggggagatgggccagctctggagggtgcctggttctgggtgtgggtcagggaagaagtgaaggttaaatcagcgagtgacaggtgaaattccatttctgacaaagattatgggtttgtctgtgtctcactcgaatctctgggtattgcttttatatttcttgaaattatattaggtacctatgtattttggaacatttaattttctgattgaacttgtcaaaatgaagtatgtttatcttttttgttgtgaaactttaatttttttttttttttgacagtgtctcactttgttacccaggctggagtgtgatcttggctcactgcagcctcggcctcccgggttgaggtgatctcccacctcggcctcccaagtagctgggactacaagcatgtgcccatacgcccagctaatttattttggtattttttgtagagatgggtatgtgttgctaaggctctcgaactcctgggctgggctccagggatcctcccacctcagcctctcaaagtgctcggattacaggcatccactgcgcctggccaaaattttgtttttaaattagcctggcgtggtgggtgcgtgcctatagtcccagctatttgggaggcggaggtggaggcgggaggacgcttgagcccaggagtttgagtgagccatgattgcgccactgcagcctgggtgacagccccaccctgtctctcaattttatttattaatttttttttgagacacagtctcgctctgtcgcccaggctggagtgcagtggcgcgatctcggcttactgcaacctccgcctcccgggttcaagcagttctcctgcctcagcctcccgagtagctgggattacaggcgcacaccaccacatccggctaattttgtatttttagtagagacgggctttttccgtgttggtcaggctggtcttgaattcccaacctcagatgatctgcccaccttggtctccccaagtgctgatacctgtgttcgcgctgggccgcgcccaggagctctgcatcctcctggagaccttctgggagcgcatgaacctgaaggtgcccatctacttctccacggggctgaccgagaaggccaaccactactacaagctgttcatcccctggaccaaccagaagatccgcaagacttttgtgcagaggaacatgtttgagttcaagcacatcaaggccttcgaccgggcttttgctgacaacccaggaccgatggttgtgtttgccacgccaggaatgctgcacgctgggcagtccctgcagatcttccggaaatgggccggaaacgaaaagaacatggtcatcatgcccggctactgcgtgcagggcaccgtcggccacaagatcctcagcgggcagcggaagctcgagatggaggggcggcaggtgctggaggtcaagatgcaggtggagtacatgtcattcagcgcacacgcggacgccaagggcatcatgcagctggtgggccaggcagagccggagagcgtgctgctggtgcatggcgaggccaagaagatggagttcctgaagcagaagatcgagcaggagctccgggtcaactgctacatgccggccaatggcgagacggtgacgctgcccacaagccccagcatccccgtaggcatctcgctggggctgctgaagcgggagatggcgcaggggctgctccctgaggccaagaagcctcggctcctgcacggcaccctgatcatgaaggacagcaacttccggctggtgtcctcagagcaagccctcaaagagctgggtctggctgagcaccagctgcgcttcacctgccgcgtgcacctgcatgacacacgcaaggagcaggagacggcattgcgcgtctacagccacctcaagagcgtcctgaaggaccactgtgtgcagcacctcccggacggctctgtgactgtggagtccgtcctcctccaggccgccgccccttctgaggacccaggcaccaaggtgctgctggtctcctggacctaccaggacgaggagctggggagcttcctcacatctctgctgaagaagggcctcccccaggcccccagctgaggccggcaactcacccagccgccacctctgccctctcccagctggacagaccctgggcctgcacttcaggactgtgggtgccctgggtgaacagaccctgcaggtcccatccctggggacagaggccttgtgtcacctgcctgcccaggcagctgtttgcagctgaagaaacaaactggtctccaggctgtcttgcctttattcctggttagggcaggtggtcctagacagcagtttccagtaaaagctgaacaaaaga

SEQ ID NO: 356448 - DNA, 1555 bp, Homo sapiens
ggtgggtgctctagccgaagttgattgtcacttgacccccagaaccgacacttaggagctgcctggattgacaagtgccgccccaacctgctcatcacagagtccacgtacgccacgaccatccgtgactccaagcgctgccgggagcgagacttcctgaagaaagtccacgagaccgtggagcgtggtgggaaggtgctgatacctgtgttcgcgctgggccgcgcccaggagctctgcatcctcctggagaccttctgggagcgcatgaacctgaaggtgcccatctacttctccacggggctgaccgagaaggccaaccactactacaagctgttcatcccctggaccaaccagaagatccgcaagacttttgtgcagaggaacatgtttgagttcaagcacatcaaggccttcgaccgggcttttgctgacaacccaggaccgatggttgtgtttgccacgccaggaatgctgcacgctgggcagtccctgcagatcttccggaaatgggccggaaacgaaaagaacatggtcatcatgcccggctactgcgtgcagggcaccgtcggccacaagatcctcagcgggcagcggaagctcgagatggaggggcggcaggtgctggaggtcaagatgcaggtggagtacatgtcattcagcgcacacgcggacgccaagggcatcatgcagctggtgggccaggcagagccggagagcgtgctgctggtgcatggcgaggccaagaagatggagttcctgaagcagaagatcgagcaggagctccgggtcaactgctacatgccggccaatggcgagacggtgacgctgcccacaagccccagcatccccgtaggcatctcgctggggctgctgaagcgggagatggcgcaggggctgctccctgaggccaagaagcctcggctcctgcacggcaccctgatcatgaaggacagcaacttccggctggtgtcctcagagcaagccctcaaagagctgggtctggctgagcaccagctgcgcttcacctgccgcgtgcacctgcatgacacacgcaaggagcaggagacggcattgcgcgtctacagccacctcaagagcgtcctgaaggaccactgtgtgcagcacctcccggacggctctgtgactgtggagtccgtcctcctccaggccgccgccccttctgaggacccaggcaccaaggtgctgctggtctcctggacctaccaggacgaggagctggggagcttcctcacatctctgctgaagaagggcctcccccaggcccccagctgaggccggcaactcacccagccgccacctctgccctctcccagctggacagaccctgggcctgcacttcaggactgtgggtgccctgggtgaacagaccctgcaggtcccatccctggggacagaggccttgtgtcacctgcctgcccaggcagctgtttgcagctgaagaaacaaactggtctccaggctgtcttgcctttattcctggttagggcaggtggtcctagacagcagtttccagtaaaagctgaacaaaaga

SEQ ID NO: 356449 - DNA, 3881 bp, Homo sapiens
accggaagttgcagcgaggtggttgcgcctgcgcagtgcatcaccgcaggcgggcctcgcgggtccgggagcgcggcggagacgatgcctgagatcagagtcacgcccttgggggccggccaggacgtgggccgaagctgcatcctggtctccattgcgggcaagaatgtcatgctggactgtggaatgcacatgggcttcaatgacgacgtgagtcccttgggcaggaggcccagaggctgggagagccggccatccacagctggaccctgggcctcagagccgggacagtggggtggtgggcagcagtggttgtgcttggatggctgcaccctgtggggagcagggatgggtgggcctggccgaggtgagcccctgcatggtggggtccccctgtgctggcgctgagccccagccccggggtcctgtaggctggactccgtgagaccctgggctcagcttccagctcacatctgtcagtgaggttgggggtaacctcggcccctccggatgctgtgagcagccaggggtcctggtgccacctgcgggatgggagtgcccagcctgagtctgcacatagaaccccccttcctgggggcccctccctggggcatgggtggccccagatgctgcctggagaccactgtgcaacctgaaacccccacatccttcctagcgacgcttccctgacttctcctacatcacccagaacggccgcctaacagacttcctggactgtgtgatcattaggtgggttcctgttgggggccttgagggtcccatgtctgtgcctgtggggcttgggccaccttgcttggtctcggcagcgtttggcaaggggcctgtgccatccttgatcctcagggggcttctaggccccaggatctgctccctgcctgccttactggtcacacacatggcctggtctctgtctgttcttccggccctgccctctgaaccctactttctgaacccggccctccaggcttcaccctctctgatgccttcactgtctcaggatctttaaaccccactgtcttgttggcgattccagagtcccgagtctgccctgaccccagcctttagggttcagcagctcatgacccgctggtctgggtggcctcgtctggacggccacagcactcctgctggccccctgcccttccctgccctgtcctcccagcagccaggcccgtgaagcctggagaagccccttctcctctccggaggcagtgtcctcagctgcccctgagcccctcgtggttgtggtttcttctcagacacggtggggtccccaatgccttcctggggcttgccaggcgctgcccttgccctcaggtctgtgccaccttcacctgcagctccactcagcctgtcctgactgcctgaaaagccagcggctcccctatgcgcggttccctcagcagctttgcattgtctcgcgagcatgtcgccgtcaccgacgtgttcaatttcccgtttgcttattgccttgctagactttgagactgaaagttccagggagacagttttgtgtttgctcattactgactcttcggtactcgggatgaggcctggcgcacagcaggcgaatgaaggggccagtgacccacaagcccagagcgggggtgaaggctggggcagggtgggcccaggctgacctgtgctgcgtccccctagccacttccacctggaccactgcggggcactcccctacttcagcgagatggtgggctacgacggccccatctacatgactcaccccacccaggccatctgccccatcttgctggaggactaccgcaagatcgccgtagacaagaagggcgaggccaacttcttcacctcccagatgatcaaagactgcatgaagaaggtggtggctgtccacctccaccagacggtccaggtagatgatgagctggagatcaaggcctactatgcaggccacgtgctgggggcagccatgttccagattaaagtgggctcagagtctgtggtctacacgggtgattataacatgaccccagaccgacacttaggagctgcctggattgacaagtgccgccccaacctgctcatcacagagtccacgtacgccacgaccatccgtgactccaagcgctgccgggagcgagacttcctgaagaaagtccacgagaccgtggagcgtggtgggaaggtgctgatacctgtgttcgcgctgggccgcgcccaggagctctgcatcctcctggagaccttctgggagcgcatgaacctgaaggtgcccatctacttctccacggggctgaccgagaaggccaaccactactacaagctgttcatcccctggaccaaccagaagatccgcaagacttttgtgcagaggaacatgtttgagttcaagcacatcaaggccttcgaccgggcttttgctgacaacccaggaccgatggttgtgtttgccacgccaggaatgctgcacgctgggcagtccctgcagatcttccggaaatgggccggaaacgaaaagaacatggtcatcatgcccggctactgcgtgcagggcaccgtcggccacaagatcctcagcgggcagcggaagctcgagatggaggggcggcaggtgctggaggtcaagatgcaggtggagtacatgtcattcagcgcacacgcggacgccaagggcatcatgcagctggtgggccaggcagagccggagagcgtgctgctggtgcatggcgaggccaagaagatggagttcctgaagcagaagatcgagcaggagctccgggtcaactgctacatgccggccaatggcgagacggtgacgctgcccacaagccccagcatccccgtaggcatctcgctggggctgctgaagcgggagatggcgcaggggctgctccctgaggccaagaagcctcggctcctgcacggcaccctgatcatgaaggacagcaacttccggctggtgtcctcagagcaagccctcaaagagctgggtctggctgagcaccagctgcgcttcacctgccgcgtgcacctgcatgacacacgcaaggagcaggagacggcattgcgcgtctacagccacctcaagagcgtcctgaaggaccactgtgtgcagcacctcccggacggctctgtgactgtggagtccgtcctcctccaggccgccgccccttctgaggacccaggcaccaaggtgctgctggtctcctggacctaccaggacgaggagctggggagcttcctcacatctctgctgaagaagggcctcccccaggcccccagctgaggccggcaactcacccagccgccacctctgccctctcccagctggacagaccctgggcctgcacttcaggactgtgggtgccctgggtgaacagaccctgcaggtcccatccctggggacagaggccttgtgtcacctgcctgcccaggcagctgtttgcagctgaagaaacaaactggtctccaggctgtcttgcctttattcctggttagggcaggtggtcctagacagcagtttccagtaaaagctgaacaaaagactacttggtactctcttcttggtgtacatggctgtgtcctgcactgtgccccatcccgcctgggacagagacgggcatccagggtgctgggacccgggcagggaggctactgtggagaccaggcagcagtgctgtgggccccaagcagctgtgactgccctggcttgaccagcacagggttgggcctggtgtggcctaactttggcttgagtgtccagggtcatccgtggctcccgaactgtggcccctgcagggtgcaggaggcagcacctcgaggttcccgtacagcactgacttgaggaataagccgtgggctggggctacacgtgtctggtgctt

SEQ ID NO: 356450 - DNA, 4701 bp, Homo sapiens
accggaagttgcagcgaggtggttgcgcctgcgcagtgcatcaccgcaggcgggcctcgcgggtccgggagcgcggcggagacgatgcctgagatcagagtcacgcccttgggggccggccaggacgtgggccgaagctgcatcctggtctccattgcgggcaagaatgtcatgctggactgtggaatgcacatgggcttcaatgacgacgtgagtcccttgggcaggaggcccagaggctgggagagccggccatccacagctggaccctgggcctcagagccgggacagtggggtggtgggcagcagtggttgtgcttggatggctgcaccctgtggggagcagggatgggtgggcctggccgaggtgagcccctgcatggtggggtccccctgtgctggcgctgagccccagccccggggtcctgtaggctggactccgtgagaccctgggctcagcttccagctcacatctgtcagtgaggttgggggtaacctcggcccctccggatgctgtgagcagccaggggtcctggtgccacctgcgggatgggagtgcccagcctgagtctgcacatagaaccccccttcctgggggcccctccctggggcatgggtggccccagatgctgcctggagaccactgtgcaacctgaaacccccacatccttcctagcgacgcttccctgacttctcctacatcacccagaacggccgcctaacagacttcctggactgtgtgatcattaggtgggttcctgttgggggccttgagggtcccatgtctgtgcctgtggggcttgggccaccttgcttggtctcggcagcgtttggcaaggggcctgtgccatccttgatcctcagggggcttctaggccccaggatctgctccctgcctgccttactggtcacacacatggcctggtctctgtctgttcttccggccctgccctctgaaccctactttctgaacccggccctccaggcttcaccctctctgatgccttcactgtctcaggatctttaaaccccactgtcttgttggcgattccagagtcccgagtctgccctgaccccagcctttagggttcagcagctcatgacccgctggtctgggtggcctcgtctggacggccacagcactcctgctggccccctgcccttccctgccctgtcctcccagcagccaggcccgtgaagcctggagaagccccttctcctctccggaggcagtgtcctcagctgcccctgagcccctcgtggttgtggtttcttctcagacacggtggggtccccaatgccttcctggggcttgccaggcgctgcccttgccctcaggtctgtgccaccttcacctgcagctccactcagcctgtcctgactgcctgaaaagccagcggctcccctatgcgcggttccctcagcagctttgcattgtctcgcgagcatgtcgccgtcaccgacgtgttcaatttcccgtttgcttattgccttgctagactttgagactgaaagttccagggagacagttttgtgtttgctcattactgactcttcggtactcgggatgaggcctggcgcacagcaggcgaatgaaggggccagtgacccacaagcccagagcgggggtgaaggctggggcagggtgggcccaggctgacctgtgctgcgtccccctagccacttccacctggaccactgcggggcactcccctacttcagcgagatggtgggctacgacggccccatctacatgactcaccccacccaggccatctgccccatcttgctggaggactaccgcaagatcgccgtagacaagaagggcgaggccaacttcttcacctcccagatgatcaaagactgcatgaagaaggtggtggctgtccacctccaccagacggtccagaggtcaggttcccagggccacagctggcacagtcactgcccacccccacaccaaccatgccctccgcccgttctacacagtttctggaaggctggggcctcagggtgagcccaccccacctcactcttgcgtccagcaccgtggggacaccaggaggcgtcagcgcgaggatgcgggtcccagaccagactgggcgccgacccgggagagcacgtgcagggtgggggtatgcactggcttacgaacccaccaggctctgtccgagcggcattgaaatggccagagtgggacaggctggtgccctcagagcgcttggagcggccagagactcgctggagctcccggggtgttgccgggcagggaggcaggggctggaggggagatgggccagctctggagggtgcctggttctgggtgtgggtcagggaagaagtgaaggttaaatcagcgagtgacaggtgaaattccatttctgacaaagattatgggtttgtctgtgtctcactcgaatctctgggtattgcttttatatttcttgaaattatattaggtacctatgtattttggaacatttaattttctgattgaacttgtcaaaatgaagtatgtttatcttttttgttgtgaaactttaatttttttttttttttgacagtgtctcactttgttacccaggctggagtgtgatcttggctcactgcagcctcggcctcccgggttgaggtgatctcccacctcggcctcccaagtagctgggactacaagcatgtgcccatacgcccagctaatttattttggtattttttgtagagatgggtatgtgttgctaaggctctcgaactcctgggctgggctccagggatcctcccacctcagcctctcaaagtgctcggattacaggcatccactgcgcctggccaaaattttgtttttaaattagcctggcgtggtgggtgcgtgcctatagtcccagctatttgggaggcggaggtggaggcgggaggacgcttgagcccaggagtttgagtgagccatgattgcgccactgcagcctgggtgacagccccaccctgtctctcaattttatttattaatttttttttgagacacagtctcgctctgtcgcccaggctggagtgcagtggcgcgatctcggcttactgcaacctccgcctcccgggttcaagcagttctcctgcctcagcctcccgagtagctgggattacaggcgcacaccaccacatccggctaattttgtatttttagtagagacgggctttttccgtgttggtcaggctggtcttgaattcccaacctcagatgatctgcccaccttggtctccccaagtgctgatacctgtgttcgcgctgggccgcgcccaggagctctgcatcctcctggagaccttctgggagcgcatgaacctgaaggtgcccatctacttctccacggggctgaccgagaaggccaaccactactacaagctgttcatcccctggaccaaccagaagatccgcaagacttttgtgcagaggaacatgtttgagttcaagcacatcaaggccttcgaccgggcttttgctgacaacccaggaccgatggttgtgtttgccacgccaggaatgctgcacgctgggcagtccctgcagatcttccggaaatgggccggaaacgaaaagaacatggtcatcatgcccggctactgcgtgcagggcaccgtcggccacaagatcctcagcgggcagcggaagctcgagatggaggggcggcaggtggtgagtctcgaccccgcactgggctggcagggccgaggggcacctcctggtggtaaccactgtccacgccccgtggcctctgtagctggaggtcaagatgcaggtggagtacatgtcattcagcgcacacgcggacgccaagggcatcatgcagctggtgggccaggcagagccggagagcgtgctgctggtgcatggcgaggccaagaagatggagttcctgaagcagaagatcgagcaggagctccgggtcaactgctacatgccggccaatggcgagacggtgacgctgcccacaagccccagcatccccgtaggcatctcgctggggctgctgaagcgggagatggcgcaggggctgctccctgaggccaagaagcctcggctcctgcacggcaccctgatcatgaaggacagcaacttccggctggtgtcctcagagcaagccctcaaagagctgggtctggctgagcaccagctgcgcttcacctgccgcgtgcacctgcatgacacacgcaaggagcaggagacggcattgcgcgtctacagccacctcaagagcgtcctgaaggaccactgtgtgcagcacctcccggacggctctgtgactgtggagtccgtcctcctccaggccgccgccccttctgaggacccaggcaccaaggtgctgctggtctcctggacctaccaggacgaggagctggggagcttcctcacatctctgctgaagaagggcctcccccaggcccccagctgaggccggcaactcacccagccgccacctctgccctctcccagctggacagaccctgggcctgcacttcaggactgtgggtgccctgggtgaacagaccctgcaggtcccatccctggggacagaggccttgtgtcacctgcctgcccaggcagctgtttgcagctgaagaaacaaactggtctccaggctgtcttgcctttattcctggttagggcaggtggtcctagacagcagtttccagtaaaagctgaacaaaaga

SEQ ID NO: 356451 - DNA, 3705 bp, Homo sapiens
accggaagttgcagcgaggtggttgcgcctgcgcagtgcatcaccgcaggcgggcctcgcgggtccgggagcgcggcggagacgatgcctgagatcagagtcacgcccttgggggccggccaggacgtgggccgaagctgcatcctggtctccattgcgggcaagaatgtcatgctggactgtggaatgcacatgggcttcaatgacgacgtgagtcccttgggcaggaggcccagaggctgggagagccggccatccacagctggaccctgggcctcagagccgggacagtggggtggtgggcagcagtggttgtgcttggatggctgcaccctgtggggagcagggatgggtgggcctggccgaggtgagcccctgcatggtggggtccccctgtgctggcgctgagccccagccccggggtcctgtaggctggactccgtgagaccctgggctcagcttccagctcacatctgtcagtgaggttgggggtaacctcggcccctccggatgctgtgagcagccaggggtcctggtgccacctgcgggatgggagtgcccagcctgagtctgcacatagaaccccccttcctgggggcccctccctggggcatgggtggccccagatgctgcctggagaccactgtgcaacctgaaacccccacatccttcctagcgacgcttccctgacttctcctacatcacccagaacggccgcctaacagacttcctggactgtgtgatcattaggtgggttcctgttgggggccttgagggtcccatgtctgtgcctgtggggcttgggccaccttgcttggtctcggcagcgtttggcaaggggcctgtgccatccttgatcctcagggggcttctaggccccaggatctgctccctgcctgccttactggtcacacacatggcctggtctctgtctgttcttccggccctgccctctgaaccctactttctgaacccggccctccaggcttcaccctctctgatgccttcactgtctcaggatctttaaaccccactgtcttgttggcgattccagagtcccgagtctgccctgaccccagcctttagggttcagcagctcatgacccgctggtctgggtggcctcgtctggacggccacagcactcctgctggccccctgcccttccctgccctgtcctcccagcagccaggcccgtgaagcctggagaagccccttctcctctccggaggcagtgtcctcagctgcccctgagcccctcgtggttgtggtttcttctcagacacggtggggtccccaatgccttcctggggcttgccaggcgctgcccttgccctcaggtctgtgccaccttcacctgcagctccactcagcctgtcctgactgcctgaaaagccagcggctcccctatgcgcggttccctcagcagctttgcattgtctcgcgagcatgtcgccgtcaccgacgtgttcaatttcccgtttgcttattgccttgctagactttgagactgaaagttccagggagacagttttgtgtttgctcattactgactcttcggtactcgggatgaggcctggcgcacagcaggcgaatgaaggggccagtgacccacaagcccagagcgggggtgaaggctggggcagggtgggcccaggctgacctgtgctgcgtccccctagccacttccacctggaccactgcggggcactcccctacttcagcgagatggtgggctacgacggccccatctacatgactcaccccacccaggccatctgccccatcttgctggaggactaccgcaagatcgccgtagacaagaagggcgaggccaacttcttcacctcccagatgatcaaagactgcatgaagaaggtggtggctgtccacctccaccagacggtccaggtagatgatgagctggagatcaaggcctactatgcaggccacgtgctgggggcagccatgttccagattaaagtgggctcagagtctgtggtctacacgggtgattataacatgaccccagaccgacacttaggagctgcctggattgacaagtgccgccccaacctgctcatcacagagtccacgtacgccacgaccatccgtgactccaagcgctgccgggagcgagacttcctgaagaaagtccacgagaccgtggagcgtggtgggaaggtgctgatacctgtgttcgcgctgggccgcgcccaggagctctgcatcctcctggagaccttctgggagcgcatgaacctgaaggtgcccatctacttctccacggggctgaccgagaaggccaaccactactacaagctgttcatcccctggaccaaccagaagatccgcaagacttttgtgcagaggaacatgtttgagttcaagcacatcaaggccttcgaccgggcttttgctgacaacccaggaccgatggttgtgtttgccacgccaggaatgctgcacgctgggcagtccctgcagatcttccggaaatgggccggaaacgaaaagaacatggtcatcatgcccggctactgcgtgcagggcaccgtcggccacaagatcctcagcgggcagcggaagctcgagatggaggggcggcaggtgctggaggtcaagatgcaggtggagtacatgtcattcagcgcacacgcggacgccaagggcatcatgcagctggtgggccaggcagagccggagagcgtgctgctggtgcatggcgaggccaagaagatggagttcctgaagcagaagatcgagcaggagctccgggtcaactgctacatgccggccaatggcgagacggtgacgctgcccacaagccccagcatccccgtaggcatctcgctggggctgctgaagcgggagatggcgcagggtatgcgggctgggcagggcagggcagggtgctcggggcaggcggctgggagcggccctcacattgatggctcctgccacctcctccgcagggctgctccctgaggccaagaagcctcggctcctgcacggcaccctgatcatgaaggacagcgtgagtgccaggacggtctctggaggggggagggccgctgctgcgctcactgacctgtccctgccccacagaaacttccggctggtgtcctcagagcaagccctcaaagagctgggtctggctgagcaccagctgcgcttcacctgccgcgtgcacctgcatgacacacgcaaggagcaggagacggcattgcgcgtctacagccacctcaagagcgtcctgaaggaccactgtgtgcagcacctcccggacggctctgtgactgtggagtccgtcctcctccaggccgccgccccttctgaggacccaggcaccaaggtgctgctggtctcctggacctaccaggacgaggagctggggagcttcctcacatctctgctgaagaagggcctcccccaggcccccagctgaggccggcaactcacccagccgccacctctgccctctcccagctggacagaccctgggcctgcacttcaggactgtgggtgccctgggtgaacagaccctgcaggtcccatccctggggacagaggccttgtgtcacctgcctgcccaggcagctgtttgcagctgaagaaacaaactggtctccaggctgtcttgcctttattcctggttagggcaggtggtcctagacagcagtttccagtaaaagctgaacaaaaga

SEQ ID NO: 356452 - DNA, 4403 bp, Homo sapiens
accggaagttgcagcgaggtggttgcgcctgcgcagtgcatcaccgcaggcgggcctcgcgggtccgggagcgcggcggagacgatgcctgagatcagagtcacgcccttgggggccggccaggacgtgggccgaagctgcatcctggtctccattgcgggcaagaatgtcatgctggactgtggaatgcacatgggcttcaatgacgacgtgagtcccttgggcaggaggcccagaggctgggagagccggccatccacagctggaccctgggcctcagagccgggacagtggggtggtgggcagcagtggttgtgcttggatggctgcaccctgtggggagcagggatgggtgggcctggccgaggtgagcccctgcatggtggggtccccctgtgctggcgctgagccccagccccggggtcctgtaggctggactccgtgagaccctgggctcagcttccagctcacatctgtcagtgaggttgggggtaacctcggcccctccggatgctgtgagcagccaggggtcctggtgccacctgcgggatgggagtgcccagcctgagtctgcacatagaaccccccttcctgggggcccctccctggggcatgggtggccccagatgctgcctggagaccactgtgcaacctgaaacccccacatccttcctagcgacgcttccctgacttctcctacatcacccagaacggccgcctaacagacttcctggactgtgtgatcattaggtgggttcctgttgggggccttgagggtcccatgtctgtgcctgtggggcttgggccaccttgcttggtctcggcagcgtttggcaaggggcctgtgccatccttgatcctcagggggcttctaggccccaggatctgctccctgcctgccttactggtcacacacatggcctggtctctgtctgttcttccggccctgccctctgaaccctactttctgaacccggccctccaggcttcaccctctctgatgccttcactgtctcaggatctttaaaccccactgtcttgttggcgattccagagtcccgagtctgccctgaccccagcctttagggttcagcagctcatgacccgctggtctgggtggcctcgtctggacggccacagcactcctgctggccccctgcccttccctgccctgtcctcccagcagccaggcccgtgaagcctggagaagccccttctcctctccggaggcagtgtcctcagctgcccctgagcccctcgtggttgtggtttcttctcagacacggtggggtccccaatgccttcctggggcttgccaggcgctgcccttgccctcaggtctgtgccaccttcacctgcagctccactcagcctgtcctgactgcctgaaaagccagcggctcccctatgcgcggttccctcagcagctttgcattgtctcgcgagcatgtcgccgtcaccgacgtgttcaatttcccgtttgcttattgccttgctagactttgagactgaaagttccagggagacagttttgtgtttgctcattactgactcttcggtactcgggatgaggcctggcgcacagcaggcgaatgaaggggccagtgacccacaagcccagagcgggggtgaaggctggggcagggtgggcccaggctgacctgtgctgcgtccccctagccacttccacctggaccactgcggggcactcccctacttcagcgagatggtgggctacgacggccccatctacatgactcaccccacccaggccatctgccccatcttgctggaggactaccgcaagatcgccgtagacaagaagggcgaggccaacttcttcacctcccagatgatcaaagactgcatgaagaaggtggtggctgtccacctccaccagacggtccagaggtcaggttcccagggccacagctggcacagtcactgcccacccccacaccaaccatgccctccgcccgttctacacagtttctggaaggctggggcctcagggtgagcccaccccacctcactcttgcgtccagcaccgtggggacaccaggaggcgtcagcgcgaggatgcgggtcccagaccagactgggcgccgacccgggagagcacgtgcagggtgggggtatgcactggcttacgaacccaccaggctctgtccgagcggcattgaaatggccagagtgggacaggctggtgccctcagagcgcttggagcggccagagactcgctggagctcccggggtgttgccgggcagggaggcaggggctggaggggagatgggccagctctggagggtgcctggttctgggtgtgggtcagggaagaagtgaaggttaaatcagcgagtgacaggtgaaattccatttctgacaaagattatgggtttgtctgtgtctcactcgaatctctgggtattgcttttatatttcttgaaattatattaggtacctatgtattttggaacatttaattttctgattgaacttgtcaaaatgaagtatgtttatcttttttgttgtgaaactttaatttttttttttttttgacagtgtctcactttgttacccaggctggagtgtgatcttggctcactgcagcctcggcctcccgggttgaggtgatctcccacctcggcctcccaagtagctgggactacaagcatgtgcccatacgcccagctaatttattttggtattttttgtagagatgggtatgtgttgctaaggctctcgaactcctgggctgggctccagggatcctcccacctcagcctctcaaagtgctcggattacaggcatccactgcgcctggccaaaattttgtttttaaattagcctggcgtggtgggtgcgtgcctatagtcccagctatttgggaggcggaggtggaggcgggaggacgcttgagcccaggagtttgagtgagccatgattgcgccactgcagcctgggtgacagccccaccctgtctctcaattttatttattaatttttttttgagacacagtctcgctctgtcgcccaggctggagtgcagtggcgcgatctcggcttactgcaacctccgcctcccgggttcaagcagttctcctgcctcagcctcccgagtagctgggattacaggcgcacaccaccacatccggctaattttgtatttttagtagagacgggctttttccgtgttggtcaggctggtcttgaattcccaacctcagatgatctgcccaccttggtctccccaagtgctgatacctgtgttcgcgctgggccgcgcccaggagctctgcatcctcctggagaccttctgggagcgcatgaacctgaaggtgcccatctacttctccacggggctgaccgagaaggccaaccactactacaagctgttcatcccctggaccaaccagaagatccgcaagacttttgtgcagaggaacatgtttgagttcaagcacatcaaggccttcgaccgggcttttgctgacaacccaggaccgatggttgtgtttgccacgccaggaatgctgcacgctgggcagtccctgcagatcttccggaaatgggccggaaacgaaaagaacatgaagatggagttcctgaagcagaagatcgagcaggagctccgggtcaactgctacatgccggccaatggcgagacggtgacgctgcccacaagccccagcatccccgtaggcatctcgctggggctgctgaagcgggagatggcgcaggggctgctccctgaggccaagaagcctcggctcctgcacggcaccctgatcatgaaggacagcaacttccggctggtgtcctcagagcaagccctcaaagagctgggtctggctgagcaccagctgcgcttcacctgccgcgtgcacctgcatgacacacgcaaggagcaggagacggcattgcgcgtctacagccacctcaagagcgtcctgaaggaccactgtgtgcagcacctcccggacggctctgtgactgtggagtccgtcctcctccaggccgccgccccttctgaggacccaggcaccaaggtgctgctggtctcctggacctaccaggacgaggagctggggagcttcctcacatctctgctgaagaagggcctcccccaggcccccagctgaggccggcaactcacccagccgccacctctgccctctcccagctggacagaccctgggcctgcacttcaggactgtgggtgccctgggtgaacagaccctgcaggtcccatccctggggacagaggccttgtgtcacctgcctgcccaggcagctgtttgcagctgaagaaacaaactggtctccaggctgtcttgcctttattcctggttagggcaggtggtcctagacagcagtttccagtaaaagctgaacaaaaga

SEQ ID NO: 356453 - DNA, 3464 bp, Homo sapiens
accggaagttgcagcgaggtggttgcgcctgcgcagtgcatcaccgcaggcgggcctcgcgggtccgggagcgcggcggagacgatgcctgagatcagagtcacgcccttgggggccggccaggacgtgggccgaagctgcatcctggtctccattgcgggcaagaatgtcatgctggactgtggaatgcacatgggcttcaatgacgacgtgagtcccttgggcaggaggcccagaggctgggagagccggccatccacagctggaccctgggcctcagagccgggacagtggggtggtgggcagcagtggttgtgcttggatggctgcaccctgtggggagcagggatgggtgggcctggccgaggtgagcccctgcatggtggggtccccctgtgctggcgctgagccccagccccggggtcctgtaggctggactccgtgagaccctgggctcagcttccagctcacatctgtcagtgaggttgggggtaacctcggcccctccggatgctgtgagcagccaggggtcctggtgccacctgcgggatgggagtgcccagcctgagtctgcacatagaaccccccttcctgggggcccctccctggggcatgggtggccccagatgctgcctggagaccactgtgcaacctgaaacccccacatccttcctagcgacgcttccctgacttctcctacatcacccagaacggccgcctaacagacttcctggactgtgtgatcattaggtgggttcctgttgggggccttgagggtcccatgtctgtgcctgtggggcttgggccaccttgcttggtctcggcagcgtttggcaaggggcctgtgccatccttgatcctcagggggcttctaggccccaggatctgctccctgcctgccttactggtcacacacatggcctggtctctgtctgttcttccggccctgccctctgaaccctactttctgaacccggccctccaggcttcaccctctctgatgccttcactgtctcaggatctttaaaccccactgtcttgttggcgattccagagtcccgagtctgccctgaccccagcctttagggttcagcagctcatgacccgctggtctgggtggcctcgtctggacggccacagcactcctgctggccccctgcccttccctgccctgtcctcccagcagccaggcccgtgaagcctggagaagccccttctcctctccggaggcagtgtcctcagctgcccctgagcccctcgtggttgtggtttcttctcagacacggtggggtccccaatgccttcctggggcttgccaggcgctgcccttgccctcaggtctgtgccaccttcacctgcagctccactcagcctgtcctgactgcctgaaaagccagcggctcccctatgcgcggttccctcagcagctttgcattgtctcgcgagcatgtcgccgtcaccgacgtgttcaatttcccgtttgcttattgccttgctagactttgagactgaaagttccagggagacagttttgtgtttgctcattactgactcttcggtactcgggatgaggcctggcgcacagcaggcgaatgaaggggccagtgacccacaagcccagagcgggggtgaaggctggggcagggtgggcccaggctgacctgtgctgcgtccccctagccacttccacctggaccactgcggggcactcccctacttcagcgagatggtgggctacgacggccccatctacatgactcaccccacccaggccatctgccccatcttgctggaggactaccgcaagatcgccgtagacaagaagggcgaggccaacttcttcacctcccagatgatcaaagactgcatgaagaaggtggtggctgtccacctccaccagacggtccaggtagatgatgagctggagatcaaggcctactatgcaggccacgtgctgggggcagccatgttccagattaaagtgggctcagagtctgtggtctacacgggtgattataacatgaccccagaccgacacttaggagctgcctggattgacaagtgccgccccaacctgctcatcacagagtccacgtacgccacgaccatccgtgactccaagcgctgccgggagcgagacttcctgaagaaagtccacgagaccgtggagcgtggtgggaaggtgctgatacctgtgttcgcgctgggccgcgcccaggagctctgcatcctcctggagaccttctgggagcgcatgaacctgaaggtgcccatctacttctccacggggctgaccgagaaggccaaccactactacaagctgttcatcccctggaccaaccagaagatccgcaagacttttgtgcagaggaacatgtttgagttcaagcacatcaaggccttcgaccgggcttttgctgacaacccaggaccgatggttgtgtttgccacgccaggaatgctgcacgctgggcagtccctgcagatcttccggaaatgggccggaaacgaaaagaacatggtcatcatgcccggctactgcgtgcagggcaccgtcggccacaagatcctcagcgggcagcggaagctcgagatggaggggcggcaggtgctggaggtcaagatgcaggtggagtacatgtcattcagcgcacacgcggacgccaagggcatcatgcagctggtgggccaggcagagccggagagcgtgctgctggtgcatggcgaggccaagaagatggagttcctgaagcagaagatcgagcaggagctccgggtcaactgctacatgccggccaatggcgagacggtgacgctgcccacaagccccagcatccccgtaggcatctcgctggggctgctgaagcgggagatggcgcaggggctgctccctgaggccaagaagcctcggctcctgcacggcaccctgatcatgaaggacagcaacttccggctggtgtcctcagagcaagccctcaaagagctgggtctggctgagcaccagctgcgcttcacctgccgcgtgcacctgcatgacacacgcaaggagcaggagacggcattgcgcgtctacagccacctcaagagcccttctgaggacccaggcaccaaggtgctgctggtctcctggacctaccaggacgaggagctggggagcttcctcacatctctgctgaagaagggcctcccccaggcccccagctgaggccggcaactcacccagccgccacctctgccctctcccagctggacagaccctgggcctgcacttcaggactgtgggtgccctgggtgaacagaccctgcaggtcccatccctggggacagaggccttgtgtcacctgcctgcccaggcagctgtttgcagctgaagaaacaaactggtctccaggctgtcttgcctttattcctggttagggcaggtggtcctagacagcagtttccagtaaaagctgaacaaaaga

SEQ ID NO: 356454 - DNA, 4859 bp, Homo sapiens
accggaagttgcagcgaggtggttgcgcctgcgcagtgcatcaccgcaggcgggcctcgcgggtccgggagcgcggcggagacgatgcctgagatcagagtcacgcccttgggggccggccaggacgtgggccgaagctgcatcctggtctccattgcgggcaagaatgtcatgctggactgtggaatgcacatgggcttcaatgacgacgtgagtcccttgggcaggaggcccagaggctgggagagccggccatccacagctggaccctgggcctcagagccgggacagtggggtggtgggcagcagtggttgtgcttggatggctgcaccctgtggggagcagggatgggtgggcctggccgaggtgagcccctgcatggtggggtccccctgtgctggcgctgagccccagccccggggtcctgtaggctggactccgtgagaccctgggctcagcttccagctcacatctgtcagtgaggttgggggtaacctcggcccctccggatgctgtgagcagccaggggtcctggtgccacctgcgggatgggagtgcccagcctgagtctgcacatagaaccccccttcctgggggcccctccctggggcatgggtggccccagatgctgcctggagaccactgtgcaacctgaaacccccacatccttcctagcgacgcttccctgacttctcctacatcacccagaacggccgcctaacagacttcctggactgtgtgatcattaggtgggttcctgttgggggccttgagggtcccatgtctgtgcctgtggggcttgggccaccttgcttggtctcggcagcgtttggcaaggggcctgtgccatccttgatcctcagggggcttctaggccccaggatctgctccctgcctgccttactggtcacacacatggcctggtctctgtctgttcttccggccctgccctctgaaccctactttctgaacccggccctccaggcttcaccctctctgatgccttcactgtctcaggatctttaaaccccactgtcttgttggcgattccagagtcccgagtctgccctgaccccagcctttagggttcagcagctcatgacccgctggtctgggtggcctcgtctggacggccacagcactcctgctggccccctgcccttccctgccctgtcctcccagcagccaggcccgtgaagcctggagaagccccttctcctctccggaggcagtgtcctcagctgcccctgagcccctcgtggttgtggtttcttctcagacacggtggggtccccaatgccttcctggggcttgccaggcgctgcccttgccctcaggtctgtgccaccttcacctgcagctccactcagcctgtcctgactgcctgaaaagccagcggctcccctatgcgcggttccctcagcagctttgcattgtctcgcgagcatgtcgccgtcaccgacgtgttcaatttcccgtttgcttattgccttgctagactttgagactgaaagttccagggagacagttttgtgtttgctcattactgactcttcggtactcgggatgaggcctggcgcacagcaggcgaatgaaggggccagtgacccacaagcccagagcgggggtgaaggctggggcagggtgggcccaggctgacctgtgctgcgtccccctagccacttccacctggaccactgcggggcactcccctacttcagcgagatggtgggctacgacggccccatctacatgactcaccccacccaggccatctgccccatcttgctggaggactaccgcaagatcgccgtagacaagaagggcgaggccaacttcttcacctcccagatgatcaaagactgcatgaagaaggtggtggctgtccacctccaccagacggtccagaggtcaggttcccagggccacagctggcacagtcactgcccacccccacaccaaccatgccctccgcccgttctacacagtttctggaaggctggggcctcagggtgagcccaccccacctcactcttgcgtccagcaccgtggggacaccaggaggcgtcagcgcgaggatgcgggtcccagaccagactgggcgccgacccgggagagcacgtgcagggtgggggtatgcactggcttacgaacccaccaggctctgtccgagcggcattgaaatggccagagtgggacaggctggtgccctcagagcgcttggagcggccagagactcgctggagctcccggggtgttgccgggcagggaggcaggggctggaggggagatgggccagctctggagggtgcctggttctgggtgtgggtcagggaagaagtgaaggttaaatcagcgagtgacaggtgaaattccatttctgacaaagattatgggtttgtctgtgtctcactcgaatctctgggtattgcttttatatttcttgaaattatattaggtacctatgtattttggaacatttaattttctgattgaacttgtcaaaatgaagtatgtttatcttttttgttgtgaaactttaatttttttttttttttgacagtgtctcactttgttacccaggctggagtgtgatcttggctcactgcagcctcggcctcccgggttgaggtgatctcccacctcggcctcccaagtagctgggactacaagcatgtgcccatacgcccagctaatttattttggtattttttgtagagatgggtatgtgttgctaaggctctcgaactcctgggctgggctccagggatcctcccacctcagcctctcaaagtgctcggattacaggcatccactgcgcctggccaaaattttgtttttaaattagcctggcgtggtgggtgcgtgcctatagtcccagctatttgggaggcggaggtggaggcgggaggacgcttgagcccaggagtttgagtgagccatgattgcgccactgcagcctgggtgacagccccaccctgtctctcaattttatttattaatttttttttgagacacagtctcgctctgtcgcccaggctggagtgcagtggcgcgatctcggcttactgcaacctccgcctcccgggttcaagcagttctcctgcctcagcctcccgagtagctgggattacaggcgcacaccaccacatccggctaattttgtatttttagtagagacgggctttttccgtgttggtcaggctggtcttgaattcccaacctcagatgatctgcccaccttggtctccccaagtgctgatacctgtgttcgcgctgggccgcgcccaggagctctgcatcctcctggagaccttctgggagcgcatgaacctgaaggtgcccatctacttctccacggggctgaccgagaaggccaaccactactacaagctgttcatcccctggaccaaccagaagatccgcaagacttttgtgcagaggaacatgtttgagttcaagcacatcaaggccttcgaccgggcttttgctgacaacccaggaccgatggttgtgtttgccacgccaggaatgctgcacgctgggcagtccctgcagatcttccggaaatgggccggaaacgaaaagaacatggtcatcatgcccggctactgcgtgcagggcaccgtcggccacaagatcctcagcgggcagcggaagctcgagatggaggggcggcaggtggtgagtctcgaccccgcactgggctggcagggccgaggggcacctcctggtggtaaccactgtccacgccccgtggcctctgtagctggaggtcaagatgcaggtggagtacatgtcattcagcgcacacgcggacgccaagggcatcatgcagctggtgggccaggcagagccggagagcgtgctgctggtgcatggcgaggccaagaagatggagttcctgaagcagaagatcgagcaggagctccgtaggcagccgggcgggcggcgtggggcccacctcgggtcagcacgggcagcctgggctgaggctctctcttcccccggggtccaggggtcaactgctacatgccggccaatggcgagacggtgacgctgcccacaagccccagcatccccgtaggcatctcgctggggctgctgaagcgggagatggcgcaggggctgctccctgaggccaagaagcctcggctcctgcacggcaccctgatcatgaaggacagcgtgagtgccaggacggtctctggaggggggagggccgctgctgcgctcactgacctgtccctgccccacagaaacttccggctggtgtcctcagagcaagccctcaaagagctgggtctggctgagcaccagctgcgcttcacctgccgcgtgcacctgcatgacacacgcaaggagcaggagacggcattgcgcgtctacagccacctcaagagcgtcctgaaggaccactgtgtgcagcacctcccggacggctctgtgactgtggagtccgtcctcctccaggccgccgccccttctgaggacccaggcaccaaggtgctgctggtctcctggacctaccaggacgaggagctggggagcttcctcacatctctgctgaagaagggcctcccccaggcccccagctgaggccggcaactcacccagccgccacctctgccctctcccagctggacagaccctgggcctgcacttcaggactgtgggtgccctgggtgaacagaccctgcaggtcccatccctggggacagaggccttgtgtcacctgcctgcccaggcagctgtttgcagctgaagaaacaaactggtctccaggctgtcttgcctttattcctggttagggcaggtggtcctagacagcagtttccagtaaaagctgaacaaaaga

SEQ ID NO: 356455 - DNA, 992 bp, Homo sapiens
gttcgttcagctcggtacccctcctcagcagacgcagctcgagatggaggggcggcaggtgctggaggtcaagatgcaggtggagtacatgtcattcagcgcacacgcggacgccaagggcatcatgcagctggtgggccaggcagagccggagagcgtgctgctggtgcatggcgaggccaagaagatggagttcctgaagcagaagatcgagcaggagctccgggtcaactgctacatgccggccaatggcgagacggtgacgctgcccacaagccccagcatccccgtaggcatctcgctggggctgctgaagcgggagatggcgcaggggctgctccctgaggccaagaagcctcggctcctgcacggcaccctgatcatgaaggacagcaacttccggctggtgtcctcagagcaagccctcaaagagctgggtctggctgagcaccagctgcgcttcacctgccgcgtgcacctgcatgacacacgcaaggagcaggagacggcattgcgcgtctacagccacctcaagagcgtcctgaaggaccactgtgtgcagcacctcccggacggctctgtgactgtggagtccgtcctcctccaggccgccgccccttctgaggacccaggcaccaaggtgctgctggtctcctggacctaccaggacgaggagctggggagcttcctcacatctctgctgaagaagggcctcccccaggcccccagctgaggccggcaactcacccagccgccacctctgccctctcccagctggacagaccctgggcctgcacttcaggactgtgggtgccctgggtgaacagaccctgcaggtcccatccctggggacagaggccttgtgtcacctgcctgcccaggcagctgtttgcagctgaagaaacaaactggtctccaggctgtcttgcctttattcctggttagggcaggtggtcctagacagcagtttccagtaaaagctgaacaaaaga

SEQ ID NO: 356456 - DNA, 3119 bp, Homo sapiens
accggaagttgcagcgaggtggttgcgcctgcgcagtgcatcaccgcaggcgggcctcgcgggtccgggagcgcggcggagacgatgcctgagatcagagtcacgcccttgggggccggccaggacgtgggccgaagctgcatcctggtctccattgcgggcaagaatgtcatgctggactgtggaatgcacatgggcttcaatgacgacgtgagtcccttgggcaggaggcccagaggctgggagagccggccatccacagctggaccctgggcctcagagccgggacagtggggtggtgggcagcagtggttgtgcttggatggctgcaccctgtggggagcagggatgggtgggcctggccgaggtgagcccctgcatggtggggtccccctgtgctggcgctgagccccagccccggggtcctgtaggctggactccgtgagaccctgggctcagcttccagctcacatctgtcagtgaggttgggggtaacctcggcccctccggatgctgtgagcagccaggggtcctggtgccacctgcgggatgggagtgcccagcctgagtctgcacatagaaccccccttcctgggggcccctccctggggcatgggtggccccagatgctgcctggagaccactgtgcaacctgaaacccccacatccttcctagcgacgcttccctgacttctcctacatcacccagaacggccgcctaacagacttcctggactgtgtgatcattaggtgggttcctgttgggggccttgagggtcccatgtctgtgcctgtggggcttgggccaccttgcttggtctcggcagcgtttggcaaggggcctgtgccatccttgatcctcagggggcttctaggccccaggatctgctccctgcctgccttactggtcacacacatggcctggtctctgtctgttcttccggccctgccctctgaaccctactttctgaacccggccctccaggcttcaccctctctgatgccttcactgtctcaggatctttaaaccccactgtcttgttggcgattccagagtcccgagtctgccctgaccccagcctttagggttcagcagctcatgacccgctggtctgggtggcctcgtctggacggccacagcactcctgctggccccctgcccttccctgccctgtcctcccagcagccaggcccgtgaagcctggagaagccccttctcctctccggaggcagtgtcctcagctgcccctgagcccctcgtggttgtggtttcttctcagacacggtggggtccccaatgccttcctggggcttgccaggcgctgcccttgccctcaggtctgtgccaccttcacctgcagctccactcagcctgtcctgactgcctgaaaagccagcggctcccctatgcgcggttccctcagcagctttgcattgtctcgcgagcatgtcgccgtcaccgacgtgttcaatttcccgtttgcttattgccttgctagactttgagactgaaagttccagggagacagttttgtgtttgctcattactgactcttcggtactcgggatgaggcctggcgcacagcaggcgaatgaaggggccagtgacccacaagcccagagcgggggtgaaggctggggcagggtgggcccaggctgacctgtgctgcgtccccctagccacttccacctggaccactgcggggcactcccctacttcagcgagatggtgggctacgacggccccatctacatgactcaccccacccaggccatctgccccatcttgctggaggactaccgcaagatcgccgtagacaagaagggcgaggccaacttcttcacctcccagatgatcaaagactgcatgaagaaggtggtggctgtccacctccaccagacggtccaggtagatgatgagctggagatcaaggcctactatgcaggccacgtgctgggggcagccatgttccagattaaagtgggctcagagtctgtggtctacacgggtgattataacatgaccccagaccgacacttaggagctgcctggattgacaagtgccgccccaacctgctcatcacagagtccacgtacgccacgaccatccgtgactccaagcgctgccgggagcgagacttcctgaagaaagtccacgagaccgtggagcgtggtgggaaggtgctgatacctgtgttcgcgctgggccgcgcccaggagctctgcatcctcctggagaccttctgggagcgcatgaacctgaaggtgcccatctacttctccacggggctgaccgagaaggccaaccactactacaagctgttcatcccctggaccaaccagaagatccgcaagacttttgtgcagaggaacatgtttgagttcaagcacatcaaggccttcgaccgggcttttgctgacaacccaggaccgatggttgtgtttgccacgccaggaatgctgcacgctgggcagtccctgcagatcttccggaaatgggccggaaacgaaaagaacatggtcatcatgcccggctactgcgtgcagggcaccgtcggccacaagatcctcagcgggcagcggaagctcgagatggaggggcggcaggtgctggaggtcaagatgcaggtggagtacatgtcattcagcgcacacgcggacgccaagggcatcatgcagctggtgggccaggcagagccggagagcgtgctgctggtgcatggcgaggccaagaagatggagttcctgaagcagaagatcgagcaggagctccgggtcaactgctacatgccggccaatggcgagacggtgacgctgcccacaagccccagcatccccgtaggcatctcgctggggctgctgaagcgggagatggcgcagggctgtcctgggccagaagctcggtcctggcggaccctgtcatgaggaacagacttccgggtggtgtctcagagaagcctcagagctggtcgttgagacagtggttccctgcgggggctgttgccgcgggcgagggtgggtagcccaggttggggccggtgtgccccgcgtcggggggggcccgggggcttttggagcagggggtgtgccgggggtcttgggccgccggggcccgcgg

SEQ ID NO: 356457 - DNA, 3737 bp, Homo sapiens
accggaagttgcagcgaggtggttgcgcctgcgcagtgcatcaccgcaggcgggcctcgcgggtccgggagcgcggcggagacgatgcctgagatcagagtcacgcccttgggggccggccaggacgtgggccgaagctgcatcctggtctccattgcgggcaagaatgtcatgctggactgtggaatgcacatgggcttcaatgacgacgtgagtcccttgggcaggaggcccagaggctgggagagccggccatccacagctggaccctgggcctcagagccgggacagtggggtggtgggcagcagtggttgtgcttggatggctgcaccctgtggggagcagggatgggtgggcctggccgaggtgagcccctgcatggtggggtccccctgtgctggcgctgagccccagccccggggtcctgtaggctggactccgtgagaccctgggctcagcttccagctcacatctgtcagtgaggttgggggtaacctcggcccctccggatgctgtgagcagccaggggtcctggtgccacctgcgggatgggagtgcccagcctgagtctgcacatagaaccccccttcctgggggcccctccctggggcatgggtggccccagatgctgcctggagaccactgtgcaacctgaaacccccacatccttcctagcgacgcttccctgacttctcctacatcacccagaacggccgcctaacagacttcctggactgtgtgatcattaggtgggttcctgttgggggccttgagggtcccatgtctgtgcctgtggggcttgggccaccttgcttggtctcggcagcgtttggcaaggggcctgtgccatccttgatcctcagggggcttctaggccccaggatctgctccctgcctgccttactggtcacacacatggcctggtctctgtctgttcttccggccctgccctctgaaccctactttctgaacccggccctccaggcttcaccctctctgatgccttcactgtctcaggatctttaaaccccactgtcttgttggcgattccagagtcccgagtctgccctgaccccagcctttagggttcagcagctcatgacccgctggtctgggtggcctcgtctggacggccacagcactcctgctggccccctgcccttccctgccctgtcctcccagcagccaggcccgtgaagcctggagaagccccttctcctctccggaggcagtgtcctcagctgcccctgagcccctcgtggttgtggtttcttctcagacacggtggggtccccaatgccttcctggggcttgccaggcgctgcccttgccctcaggtctgtgccaccttcacctgcagctccactcagcctgtcctgactgcctgaaaagccagcggctcccctatgcgcggttccctcagcagctttgcattgtctcgcgagcatgtcgccgtcaccgacgtgttcaatttcccgtttgcttattgccttgctagactttgagactgaaagttccagggagacagttttgtgtttgctcattactgactcttcggtactcgggatgaggcctggcgcacagcaggcgaatgaaggggccagtgacccacaagcccagagcgggggtgaaggctggggcagggtgggcccaggctgacctgtgctgcgtccccctagccacttccacctggaccactgcggggcactcccctacttcagcgagatggtgggctacgacggccccatctacatgactcaccccacccaggccatctgccccatcttgctggaggactaccgcaagatcgccgtagacaagaagggcgaggccaacttcttcacctcccagatgatcaaagactgcatgaagaaggtggtggctgtccacctccaccagacggtccagaggtcaggttcccagggccacagctggcacagtcactgcccacccccacaccaaccatgccctccgcccgttctacacagtttctggaaggctggggcctcagggtgagcccaccccacctcactcttgcgtccagcaccgtggggacaccaggaggcgtcagcgcgaggatgcgggtcccagaccagactgggcgccgacccgggagagcacgtgcagggtgggggtatgcactggcttacgaacccaccaggctctgtccgagcggcattgaaatggccagagtgggacaggctggtgccctcagagcgcttggagcggccagagactcgctggagctcccggggtgttgccgggcagggaggcaggggctggaggggagatgggccagctctggagggtgcctggttctgggtgtgggtcagggaagaagtgaaggttaaatcagcgagtgacaggtgaaattccatttctgacaaagattatgggtttgtctgtgtctcactcgaatctctgggtattgcttttatatttcttgaaattatattaggtacctatgtattttggaacatttaattttctgattgaacttgtcaaaatgaagtatgtttatcttttttgttgtgaaactttaatttttttttttttttgacagtgtctcactttgttacccaggctggagtgtgatcttggctcactgcagcctcggcctcccgggttgaggtgatctcccacctcggcctcccaagtagctgggactacaagcatgtgcccatacgcccagctaatttattttggtattttttgtagagatgggtatgtgttgctaaggctctcgaactcctgggctgggctccagggatcctcccacctcagcctctcaaagtgctcggattacaggcatccactgcgcctggccaaaattttgtttttaaattagcctggcgtggtgggtgcgtgcctatagtcccagctatttgggaggcggaggtggaggcgggaggacgcttgagcccaggagtttgagtgagccatgattgcgccactgcagcctgggtgacagccccaccctgtctctcaattttatttattaatttttttttgagacacagtctcgctctgtcgcccaggctggagtgcagtggcgcgatctcggcttactgcaacctccgcctcccgggttcaagcagttctcctgcctcagcctcccgagtagctgggattacaggcgcacaccaccacatccggctaattttgtatttttagtagagacgggctttttccgtgttggtcaggctggtcttgaattcccaacctcagatgatctgcccaccttggtctccccaagtgctgggattaaaggtgtgagccactgtgcccagcccagtatttttttgtttgtttttaccgagatggagtcccgccccattgcccaggctagagtgcagtggcgtgatctcagtacactgcaacctccacttcccaggttcaagcgattctcctgcctcagcctcctgagcagttgggattacaggcacgcacttccacacctggcttacttttgtatttttagtagagacggggtttcaccatgttggccaggctggtctccaattcctgaccccaagggatccaccttaggcctggccgccaacattctgaaccttgtcttttctctgtcatgtattcaaagtccacgctggaaactccaatttcaggtcccttcagttttttgtccgttgtctttcgttctttgtccacgttgcccgtcccttgtgaactggatgctgtgtgtgagcaccagggactgaaaagctccagtgcagtg

SEQ ID NO: 356458 - DNA, 3165 bp, Homo sapiens
accggaagttgcagcgaggtggttgcgcctgcgcagtgcatcaccgcaggcgggcctcgcgggtccgggagcgcggcggagacgatgcctgagatcagagtcacgcccttgggggccggccaggacgtgggccgaagctgcatcctggtctccattgcgggcaagaatgtcatgctggactgtggaatgcacatgggcttcaatgacgacgtgagtcccttgggcaggaggcccagaggctgggagagccggccatccacagctggaccctgggcctcagagccgggacagtggggtggtgggcagcagtggttgtgcttggatggctgcaccctgtggggagcagggatgggtgggcctggccgaggtgagcccctgcatggtggggtccccctgtgctggcgctgagccccagccccggggtcctgtaggctggactccgtgagaccctgggctcagcttccagctcacatctgtcagtgaggttgggggtaacctcggcccctccggatgctgtgagcagccaggggtcctggtgccacctgcgggatgggagtgcccagcctgagtctgcacatagaaccccccttcctgggggcccctccctggggcatgggtggccccagatgctgcctggagaccactgtgcaacctgaaacccccacatccttcctagcgacgcttccctgacttctcctacatcacccagaacggccgcctaacagacttcctggactgtgtgatcattaggtgggttcctgttgggggccttgagggtcccatgtctgtgcctgtggggcttgggccaccttgcttggtctcggcagcgtttggcaaggggcctgtgccatccttgatcctcagggggcttctaggccccaggatctgctccctgcctgccttactggtcacacacatggcctggtctctgtctgttcttccggccctgccctctgaaccctactttctgaacccggccctccaggcttcaccctctctgatgccttcactgtctcaggatctttaaaccccactgtcttgttggcgattccagagtcccgagtctgccctgaccccagcctttagggttcagcagctcatgacccgctggtctgggtggcctcgtctggacggccacagcactcctgctggccccctgcccttccctgccctgtcctcccagcagccaggcccgtgaagcctggagaagccccttctcctctccggaggcagtgtcctcagctgcccctgagcccctcgtggttgtggtttcttctcagacacggtggggtccccaatgccttcctggggcttgccaggcgctgcccttgccctcaggtctgtgccaccttcacctgcagctccactcagcctgtcctgactgcctgaaaagccagcggctcccctatgcgcggttccctcagcagctttgcattgtctcgcgagcatgtcgccgtcaccgacgtgttcaatttcccgtttgcttattgccttgctagactttgagactgaaagttccagggagacagttttgtgtttgctcattactgactcttcggtactcgggatgaggcctggcgcacagcaggcgaatgaaggggccagtgacccacaagcccagagcgggggtgaaggctggggcagggtgggcccaggctgacctgtgctgcgtccccctagccacttccacctggaccactgcggggcactcccctacttcagcgagatggtgggctacgacggccccatctacatgactcaccccacccaggccatctgccccatcttgctggaggactaccgcaagatcgccgtagacaagaagggcgaggccaacttcttcacctcccagatgatcaaagactgcatgaagaaggtggtggctgtccacctccaccagacggtccagaggtcaggttcccagggccacagctggcacagtcactgcccacccccacaccaaccatgccctccgcccgttctacacagtttctggaaggctggggcctcagggtgagcccaccccacctcactcttgcgtccagcaccgtggggacaccaggaggcgtcagcgcgaggatgcgggtcccagaccagactgggcgccgacccgggagagcacgtgcagggtgggggtatgcactggcttacgaacccaccaggctctgtccgagcggcattgaaatggccagagtgggacaggctggtgccctcagagcgcttggagcggccagagactcgctggagctcccggggtgttgccgggcagggaggcaggggctggaggggagatgggccagctctggagggtgcctggttctgggtgtgggtcagggaagaagtgaaggttaaatcagcgagtgacaggtgaaattccatttctgacaaagattatgggtttgtctgtgtctcactcgaatctctgggtattgcttttatatttcttgaaattatattaggtacctatgtattttggaacatttaattttctgattgaacttgtcaaaatgaagtatgtttatcttttttgttgtgaaactttaatttttttttttttttgacagtgtctcactttgttacccaggctggagtgtgatcttggctcactgcagcctcggcctcccgggttgaggtgatctcccacctcggcctcccaatagctgggattacaggcgcccaccaccatgcccagctaacttttgtatttttagtagagacagggtttcaccgtgtcggccaggatggtcttgaactcctgacttcagatgatctgcccaccttggtctccccaagtgctgatacctgtgttcgcgctgggccgcgcccaggagctctgcatcctcctggagaccttctggtaggtgccgccaggacggctctttaaggagcccctggcccggcctgaacacagtccagttggtgggcagccctgtccagcgtagcggtggcatcttggccctgcttgctgctgtcctggggggccgctcgtgtgctgtgtgaccccaggaagcctgtgacatcccgtcagcgccaccgtgtgcggctcttgtaggggttcctggttctccgctgagcccggctgctgcagggcttaatgggacaagtggtcgcgactggactcaacctggcccgtgcgtgggctgtgcagacacgggtgttgggggt

SEQ ID NO: 356459 - DNA, 1458 bp, Homo sapiens
tcccttttcctcttgtttgctttctccttcctttctctttgttgtttatgctccttcttgcttcctcctctctttctcgacttgtgttctttctccttctgtccttctctgctttcccttcttttcttctctctccctgtctgtctgttttctactttgtcctctccttcttttctctctctctttgttttttttctttttctttcttcgcttctgtcggtcgtgttctttgtgtttttttctttttttctttctcttccctggtttctcttcgtttccttgtctttgtttcttctttctcttcttttggtcgttttcttttattcttctttttggtttgcttttttctgcttcttttgccttcttttcgcctttccctccttaccgtctgttctgttcgccttccttttctgttctttctggcgttcgttcgcttctttctgctccttgctttcttgctttttttgttcgtcttgtttctctgtttcttcttttctttcgcttttctcctgttttgctctgcttgtctccccctctgtgtataaaaaattgtgttctagaagtaatacaaatcccgcgttagcgccgcaagacatttttctcaccgcgttcctgcacaatatccgccggcgtgtggtgtgataaccccccgattaacgcacccttagaaaattttatatatatttttacccctatagaagagcccttaaattctctcttaatgtataattgtttcccccacatattttcccccccccaccaaaataaaaggttctcctttccccaaaattctccccccttaccccttttttcccccactcttccaaccttttttaaaccccggcgccccactgtcctcggtcgcttatatataatataccacgcctccccatatatgggggccccccttgtttcacacaaaaaactgtggtgtgcgcgcgcgttaagatgtgtggtgccccccccggggagaattttttggccccccccccccttttttttttttttttttttttttttttttttttttttttttttgtctccaggctgtcttgcctttattcctggttagggcaggtggtcctagacagcagtttccagtaaaagctgaacaaaagactacttggtactctcttcttggtgtacatggctgtgtcctgcactgtgccccatcccgcctgggacagagacgggcatccagggtgctgggacccgggcagggaggctactgtggagaccaggcagcagtgctgtgggccccaagcagctgtgactgccctggcttgaccagcacagggttgggcctggtgtggcctaactttggcttgagtgtccagggtcatccgtggctcccgaactgtggcccctgcagggtgcaggaggcagcacctcgaggttcccgtacagcactgacttgaggaataagccgtgggctggggctacacgtgtctggtgctt

SEQ ID NO: 356460 - DNA, 2146 bp, Homo sapiens
accggaagttgcagcgaggtggttgcgcctgcgcagtgcatcaccgcaggcgggcctcgcgggtccgggagcgcggcggagacgatgcctgagatcagagtcacgcccttgggggccggccaggacgtgggccgaagctgcatcctggtctccattgcgggcaagaatgtcatgctggactgtggaatgcacatgggcttcaatgacgaccgacgcttccctgacttctcctacatcacccagaacggccgcctaacagacttcctggactgtgtgatcattagccacttccacctggaccactgcggggcactcccctacttcagcgagatggtgggctacgacggccccatctacatgactcaccccacccaggccatctgccccatcttgctggaggactaccgcaagatcgccgtagacaagaagggcgaggccaacttcttcacctcccagatgatcaaagactgcatgaagaaggtggtggctgtccacctccaccagacggtccaggtagatgatgagctggagatcaaggcctactatgcaggccacgtgctgggggcagccatgttccagattaaagtgggctcagagtctgtggtctacacgggtgattataacatgaccccagaccgacacttaggagctgcctggattgacaagtgccgccccaacctgctcatcacagagtccacgtacgccacgaccatccgtgactccaagcgctgccgggagcgagacttcctgaagaaagtccacgagaccgtggagcgtggtgggaaggtgctgatacctgtgttcgcgctgggccgcgcccaggagctctgcatcctcctggagaccttctgggagcgcatgaacctgaaggtgcccatctacttctccacggggctgaccgagaaggccaaccactactacaagctgttcatcccctggaccaaccagaagatccgcaagacttttgtgcagaggaacatgtttgagttcaagcacatcaaggccttcgaccgggcttttgctgacaacccaggaccgatggttgtgtttgccacgccaggaatgctgcacgctgggcagtccctgcagatcttccggaaatgggccggaaacgaaaagaacatggtcatcatgcccggctactgcgtgcagggcaccgtcggccacaagatcctcagcgggcagcggaagctcgagatggaggggcggcaggtgctggaggtcaagatgcaggtggagtacatgtcattcagcgcacacgcggacgccaagggcatcatgcagctggtgggccaggcagagccggagagcgtgctgctggtgcatggcgaggccaagaagatggagttcctgaagcagaagatcgagcaggagctccgggtcaactgctacatgccggccaatggcgagacggtgacgctgcccacaagccccagcatccccgtaggcatctcgctggggctgctgaagcgggagatggcgcaggggctgctccctgaggccaagaagcctcggctcctgcacggcaccctgatcatgaaggacagcaacttccggctggtgtcctcagagcaagccctcaaagagctgggtctggctgagcaccagctgcgcttcacctgccgcgtgcacctgcatgacacacgcaaggagcaggagacggcattgcgcgtctacagccacctcaagagcgtcctgaaggaccactgtgtgcagcacctcccggacggctctgtgactgtggagtccgtcctcctccaggccgccgccccttctgaggacccaggcaccaaggtgctgctggtctcctggacctaccaggacgaggagctggggagcttcctcacatctctgctgaagaagggcctcccccaggcccccagctgaggccggcaactcacccagccgccacctctgccctctcccagctggacagaccctgggcctgcacttcaggactgtgggtgccctgggtgaacagaccctgcaggtcccatccctggggacagaggccttgtgtcacctgcctgcccaggcagctgtttgcagctgaagaaacaaactggtctccaggctgtcttgcctttattcctggttagggcaggtggtcctagacagcagtttccagtaaaagctgaacaaaaga

SEQ ID NO: 356461 - DNA, 1525 bp, Homo sapiens
accggaagttgcagcgaggtggttgcgcctgcgcagtgcatcaccgcaggcgggcctcgcgggtccgggagcgcggcggagacgatgcctgagatcagagtcacgcccttgggggccggccaggacgtgggccgaagctgcatcctggtctccattgcgggcaagaatgtcatgctggactgtggaatgcacatgggcttcaatgacgaccgacgcttccctgacttctcctacatcacccagaacggccgcctaacagacttcctggactgtgtgatcattagccacttccacctggaccactgcggggcactcccctacttcagcgagatggtgggctacgacggccccatctacatgactcaccccacccaggccatctgccccatcttgctggaggactaccgcaagatcgccgtagacaagaagggcgaggccaacttcttcacctcccagatgatcaaagactgcatcctcctggagaccttctgggagcgcatgaacctgaaggtgcccatctacttctccacggggctgaccgagaaggccaaccactactacaagctgttcatcccctggaccaaccagaagatccgcaagacttttgtgcagaggaacatgtttgagttcaagcacatcaaggccttcgaccgggcttttgctgacaacccaggaccgatggttgtgtttgccacgccaggaatgctgcacgctgggcagtccctgcagatcttccggaaatgggccggaaacgaaaagaacatggtcatcatgcccggctactgcgtgcagggcaccgtcggccacaagatcctcagcgggcagcggaagctcgagatggaggggcggcaggtgctggaggtcaagatgcaggtggagtacatgtcattcagcgcacacgcggacgccaagggcatcatgcagctgaacttccggctggtgtcctcagagcaagccctcaaagagctgggtctggctgagcaccagctgcgcttcacctgccgcgtgcacctgcatgacacacgcaaggagcaggagacggcattgcgcgtctacagccacctcaagagcgtcctgaaggaccactgtgtgcagcacctcccggacggctctgtgactgtggagtccgtcctcctccaggccgccgccccttctgaggacccaggcaccaaggtgctgctggtctcctggacctaccaggacgaggagctggggagcttcctcacatctctgctgaagaagggcctcccccaggcccccagctgaggccggcaactcacccagccgccacctctgccctctcccagctggacagaccctgggcctgcacttcaggactgtgggtgccctgggtgaacagaccctgcaggtcccatccctggggacagaggccttgtgtcacctgcctgcccaggcagctgtttgcagctgaagaaacaaactggtctccaggctgtcttgcctttattcctggttagggcaggtggtcctagacagcagtttccagtaaaagctgaacaaaaga

SEQ ID NO: 356462 - DNA, 3623 bp, Homo sapiens
accggaagttgcagcgaggtggttgcgcctgcgcagtgcatcaccgcaggcgggcctcgcgggtccgggagcgcggcggagacgatgcctgagatcagagtcacgcccttgggggccggccaggacgtgggccgaagctgcatcctggtctccattgcgggcaagaatgtcatgctggactgtggaatgcacatgggcttcaatgacgacgtgagtcccttgggcaggaggcccagaggctgggagagccggccatccacagctggaccctgggcctcagagccgggacagtggggtggtgggcagcagtggttgtgcttggatggctgcaccctgtggggagcagggatgggtgggcctggccgaggtgagcccctgcatggtggggtccccctgtgctggcgctgagccccagccccggggtcctgtaggctggactccgtgagaccctgggctcagcttccagctcacatctgtcagtgaggttgggggtaacctcggcccctccggatgctgtgagcagccaggggtcctggtgccacctgcgggatgggagtgcccagcctgagtctgcacatagaaccccccttcctgggggcccctccctggggcatgggtggccccagatgctgcctggagaccactgtgcaacctgaaacccccacatccttcctagcgacgcttccctgacttctcctacatcacccagaacggccgcctaacagacttcctggactgtgtgatcattaggtgggttcctgttgggggccttgagggtcccatgtctgtgcctgtggggcttgggccaccttgcttggtctcggcagcgtttggcaaggggcctgtgccatccttgatcctcagggggcttctaggccccaggatctgctccctgcctgccttactggtcacacacatggcctggtctctgtctgttcttccggccctgccctctgaaccctactttctgaacccggccctccaggcttcaccctctctgatgccttcactgtctcaggatctttaaaccccactgtcttgttggcgattccagagtcccgagtctgccctgaccccagcctttagggttcagcagctcatgacccgctggtctgggtggcctcgtctggacggccacagcactcctgctggccccctgcccttccctgccctgtcctcccagcagccaggcccgtgaagcctggagaagccccttctcctctccggaggcagtgtcctcagctgcccctgagcccctcgtggttgtggtttcttctcagacacggtggggtccccaatgccttcctggggcttgccaggcgctgcccttgccctcaggtctgtgccaccttcacctgcagctccactcagcctgtcctgactgcctgaaaagccagcggctcccctatgcgcggttccctcagcagctttgcattgtctcgcgagcatgtcgccgtcaccgacgtgttcaatttcccgtttgcttattgccttgctagactttgagactgaaagttccagggagacagttttgtgtttgctcattactgactcttcggtactcgggatgaggcctggcgcacagcaggcgaatgaaggggccagtgacccacaagcccagagcgggggtgaaggctggggcagggtgggcccaggctgacctgtgctgcgtccccctagccacttccacctggaccactgcggggcactcccctacttcagcgagatggtgggctacgacggccccatctacatgactcaccccacccaggccatctgccccatcttgctggaggactaccgcaagatcgccgtagacaagaagggcgaggccaacttcttcacctcccagatgatcaaagactgcatgaagaaggtggtggctgtccacctccaccagacggtccaggtagatgatgagctggagatcaaggcctactatgcaggccacgtgctgggggcagccatgttccagattaaagtgggctcagagtctgtggtctacacggtcagtggaagggcttgaggcttgggaggggctgctggggtgggaggcaccctcctcatggcatccttgatcgttcaccagggtgattataacatgaccccagaccgacacttaggagctgcctggattgacaagtgccgccccaacctgctcatcacagagtccacgtacgccacgaccatccgtgactccaagcgctgccgggagcgagacttcctgaagaaagtccacgagaccgtggagcgtggtgggaaggtgctgatacctgtgttcgcgctgggccgcgcccaggagctctgcatcctcctggagaccttctgggagcgcatgaacctgaaggtgcccatctacttctccacggggctgaccgagaaggccaaccactactacaagctgttcatcccctggaccaaccagaagatccgcaagacttttgtgcagaggaacatgtttgagttcaagcacatcaaggccttcgaccgggcttttgctgacaacccaggaccgatggttgtgtttgccacgccaggaatgctgcacgctgggcagtccctgcagatcttccggaaatgggccggaaacgaaaagaacatggtcatcatgcccggctactgcgtgcagggcaccgtcggccacaagatcctcagcgggcagcggaagctcgagatggaggggcggcaggtgctggaggtcaagatgcaggtggagtacatgtcattcagcgcacacgcggacgccaagggcatcatgcagctggtgggccaggcagagccggagagcgtgctgctggtgcatggcgaggccaagaagatggagttcctgaagcagaagatcgagcaggagctccgggtcaactgctacatgccggccaatggcgagacggtgacgctgcccacaagccccagcatccccgtaggcatctcgctggggctgctgaagcgggagatggcgcaggggctgctccctgaggccaagaagcctcggctcctgcacggcaccctgatcatgaaggacagcaacttccggctggtgtcctcagagcaagccctcaaagagctgggtctggctgagcaccagctgcgcttcacctgccgcgtgcacctgcatgacacacgcaaggagcaggagacggcattgcgcgtctacagccacctcaagagcgtcctgaaggaccactgtgtgcagcacctcccggacggctctgtgactgtggagtccgtcctcctccaggccgccgccccttctgaggacccaggcaccaaggtgctgctggtctcctggacctaccaggacgaggagctggggagcttcctcacatctctgctgaagaagggcctcccccaggcccccagctgaggccggcaactcacccagccgccacctctgccctctcccagctggacagaccctgggcctgcacttcaggactgtgggtgccctgggtgaacagaccctgcaggtcccatccctggggacagaggccttgtgtcacctgcctgcccaggcagctgtttgcagctgaagaaacaaactggtctccaggctgtcttgcctttattcctggttagggcaggtggtcctagacagcagtttccagtaaaagctgaacaaaaga

SEQ ID NO: 356463 - DNA, 3507 bp, Homo sapiens
accggaagttgcagcgaggtggttgcgcctgcgcagtgcatcaccgcaggcgggcctcgcgggtccgggagcgcggcggagacgatgcctgagatcagagtcacgcccttgggggccggccaggacgtgggccgaagctgcatcctggtctccattgcgggcaagaatgtcatgctggactgtggaatgcacatgggcttcaatgacgacgtgagtcccttgggcaggaggcccagaggctgggagagccggccatccacagctggaccctgggcctcagagccgggacagtggggtggtgggcagcagtggttgtgcttggatggctgcaccctgtggggagcagggatgggtgggcctggccgaggtgagcccctgcatggtggggtccccctgtgctggcgctgagccccagccccggggtcctgtaggctggactccgtgagaccctgggctcagcttccagctcacatctgtcagtgaggttgggggtaacctcggcccctccggatgctgtgagcagccaggggtcctggtgccacctgcgggatgggagtgcccagcctgagtctgcacatagaaccccccttcctgggggcccctccctggggcatgggtggccccagatgctgcctggagaccactgtgcaacctgaaacccccacatccttcctagcgacgcttccctgacttctcctacatcacccagaacggccgcctaacagacttcctggactgtgtgatcattaggtgggttcctgttgggggccttgagggtcccatgtctgtgcctgtggggcttgggccaccttgcttggtctcggcagcgtttggcaaggggcctgtgccatccttgatcctcagggggcttctaggccccaggatctgctccctgcctgccttactggtcacacacatggcctggtctctgtctgttcttccggccctgccctctgaaccctactttctgaacccggccctccaggcttcaccctctctgatgccttcactgtctcaggatctttaaaccccactgtcttgttggcgattccagagtcccgagtctgccctgaccccagcctttagggttcagcagctcatgacccgctggtctgggtggcctcgtctggacggccacagcactcctgctggccccctgcccttccctgccctgtcctcccagcagccaggcccgtgaagcctggagaagccccttctcctctccggaggcagtgtcctcagctgcccctgagcccctcgtggttgtggtttcttctcagacacggtggggtccccaatgccttcctggggcttgccaggcgctgcccttgccctcaggtctgtgccaccttcacctgcagctccactcagcctgtcctgactgcctgaaaagccagcggctcccctatgcgcggttccctcagcagctttgcattgtctcgcgagcatgtcgccgtcaccgacgtgttcaatttcccgtttgcttattgccttgctagactttgagactgaaagttccagggagacagttttgtgtttgctcattactgactcttcggtactcgggatgaggcctggcgcacagcaggcgaatgaaggggccagtgacccacaagcccagagcgggggtgaaggctggggcagggtgggcccaggctgacctgtgctgcgtccccctagccacttccacctggaccactgcggggcactcccctacttcagcgagatggtgggctacgacggccccatctacatgactcaccccacccaggccatctgccccatcttgctggaggactaccgcaagatcgccgtagacaagaagggcgaggccaacttcttcacctcccagatgatcaaagactgcatgaagaaggtggtggctgtccacctccaccagacggtccaggtagatgatgagctggagatcaaggcctactatgcaggccacgtgctgggggcagccatgttccagattaaagtgggctcagagtctgtggtctacacgagctgcctggattgacaagtgccgccccaacctgctcatcacagagtccacgtacgccacgaccatccgtgactccaagcgctgccgggagcgagacttcctgaagaaagtccacgagaccgtggagcgtggtgggaaggtgctgatacctgtgttcgcgctgggccgcgcccaggagctctgcatcctcctggagaccttctgggagcgcatgaacctgaaggtgcccatctacttctccacggggctgaccgagaaggccaaccactactacaagctgttcatcccctggaccaaccagaagatccgcaagacttttgtgcagaggaacatgtttgagttcaagcacatcaaggccttcgaccgggcttttgctgacaacccaggaccgatggttgtgtttgccacgccaggaatgctgcacgctgggcagtccctgcagatcttccggaaatgggccggaaacgaaaagaacatggtcatcatgcccggctactgcgtgcagggcaccgtcggccacaagatcctcagcgggcagcggaagctcgagatggaggggcggcaggtgctggaggtcaagatgcaggtggagtacatgtcattcagcgcacacgcggacgccaagggcatcatgcagctggtgggccaggcagagccggagagcgtgctgctggtgcatggcgaggccaagaagatggagttcctgaagcagaagatcgagcaggagctccgggtcaactgctacatgccggccaatggcgagacggtgacgctgcccacaagccccagcatccccgtaggcatctcgctggggctgctgaagcgggagatggcgcaggggctgctccctgaggccaagaagcctcggctcctgcacggcaccctgatcatgaaggacagcaacttccggctggtgtcctcagagcaagccctcaaagagctgggtctggctgagcaccagctgcgcttcacctgccgcgtgcacctgcatgacacacgcaaggagcaggagacggcattgcgcgtctacagccacctcaagagcgtcctgaaggaccactgtgtgcagcacctcccggacggctctgtgactgtggagtccgtcctcctccaggccgccgccccttctgaggacccaggcaccaaggtgctgctggtctcctggacctaccaggacgaggagctggggagcttcctcacatctctgctgaagaagggcctcccccaggcccccagctgaggccggcaactcacccagccgccacctctgccctctcccagctggacagaccctgggcctgcacttcaggactgtgggtgccctgggtgaacagaccctgcaggtcccatccctggggacagaggccttgtgtcacctgcctgcccaggcagctgtttgcagctgaagaaacaaactggtctccaggctgtcttgcctttattcctggttagggcaggtggtcctagacagcagtttccagtaaaagctgaacaaaaga

SEQ ID NO: 356464 - DNA, 3503 bp, Homo sapiens
accggaagttgcagcgaggtggttgcgcctgcgcagtgcatcaccgcaggcgggcctcgcgggtccgggagcgcggcggagacgatgcctgagatcagagtcacgcccttgggggccggccaggacgtgggccgaagctgcatcctggtctccattgcgggcaagaatgtcatgctggactgtggaatgcacatgggcttcaatgacgacgtgagtcccttgggcaggaggcccagaggctgggagagccggccatccacagctggaccctgggcctcagagccgggacagtggggtggtgggcagcagtggttgtgcttggatggctgcaccctgtggggagcagggatgggtgggcctggccgaggtgagcccctgcatggtggggtccccctgtgctggcgctgagccccagccccggggtcctgtaggctggactccgtgagaccctgggctcagcttccagctcacatctgtcagtgaggttgggggtaacctcggcccctccggatgctgtgagcagccaggggtcctggtgccacctgcgggatgggagtgcccagcctgagtctgcacatagaaccccccttcctgggggcccctccctggggcatgggtggccccagatgctgcctggagaccactgtgcaacctgaaacccccacatccttcctagcgacgcttccctgacttctcctacatcacccagaacggccgcctaacagacttcctggactgtgtgatcattaggtgggttcctgttgggggccttgagggtcccatgtctgtgcctgtggggcttgggccaccttgcttggtctcggcagcgtttggcaaggggcctgtgccatccttgatcctcagggggcttctaggccccaggatctgctccctgcctgccttactggtcacacacatggcctggtctctgtctgttcttccggccctgccctctgaaccctactttctgaacccggccctccaggcttcaccctctctgatgccttcactgtctcaggatctttaaaccccactgtcttgttggcgattccagagtcccgagtctgccctgaccccagcctttagggttcagcagctcatgacccgctggtctgggtggcctcgtctggacggccacagcactcctgctggccccctgcccttccctgccctgtcctcccagcagccaggcccgtgaagcctggagaagccccttctcctctccggaggcagtgtcctcagctgcccctgagcccctcgtggttgtggtttcttctcagacacggtggggtccccaatgccttcctggggcttgccaggcgctgcccttgccctcaggtctgtgccaccttcacctgcagctccactcagcctgtcctgactgcctgaaaagccagcggctcccctatgcgcggttccctcagcagctttgcattgtctcgcgagcatgtcgccgtcaccgacgtgttcaatttcccgtttgcttattgccttgctagactttgagactgaaagttccagggagacagttttgtgtttgctcattactgactcttcggtactcgggatgaggcctggcgcacagcaggcgaatgaaggggccagtgacccacaagcccagagcgggggtgaaggctggggcagggtgggcccaggctgacctgtgctgcgtccccctagccacttccacctggaccactgcggggcactcccctacttcagcgagatggtgggctacgacggccccatctacatgactcaccccacccaggccatctgccccatcttgctggaggactaccgcaagatcgccgtagacaagaagggcgaggccaacttcttcacctcccagatgatcaaagactgcatgaagaaggtggtggctgtccacctccaccagacggtccaggtagatgatgagctggagatcaaggcctactatgcaggccacgtgctgggggcagccatgttccagattaaagtgggctcagagtctgtggtctacacgggtgattataacatgaccccagaccgacacttaggagctgcctggattgacaagtgccgccccaacctgctcatcacagagtccacgtacgccacgaccatccgtgactccaagcgctgccgggagcgagacttcctgaagaaagtccacgagaccgtggagcgtggtgggaaggtgctgatacctgtgttcgcgctgggccgcgcccaggagctctgcatcctcctggagaccttctgggagcgcatgaacctgaaggtgcccatctacttctccacggggctgaccgagaaggccaaccactactacaagctgttcatcccctggaccaaccagaagatccgcaagacttttgtgcagaggaacatgtttgagttcaagcacatcaaggccttcgaccgggcttttgctgacaacccaggaccgatggttgtgtttgccacgccaggaatgctgcacgctgggcagtccctgcagatcttccggaaatgggccggaaacgaaaagaacatggtcatcatgcccggctactgcgtgcagggcaccgtcggccacaagatcctcagcgggcagcggaagctcgagatggaggggcggcaggtgctggaggtcaagatgcaggtggagtacatgtcattcagcgcacacgcggacgccaagggcatcatgcagctggtgggccaggcagagccggagagcgtgctgctggtgcatggcgaggccaagaagatggagttcctgaagcagaagatcgagcaggagctccgggtcaactgctacatgccggccaatggcgagacggtgacgctgcccacaagccccagcatccccgtaggcatctcgctggggctgctgaagcgggagatggcgcaggggctgctccctgaggccaagaagcctcggctcctgcacggcaccctgatcatgaaggacagcaacttccggctggtgtcctcagagcaagccctcaaagagctgggtctggctgagcaccagctgcgcttcacctgccgcgtgcacctgcatgacacacgcaaggagcaggagacggcattgcgcgtctacagccacctcaagagcgtcctgaaggaccactgtgtgcagcacctcccggacggctctgtgactgtggagtccgtcctcctccaggccgccgccccttctgaggacccaggcaccaaggtgctgctggtctcctggacctaccaggacgaggagctggggagcttcctcacatctctgctgaagaagggcctcccccaggcccccagctgaggccggcaactcacccagccgccacctctgccctctcccagctggacagaccctgggcctgcacttcaggactgtgggtgccctgggtgaacagaccctgcaggtcccatccctggggacagaggccttgtgtcacctgcctgcccaggcagctgtttgcagctgaagaaacaaactggtggtcctagacagcagtttccagtaaaagctgaacaaaaga

SEQ ID NO: 356465 - DNA, 4509 bp, Homo sapiens
accggaagttgcagcgaggtggttgcgcctgcgcagtgcatcaccgcaggcgggcctcgcgggtccgggagcgcggcggagacgatgcctgagatcagagtcacgcccttgggggccggccaggacgtgggccgaagctgcatcctggtctccattgcgggcaagaatgtcatgctggactgtggaatgcacatgggcttcaatgacgacgtgagtcccttgggcaggaggcccagaggctgggagagccggccatccacagctggaccctgggcctcagagccgggacagtggggtggtgggcagcagtggttgtgcttggatggctgcaccctgtggggagcagggatgggtgggcctggccgaggtgagcccctgcatggtggggtccccctgtgctggcgctgagccccagccccggggtcctgtaggctggactccgtgagaccctgggctcagcttccagctcacatctgtcagtgaggttgggggtaacctcggcccctccggatgctgtgagcagccaggggtcctggtgccacctgcgggatgggagtgcccagcctgagtctgcacatagaaccccccttcctgggggcccctccctggggcatgggtggccccagatgctgcctggagaccactgtgcaacctgaaacccccacatccttcctagcgacgcttccctgacttctcctacatcacccagaacggccgcctaacagacttcctggactgtgtgatcattaggtgggttcctgttgggggccttgagggtcccatgtctgtgcctgtggggcttgggccaccttgcttggtctcggcagcgtttggcaaggggcctgtgccatccttgatcctcagggggcttctaggccccaggatctgctccctgcctgccttactggtcacacacatggcctggtctctgtctgttcttccggccctgccctctgaaccctactttctgaacccggccctccaggcttcaccctctctgatgccttcactgtctcaggatctttaaaccccactgtcttgttggcgattccagagtcccgagtctgccctgaccccagcctttagggttcagcagctcatgacccgctggtctgggtggcctcgtctggacggccacagcactcctgctggccccctgcccttccctgccctgtcctcccagcagccaggcccgtgaagcctggagaagccccttctcctctccggaggcagtgtcctcagctgcccctgagcccctcgtggttgtggtttcttctcagacacggtggggtccccaatgccttcctggggcttgccaggcgctgcccttgccctcaggtctgtgccaccttcacctgcagctccactcagcctgtcctgactgcctgaaaagccagcggctcccctatgcgcggttccctcagcagctttgcattgtctcgcgagcatgtcgccgtcaccgacgtgttcaatttcccgtttgcttattgccttgctagactttgagactgaaagttccagggagacagttttgtgtttgctcattactgactcttcggtactcgggatgaggcctggcgcacagcaggcgaatgaaggggccagtgacccacaagcccagagcgggggtgaaggctggggcagggtgggcccaggctgacctgtgctgcgtccccctagccacttccacctggaccactgcggggcactcccctacttcagcgagatggtgggctacgacggccccatctacatgactcaccccacccaggccatctgccccatcttgctggaggactaccgcaagatcgccgtagacaagaagggcgaggccaacttcttcacctcccagatgatcaaagactgcatgaagaaggtggtggctgtccacctccaccagacggtccaggtagatgatgagctggagatcaaggcctactatgcaggccacgtgctgggggcagccatgttccagattaaagtgggctcagagtctgtggtctacacgggtgattataacatgaccccagaccgacacttaggagctgcctggattgacaagtgccgccccaacctgctcatcacagagtccacgtacgccacgaccatccgtgactccaagcgctgccgggagcgagacttcctgaagaaagtccacgagaccgtggagcgtggtgggaaggtgctgatacctgtgttcgcgctgggccgcgcccaggagctctgcatcctcctggagaccttctgggagcgcatgaacctgaaggtgcccatctacttctccacggggctgaccgagaaggccaaccactactacaagctgttcatcccctggaccaaccagaagatccgcaagacttttgtgcagaggaacatgtttgagttcaagcacatcaaggccttcgaccgggcttttgctgacaacccaggaccgatggttgtgtttgccacgccaggaatgctgcacgctgggcagtccctgcagatcttccggaaatgggccggaaacgaaaagaacatggtcatcatgcccggctactgcgtgcagggcaccgtcggccacaagatcctcagcgggcagcggaagctcgagatggaggggcggcaggtgctggaggtcaagatgcaggtggagtacatgtcattcagcgcacacgcggacgccaagggcatcatgcagctggtgggccaggcagagccggagagcgtgctgctggtgcatggcgaggccaagaagatggagttcctgaagcagaagatcgagcaggagctccgggtcaactgctacatgccggccaatggcgagacggtgacgctgcccacaagccccagcatccccgtaggcatctcgctggggctgctgaagcgggagatggcgcaggggctgctccctgaggccaagaagcctcggctcctgcacggcaccctgatcatgaaggacagcaacttccggctggtgtcctcagagcaagccctcaaagagctgggtctggctgagcaccagctgcgcttcacctgccgcgtgcacctgcatgacacacgcaaggagcaggagacggcattgcgcgtctacagccacctcaagagcgtcctgaaggaccactgtgtgcagcacctcccggacggctctgtgactgtggagtccgtcctcctccaggccgccgccccttctgaggacccaggcaccaaggtgctgctggtctcctggacctaccaggacgaggagctggggagcttcctcacatctctgctgaagaagggcctcccccaggcccccagctgaggccggcaactcacccagccgccacctctgccctctcccagctggacagaccctgggcctgcacttcaggactgtgggtgccctgggtgaacagaccctgcaggtcccatccctggggacagaggccttgtgtcacctgcctgcccaggcagctgtttgcagctgaagaaacaaactggtctccaggctgtcttgcctttattcctggttagggcaggtggtcctagacagcagtttccagtaaaagctgaacaaaagaaaaaagaaaagatatagggcagagataaaaaggggggggggggcagaaataacattcctggcgggaggcgccactatgatagactcagcacagcccgtttttttgtgtaaaagggcggccccaccatagaagggtgggcttattataaaaagaagagagacgcgcgggtgaatacagaacacgacctcggtcgacggagaggaaaaacgtttatgtgtgtgtcatctttgagagagagagcaccccacctgctgtgtggggggggcgacacaatggtggcgagaccacaccatcagcatgaagaaattataagagctgagcgggtgaaaaaaaaaaaaaacatcggagatgtttgatgattgaggtgtaaaccaaacacaatgtgatataatgtggtgggatcgaggaagaaattggtgacaaaggcatgtacttaattatgatagaaaatatattccgcggcgcggcttcgtaataataaaacggctgataggagagtgacagaggaatcgagataatgcaaagaagtaatagagatgaaaagaggagtagcagcaataagcattgaattgtgaataagaaagactaagagagaactgaacaaaacagaaagaaaaaaagacagaaaaacgaagaaaagaaaaaaaaaaacagaaggagaaaaagaaaagcaagagggacaagaaaaaaaaagcgaagcagagcagagaaaaaaaaaaaaagacagagaaaagaaagataaacgacagaaagaaagcaacagacaaaaagaaaagtaaagaaaaaacagacggagagcaagacataacagacagaggaaagaacacgagcacctagaccaaggaaaacgcacacaccaacgcacggcagaaaccaagatacccaagagcacgcacagcacagcaacaagcacggagaaggaataacacaaaaggggaagaggagaagaaagaaagaagaaaaagag

SEQ ID NO: 356466 - DNA, 3480 bp, Homo sapiens
accggaagttgcagcgaggtggttgcgcctgcgcagtgcatcaccgcaggcgggcctcgcgggtccgggagcgcggcggagacgatgcctgagatcagagtcacgcccttgggggccggccaggacgtgggccgaagctgcatcctggtctccattgcgggcaagaatgtcatgctggactgtggaatgcacatgggcttcaatgacgacgtgagtcccttgggcaggaggcccagaggctgggagagccggccatccacagctggaccctgggcctcagagccgggacagtggggtggtgggcagcagtggttgtgcttggatggctgcaccctgtggggagcagggatgggtgggcctggccgaggtgagcccctgcatggtggggtccccctgtgctggcgctgagccccagccccggggtcctgtaggctggactccgtgagaccctgggctcagcttccagctcacatctgtcagtgaggttgggggtaacctcggcccctccggatgctgtgagcagccaggggtcctggtgccacctgcgggatgggagtgcccagcctgagtctgcacatagaaccccccttcctgggggcccctccctggggcatgggtggccccagatgctgcctggagaccactgtgcaacctgaaacccccacatccttcctagcgacgcttccctgacttctcctacatcacccagaacggccgcctaacagacttcctggactgtgtgatcattaggtgggttcctgttgggggccttgagggtcccatgtctgtgcctgtggggcttgggccaccttgcttggtctcggcagcgtttggcaaggggcctgtgccatccttgatcctcagggggcttctaggccccaggatctgctccctgcctgccttactggtcacacacatggcctggtctctgtctgttcttccggccctgccctctgaaccctactttctgaacccggccctccaggcttcaccctctctgatgccttcactgtctcaggatctttaaaccccactgtcttgttggcgattccagagtcccgagtctgccctgaccccagcctttagggttcagcagctcatgacccgctggtctgggtggcctcgtctggacggccacagcactcctgctggccccctgcccttccctgccctgtcctcccagcagccaggcccgtgaagcctggagaagccccttctcctctccggaggcagtgtcctcagctgcccctgagcccctcgtggttgtggtttcttctcagacacggtggggtccccaatgccttcctggggcttgccaggcgctgcccttgccctcaggtctgtgccaccttcacctgcagctccactcagcctgtcctgactgcctgaaaagccagcggctcccctatgcgcggttccctcagcagctttgcattgtctcgcgagcatgtcgccgtcaccgacgtgttcaatttcccgtttgcttattgccttgctagactttgagactgaaagttccagggagacagttttgtgtttgctcattactgactcttcggtactcgggatgaggcctggcgcacagcaggcgaatgaaggggccagtgacccacaagcccagagcgggggtgaaggctggggcagggtgggcccaggctgacctgtgctgcgtccccctagccacttccacctggaccactgcggggcactcccctacttcagcgagatggtgggctacgacggccccatctacatgactcaccccacccaggccatctgccccatcttgctggaggactaccgcaagatcgccgtagacaagaagggcgaggccaacttcttcacctcccagatgatcaaagactgcatgaagaaggtggtggctgtccacctccaccagacggtccaggtagatgatgagctggagatcaaggcctactatgcaggccacgtgctgggggcagccatgttccagattaaagtgggctcagagtctgtggtctacacgggtgattataacatgaccccagaccgacacttaggagctgcctggattgacaagtgccgccccaacctgctcatcacagagtccacgtacgccacgaccatccgtgactccaagcgctgccgggagcgagacttcctgaagaaagtccacgagaccgtggagcgtggtgggaaggtgctgatacctgtgttcgcgctgggccgcgcccaggagctctgcatcctcctggagaccttctgggagcgcatgaacctgaaggtgcccatctacttctccacggggctgaccgagaaggccaaccactactacaagctgttcatcccctggaccaaccagaagatccgcaagacttttgtgcagaggaacatgtttgagttcaagcacatcaaggccttcgaccgggcttttgctgacaacccaggaccgatggttgtgtttgccacgccaggaatgctgcacgctgggcagtccctgcagatcttccggaaatgggccggaaacgaaaagaacatggtcatcatgcccggctactgcgtgcagggcaccgtcggccacaagatcctcagcgggcagcggaagctcgagatggaggggcggcaggtgctggaggtcaagatgcaggtggagtacatgtcattcagcgcacacgcggacgccaagggcatcatgcagctggtgggccaggcagagccggagagcgtgctgctggtgcatggcgaggccaagaagatggagttcctgaagcagaagatcgagcaggagctccgggtcaactgctacatgccggccaatggcgagacggtgacgctgcccacaagccccagcatccccgtaggcatctcgctggggctgctgaagcgggagatggcgcaggaacttccggctggtgtcctcagagcaagccctcaaagagctgggtctggctgagcaccagctgcgcttcacctgccgcgtgcacctgcatgacacacgcaaggagcaggagacggcattgcgcgtctacagccacctcaagagcgtcctgaaggaccactgtgtgcagcacctcccggacggctctgtgactgtggagtccgtcctcctccaggccgccgccccttctgaggacccaggcaccaaggtgctgctggtctcctggacctaccaggacgaggagctggggagcttcctcacatctctgctgaagaagggcctcccccaggcccccagctgaggccggcaactcacccagccgccacctctgccctctcccagctggacagaccctgggcctgcacttcaggactgtgggtgccctgggtgaacagaccctgcaggtcccatccctggggacagaggccttgtgtcacctgcctgcccaggcagctgtttgcagctgaagaaacaaactggtctccaggctgtcttgcctttattcctggttagggcaggtggtcctagacagcagtttccagtaaaagctgaacaaaaga

SEQ ID NO: 356467 - DNA, 3473 bp, Homo sapiens
accggaagttgcagcgaggtggttgcgcctgcgcagtgcatcaccgcaggcgggcctcgcgggtccgggagcgcggcggagacgatgcctgagatcagagtcacgcccttgggggccggccaggacgtgggccgaagctgcatcctggtctccattgcgggcaagaatgtcatgctggactgtggaatgcacatgggcttcaatgacgacgtgagtcccttgggcaggaggcccagaggctgggagagccggccatccacagctggaccctgggcctcagagccgggacagtggggtggtgggcagcagtggttgtgcttggatggctgcaccctgtggggagcagggatgggtgggcctggccgaggtgagcccctgcatggtggggtccccctgtgctggcgctgagccccagccccggggtcctgtaggctggactccgtgagaccctgggctcagcttccagctcacatctgtcagtgaggttgggggtaacctcggcccctccggatgctgtgagcagccaggggtcctggtgccacctgcgggatgggagtgcccagcctgagtctgcacatagaaccccccttcctgggggcccctccctggggcatgggtggccccagatgctgcctggagaccactgtgcaacctgaaacccccacatccttcctagcgacgcttccctgacttctcctacatcacccagaacggccgcctaacagacttcctggactgtgtgatcattaggtgggttcctgttgggggccttgagggtcccatgtctgtgcctgtggggcttgggccaccttgcttggtctcggcagcgtttggcaaggggcctgtgccatccttgatcctcagggggcttctaggccccaggatctgctccctgcctgccttactggtcacacacatggcctggtctctgtctgttcttccggccctgccctctgaaccctactttctgaacccggccctccaggcttcaccctctctgatgccttcactgtctcaggatctttaaaccccactgtcttgttggcgattccagagtcccgagtctgccctgaccccagcctttagggttcagcagctcatgacccgctggtctgggtggcctcgtctggacggccacagcactcctgctggccccctgcccttccctgccctgtcctcccagcagccaggcccgtgaagcctggagaagccccttctcctctccggaggcagtgtcctcagctgcccctgagcccctcgtggttgtggtttcttctcagacacggtggggtccccaatgccttcctggggcttgccaggcgctgcccttgccctcaggtctgtgccaccttcacctgcagctccactcagcctgtcctgactgcctgaaaagccagcggctcccctatgcgcggttccctcagcagctttgcattgtctcgcgagcatgtcgccgtcaccgacgtgttcaatttcccgtttgcttattgccttgctagactttgagactgaaagttccagggagacagttttgtgtttgctcattactgactcttcggtactcgggatgaggcctggcgcacagcaggcgaatgaaggggccagtgacccacaagcccagagcgggggtgaaggctggggcagggtgggcccaggctgacctgtgctgcgtccccctagccacttccacctggaccactgcggggcactcccctacttcagcgagatggtgggctacgacggccccatctacatgactcaccccacccaggccatctgccccatcttgctggaggactaccgcaagatcgccgtagacaagaagggcgaggccaacttcttcacctcccagatgatcaaagactgcatgaagaaggtggtggctgtccacctccaccagacggtccaggtagatgatgagctggagatcaaggcctactatgcaggccacgtgctgggggcagccatgttccagattaaagtgggctcagagtctgtggtctacacgggtgattataacatgaccccagaccgacacttaggagctgcctggattgacaagtgccgccccaacctgctcatcacagagtccacgtacgccacgaccatccgtgactccaagcgctgccgggagcgagacttcctgaagaaagtccacgagaccgtggagcgtggtgggaaggtgctgatacctgtgttcgcgctgggccgcgcccaggagctctgcatcctcctggagaccttctgggagcgcatgaacctgaaggtgcccatctacttctccacggggctgaccgagaaggccaaccactactacaagctgttcatcccctggaccaaccagaagatccgcaagacttttgtgcagaggaacatgtttgagttcaagcacatcaaggccttcgaccgggcttttgctgacaacccaggaccgatggttgtgtttgccacgccaggaatgctgcacgctgggcagtccctgcagatcttccggaaatgggccggaaacgaaaagaacatggtcatcatgcccggctactgcgtgcagggcaccgtcggccacaagatcctcagcgggcagcggaagctcgagatggaggggcggcaggtgctggaggtcaagatgcaggtggagtacatgtcattcagcgcacacgcggacgccaagggcatcatgcagctggtgggccaggcagagccggagagcgtgctgctggtgcatggcgaggccaagaagatggagttcctgaagcagaagatcgagcaggagctccgggtcaactgctacatgccggccaatggcgagacggtgacgctgcccacaagccccagcatccccgtaggcatctcgctggggctgctgaagcgggagatggcgcaggggctgctccctgaggccaagaagcctcggctcctgcacggcaccctgatcatgaaggacagcaacttccggctggtgtcctcagagcaagccctcaaagagctgggtctggctgagcaccagctgcgcttcacctgccgcgtgcacctgcatgacacacgcaaggagcaggagacggcattgcgcgtctacagccacctcaagagcgtcctgaaggaccactgtgtgcagcacctcccggacggctctgtgactgtggagtccgtcctcctccaggccgccgccccttctgaggacccaggcaccaaggtgctgctggtctcctggacctaccaggacgaggagctggggagcttcctcacatctctgctgaagaagggcctcccccaggcccccagctgaggccggcaactcacccagccgccacctctgccctgtcccatccctggggacagaggccttgtgtcacctgcctgcccaggcagctgtttgcagctgaagaaacaaactggtctccaggctgtcttgcctttattcctggttagggcaggtggtcctagacagcagtttccagtaaaagctgaacaaaaga

SEQ ID NO: 356468 - DNA, 3373 bp, Homo sapiens
accggaagttgcagcgaggtggttgcgcctgcgcagtgcatcaccgcaggcgggcctcgcgggtccgggagcgcggcggagacgatgcctgagatcagagtcacgcccttgggggccggccaggacgtgggccgaagctgcatcctggtctccattgcgggcaagaatgtcatgctggactgtggaatgcacatgggcttcaatgacgacgtgagtcccttgggcaggaggcccagaggctgggagagccggccatccacagctggaccctgggcctcagagccgggacagtggggtggtgggcagcagtggttgtgcttggatggctgcaccctgtggggagcagggatgggtgggcctggccgaggtgagcccctgcatggtggggtccccctgtgctggcgctgagccccagccccggggtcctgtaggctggactccgtgagaccctgggctcagcttccagctcacatctgtcagtgaggttgggggtaacctcggcccctccggatgctgtgagcagccaggggtcctggtgccacctgcgggatgggagtgcccagcctgagtctgcacatagaaccccccttcctgggggcccctccctggggcatgggtggccccagatgctgcctggagaccactgtgcaacctgaaacccccacatccttcctagcgacgcttccctgacttctcctacatcacccagaacggccgcctaacagacttcctggactgtgtgatcattaggtgggttcctgttgggggccttgagggtcccatgtctgtgcctgtggggcttgggccaccttgcttggtctcggcagcgtttggcaaggggcctgtgccatccttgatcctcagggggcttctaggccccaggatctgctccctgcctgccttactggtcacacacatggcctggtctctgtctgttcttccggccctgccctctgaaccctactttctgaacccggccctccaggcttcaccctctctgatgccttcactgtctcaggatctttaaaccccactgtcttgttggcgattccagagtcccgagtctgccctgaccccagcctttagggttcagcagctcatgacccgctggtctgggtggcctcgtctggacggccacagcactcctgctggccccctgcccttccctgccctgtcctcccagcagccaggcccgtgaagcctggagaagccccttctcctctccggaggcagtgtcctcagctgcccctgagcccctcgtggttgtggtttcttctcagacacggtggggtccccaatgccttcctggggcttgccaggcgctgcccttgccctcaggtctgtgccaccttcacctgcagctccactcagcctgtcctgactgcctgaaaagccagcggctcccctatgcgcggttccctcagcagctttgcattgtctcgcgagcatgtcgccgtcaccgacgtgttcaatttcccgtttgcttattgccttgctagactttgagactgaaagttccagggagacagttttgtgtttgctcattactgactcttcggtactcgggatgaggcctggcgcacagcaggcgaatgaaggggccagtgacccacaagcccagagcgggggtgaaggctggggcagggtgggcccaggctgacctgtgctgcgtccccctagccacttccacctggaccactgcggggcactcccctacttcagcgagatggtgggctacgacggccccatctacatgactcaccccacccaggccatctgccccatcttgctggaggactaccgcaagatcgccgtagacaagaagggcgaggccaacttcttcacctcccagatgatcaaagactgcatgaagaaggtggtggctgtccacctccaccagacggtccaggtagatgatgagctggagatcaaggcctactatgcaggccacgtgctgggggcagccatgttccagattaaagtgggctcagagtctgtggtctacacgggtgattataacatgaccccagaccgacacttaggagctgcctggattgacaagtgccgccccaacctgctcatcacagagtccacgtacgccacgaccatccgtgactccaagcgctgccgggagcgagacttcctgaagaaagtccacgagaccgtggagcgtggtgggaaggtgctgatacctgtgttcgcgctgggccgcgcccaggagctctgcatcctcctggagaccttctgggagcgcatgaacctgaaggtgcccatctacttctccacggggctgaccgagaaggccaaccactactacaagctgttcatcccctggaccaaccagaagatccgcaagacttttgtgcagaggaacatgtttgagttcaagcacatcaaggccttcgaccgggcttttgctgacaacccaggaccgatggttgtgtttgccacgccaggaatgctgcacgctgggcagtccctgcagatcttccggaaatgggccggaaacgaaaagaacatggtcatcatgcccggctactgcgtgcagggcaccgtcggccacaagatcctcagcgggcagcggaagctcgagatggaggggcggcaggtgctggaggtcaagatgcaggtggagtacatgtcattcagcgcacacgcggacgccaagggcatcatgcagctggtgggccaggcagagccggagagcgtgctgctggtgcatggcgaggccaagaagatggagttcctgaagcagaagatcgagcaggagctccgggtcaactgctacatgccggccaatggcgagacggtgacgctgcccacaagccccagcatccccgtaggcatctcgctggggctgctgaagcgggagatggcgcaggggctgctccctgaggccaagaagcctcggctcctgcacggcaccctgatcatgaaggacagcaacttccggctggtgtcctcagagcaagccctcaaagagctgggtctggctgagcaccagctgcgcttcacctgccgcgtgcacctgcatgacacacgcaaggagacgaggagctggggagcttcctcacatctctgctgaagaagggcctcccccaggcccccagctgaggccggcaactcacccagccgccacctctgccctctcccagctggacagaccctgggcctgcacttcaggactgtgggtgccctgggtgaacagaccctgcaggtcccatccctggggacagaggccttgtgtcacctgcctgcccaggcagctgtttgcagctgaagaaacaaactggtctccaggctgtcttgcctttattcctggttagggcaggtggtcctagacagcagtttccagtaaaagctgaacaaaaga

SEQ ID NO: 356469 - DNA, 3329 bp, Homo sapiens
accggaagttgcagcgaggtggttgcgcctgcgcagtgcatcaccgcaggcgggcctcgcgggtccgggagcgcggcggagacgatgcctgagatcagagtcacgcccttgggggccggccaggacgtgggccgaagctgcatcctggtctccattgcgggcaagaatgtcatgctggactgtggaatgcacatgggcttcaatgacgacgtgagtcccttgggcaggaggcccagaggctgggagagccggccatccacagctggaccctgggcctcagagccgggacagtggggtggtgggcagcagtggttgtgcttggatggctgcaccctgtggggagcagggatgggtgggcctggccgaggtgagcccctgcatggtggggtccccctgtgctggcgctgagccccagccccggggtcctgtaggctggactccgtgagaccctgggctcagcttccagctcacatctgtcagtgaggttgggggtaacctcggcccctccggatgctgtgagcagccaggggtcctggtgccacctgcgggatgggagtgcccagcctgagtctgcacatagaaccccccttcctgggggcccctccctggggcatgggtggccccagatgctgcctggagaccactgtgcaacctgaaacccccacatccttcctagcgacgcttccctgacttctcctacatcacccagaacggccgcctaacagacttcctggactgtgtgatcattaggtgggttcctgttgggggccttgagggtcccatgtctgtgcctgtggggcttgggccaccttgcttggtctcggcagcgtttggcaaggggcctgtgccatccttgatcctcagggggcttctaggccccaggatctgctccctgcctgccttactggtcacacacatggcctggtctctgtctgttcttccggccctgccctctgaaccctactttctgaacccggccctccaggcttcaccctctctgatgccttcactgtctcaggatctttaaaccccactgtcttgttggcgattccagagtcccgagtctgccctgaccccagcctttagggttcagcagctcatgacccgctggtctgggtggcctcgtctggacggccacagcactcctgctggccccctgcccttccctgccctgtcctcccagcagccaggcccgtgaagcctggagaagccccttctcctctccggaggcagtgtcctcagctgcccctgagcccctcgtggttgtggtttcttctcagacacggtggggtccccaatgccttcctggggcttgccaggcgctgcccttgccctcaggtctgtgccaccttcacctgcagctccactcagcctgtcctgactgcctgaaaagccagcggctcccctatgcgcggttccctcagcagctttgcattgtctcgcgagcatgtcgccgtcaccgacgtgttcaatttcccgtttgcttattgccttgctagactttgagactgaaagttccagggagacagttttgtgtttgctcattactgactcttcggtactcgggatgaggcctggcgcacagcaggcgaatgaaggggccagtgacccacaagcccagagcgggggtgaaggctggggcagggtgggcccaggctgacctgtgctgcgtccccctagccacttccacctggaccactgcggggcactcccctacttcagcgagatggtgggctacgacggccccatctacatgactcaccccacccaggccatctgccccatcttgctggaggactaccgcaagatcgccgtagacaagaagggcgaggccaacttcttcacctcccagatgatcaaagactgcatgaagaaggtggtggctgtccacctccaccagacggtccaggtagatgatgagctggagatcaaggcctactatgcaggccacgtgctgggggcagccatgttccagattaaagtgggctcagagtctgtggtctacacgggtgattataacatgaccccagaccgacacttaggagctgcctggattgacaagtgccgccccaacctgctcatcacagagtccacgtacgccacgaccatccgtgactccaagcgctgccgggagcgagacttcctgaagaaagtccacgagaccgtggagcgtggtgggaaggtgctgatacctgtgttcgcgctgggccgcgcccaggagctctgcatcctcctggagaccttctgggagcgcatgaacctgaaggtgcccatctacttctccacggggctgaccgagaaggccaaccactactacaagctgttcatcccctggaccaaccagaagatccgcaagacttttgtgcagaggaacatgtttgagttcaagcacatcaaggccttcgaccgggcttttgctgacaacccaggaccgatggttgtgtttgccacgccaggaatgctgcacgctgggcagtccctgcagatcttccggaaatgggccggaaacgaaaagaacatgaagatggagttcctgaagcagaagatcgagcaggagctccgggtcaactgctacatgccggccaatggcgagacggtgacgctgcccacaagccccagcatccccgtaggcatctcgctggggctgctgaagcgggagatggcgcaggggctgctccctgaggccaagaagcctcggctcctgcacggcaccctgatcatgaaggacagcaacttccggctggtgtcctcagagcaagccctcaaagagctgggtctggctgagcaccagctgcgcttcacctgccgcgtgcacctgcatgacacacgcaaggagcaggagacggcattgcgcgtctacagccacctcaagagcgtcctgaaggaccactgtgtgcagcacctcccggacggctctgtgactgtggagtccgtcctcctccaggccgccgccccttctgaggacccaggcaccaaggtgctgctggtctcctggacctaccaggacgaggagctggggagcttcctcacatctctgctgaagaagggcctcccccaggcccccagctgaggccggcaactcacccagccgccacctctgccctctcccagctggacagaccctgggcctgcacttcaggactgtgggtgccctgggtgaacagaccctgcaggtcccatccctggggacagaggccttgtgtcacctgcctgcccaggcagctgtttgcagctgaagaaacaaactggtctccaggctgtcttgcctttattcctggttagggcaggtggtcctagacagcagtttccagtaaaagctgaacaaaaga

SEQ ID NO: 356470 - DNA, 3647 bp, Homo sapiens
accggaagttgcagcgaggtggttgcgcctgcgcagtgcatcaccgcaggcgggcctcgcgggtccgggagcgcggcggagacgatgcctgagatcagagtcacgcccttgggggccggccaggacgtgggccgaagctgcatcctggtctccattgcgggcaagaatgtcatgctggactgtggaatgcacatgggcttcaatgacgacgtgagtcccttgggcaggaggcccagaggctgggagagccggccatccacagctggaccctgggcctcagagccgggacagtggggtggtgggcagcagtggttgtgcttggatggctgcaccctgtggggagcagggatgggtgggcctggccgaggtgagcccctgcatggtggggtccccctgtgctggcgctgagccccagccccggggtcctgtaggctggactccgtgagaccctgggctcagcttccagctcacatctgtcagtgaggttgggggtaacctcggcccctccggatgctgtgagcagccaggggtcctggtgccacctgcgggatgggagtgcccagcctgagtctgcacatagaaccccccttcctgggggcccctccctggggcatgggtggccccagatgctgcctggagaccactgtgcaacctgaaacccccacatccttcctagcgacgcttccctgacttctcctacatcacccagaacggccgcctaacagacttcctggactgtgtgatcattaggtgggttcctgttgggggccttgagggtcccatgtctgtgcctgtggggcttgggccaccttgcttggtctcggcagcgtttggcaaggggcctgtgccatccttgatcctcagggggcttctaggccccaggatctgctccctgcctgccttactggtcacacacatggcctggtctctgtctgttcttccggccctgccctctgaaccctactttctgaacccggccctccaggcttcaccctctctgatgccttcactgtctcaggatctttaaaccccactgtcttgttggcgattccagagtcccgagtctgccctgaccccagcctttagggttcagcagctcatgacccgctggtctgggtggcctcgtctggacggccacagcactcctgctggccccctgcccttccctgccctgtcctcccagcagccaggcccgtgaagcctggagaagccccttctcctctccggaggcagtgtcctcagctgcccctgagcccctcgtggttgtggtttcttctcagacacggtggggtccccaatgccttcctggggcttgccaggcgctgcccttgccctcaggtctgtgccaccttcacctgcagctccactcagcctgtcctgactgcctgaaaagccagcggctcccctatgcgcggttccctcagcagctttgcattgtctcgcgagcatgtcgccgtcaccgacgtgttcaatttcccgtttgcttattgccttgctagactttgagactgaaagttccagggagacagttttgtgtttgctcattactgactcttcggtactcgggatgaggcctggcgcacagcaggcgaatgaaggggccagtgacccacaagcccagagcgggggtgaaggctggggcagggtgggcccaggctgacctgtgctgcgtccccctagccacttccacctggaccactgcggggcactcccctacttcagcgagatggtgggctacgacggccccatctacatgactcaccccacccaggccatctgccccatcttgctggaggactaccgcaagatcgccgtagacaagaagggcgaggccaacttcttcacctcccagatgatcaaagactgcatgaagaaggtggtggctgtccacctccaccagacggtccagattaaagtgggctcagagtctgtggtctacacgggtgattataacatgaccccagaccgacacttaggagctgcctggattgacaagtgccgccccaacctgctcatcacagagtccacgtacgccacgaccatccgtgactccaagcgctgccgggagcgagacttcctgaagaaagtccacgagaccgtggagcgtggtgggaaggtgctgatacctgtgttcgcgctgggccgcgcccaggagctctgcatcctcctggagaccttctgggagcgcatgaacctgaaggtgcccatctacttctccacggggctgaccgagaaggccaaccactactacaagctgttcatcccctggaccaaccagaagatccgcaagacttttgtgcagaggaacatgtttgagttcaagcacatcaaggccttcgaccgggcttttgctgacaacccaggaccgatggttgtgtttgccacgccaggaatgctgcacgctgggcagtccctgcagatcttccggaaatgggccggaaacgaaaagaacatggtcatcatgcccggctactgcgtgcagggcaccgtcggccacaagatcctcagcgggcagcggaagctcgagatggaggggcggcaggtggtgagtctcgaccccgcactgggctggcagggccgaggggcacctcctggtggtaaccactgtccacgccccgtggcctctgtagctggaggtcaagatgcaggtggagtacatgtcattcagcgcacacgcggacgccaagggcatcatgcagctggtgggccaggcagagccggagagcgtgctgctggtgcatggcgaggccaagaagatggagttcctgaagcagaagatcgagcaggagctccgtaggcagccgggcgggcggcgtggggcccacctcgggtcagcacgggcagcctgggctgaggctctctcttcccccggggtccaggggtcaactgctacatgccggccaatggcgagacggtgacgctgcccacaagccccagcatccccgtaggcatctcgctggggctgctgaagcgggagatggcgcaggggctgctccctgaggccaagaagcctcggctcctgcacggcaccctgatcatgaaggacagcaacttccggctggtgtcctcagagcaagccctcaaagagctgggtctggctgagcaccagctgcgcttcacctgccgcgtgcacctgcatgacacacgcaaggagcaggagacggcattgcgcgtctacagccacctcaagagcgtcctgaaggaccactgtgtgcagcacctcccggacggctctgtgactgtggagtccgtcctcctccaggccgccgccccttctgaggacccaggcaccaaggtgctgctggtctcctggacctaccaggacgaggagctggggagcttcctcacatctctgctgaagaagggcctcccccaggcccccagctgaggccggcaactcacccagccgccacctctgccctctcccagctggacagaccctgggcctgcacttcaggactgtgggtgccctgggtgaacagaccctgcaggtcccatccctggggacagaggccttgtgtcacctgcctgcccaggcagctgtttgcagctgaagaaacaaactggtctccaggctgtcttgcctttattcctggttagggcaggtggtcctagacagcagtttccagtaaaagctgaacaaaaga

SEQ ID NO: 356471 - DNA, 3737 bp, Homo sapiens
accggaagttgcagcgaggtggttgcgcctgcgcagtgcatcaccgcaggcgggcctcgcgggtccgggagcgcggcggagacgatgcctgagatcagagtcacgcccttgggggccggccaggacgtgggccgaagctgcatcctggtctccattgcgggcaagaatgtcatgctggactgtggaatgcacatgggcttcaatgacgacgtgagtcccttgggcaggaggcccagaggctgggagagccggccatccacagctggaccctgggcctcagagccgggacagtggggtggtgggcagcagtggttgtgcttggatggctgcaccctgtggggagcagggatgggtgggcctggccgaggtgagcccctgcatggtggggtccccctgtgctggcgctgagccccagccccggggtcctgtaggctggactccgtgagaccctgggctcagcttccagctcacatctgtcagtgaggttgggggtaacctcggcccctccggatgctgtgagcagccaggggtcctggtgccacctgcgggatgggagtgcccagcctgagtctgcacatagaaccccccttcctgggggcccctccctggggcatgggtggccccagatgctgcctggagaccactgtgcaacctgaaacccccacatccttcctagcgacgcttccctgacttctcctacatcacccagaacggccgcctaacagacttcctggactgtgtgatcattaggtgggttcctgttgggggccttgagggtcccatgtctgtgcctgtggggcttgggccaccttgcttggtctcggcagcgtttggcaaggggcctgtgccatccttgatcctcagggggcttctaggccccaggatctgctccctgcctgccttactggtcacacacatggcctggtctctgtctgttcttccggccctgccctctgaaccctactttctgaacccggccctccaggcttcaccctctctgatgccttcactgtctcaggatctttaaaccccactgtcttgttggcgattccagagtcccgagtctgccctgaccccagcctttagggttcagcagctcatgacccgctggtctgggtggcctcgtctggacggccacagcactcctgctggccccctgcccttccctgccctgtcctcccagcagccaggcccgtgaagcctggagaagccccttctcctctccggaggcagtgtcctcagctgcccctgagcccctcgtggttgtggtttcttctcagacacggtggggtccccaatgccttcctggggcttgccaggcgctgcccttgccctcaggtctgtgccaccttcacctgcagctccactcagcctgtcctgactgcctgaaaagccagcggctcccctatgcgcggttccctcagcagctttgcattgtctcgcgagcatgtcgccgtcaccgacgtgttcaatttcccgtttgcttattgccttgctagactttgagactgaaagttccagggagacagttttgtgtttgctcattactgactcttcggtactcgggatgaggcctggcgcacagcaggcgaatgaaggggccagtgacccacaagcccagagcgggggtgaaggctggggcagggtgggcccaggctgacctgtgctgcgtccccctagccacttccacctggaccactgcggggcactcccctacttcagcgagatggtgggctacgacggccccatctacatgactcaccccacccaggccatctgccccatcttgctggaggactaccgcaagatcgccgtagacaagaagggcgaggccaacttcttcacctcccagatgatcaaagactgcatgaagaaggtggtggctgtccacctccaccagacggtccagaggtcaggttcccagggccacagctggcacagtcactgcccacccccacaccaaccatgccctccgcccgttctacacagtttctggaaggctggggcctcagggtgagcccaccccacctcactcttgcgtccagcaccgtggggacaccaggaggcgtcagcgcgaggatgcgggtcccagaccagactgggcgccgacccgggagagcacgtgcagggtgggggtatgcactggcttacgaacccaccaggctctgtccgagcggcattgaaatggccagagtgggacaggctggtgccctcagagcgcttggagcggccagagactcgctggagctcccggggtgttgccgggcagggaggcaggggctggaggggagatgggccagctctggagggtgcctggttctgggtgtgggtcagggaagaagtgaaggttaaatcagcgagtgacaggtgaaattccatttctgacaaagattatgggtttgtctgtgtctcactcgaatctctgggtattgcttttatatttcttgaaattatattaggtacctatgtattttggaacatttaattttctgattgaacttgtcaaaatgaagtatgtttatcttttttgttgtgaaactttaatttttttttttttttgacagtgtctcactttgttacccaggctggagtgtgatcttggctcactgcagcctcggcctcccgggttgaggtgatctcccacctcggcctcccaagtagctgggactacaagcatgtgcccatacgcccagctaatttattttggtattttttgtagagatgggtatgtgttgctaaggctctcgaactcctgggctgggctccagggatcctcccacctcagcctctcaaagtgctcggattacaggcatccactgcgcctggccaaaattttgtttttaaattagcctggcgtggtgggtgcgtgcctatagtcccagctatttgggaggcggaggtggaggcgggaggacgcttgagcccaggagtttgagtgagccatgattgcgccactgcagcctgggtgacagccccaccctgtctctcaattttatttattaatttttttttgagacacaactctcgctcttgttgcccaggctggagtgcaatggcacaatctcagctcactgcaatctccgcctcccgggttcaagtaattctgccttagcctactgagtagctgggattacaggcgcccaccaccatgcccagctaacttttgtatttttagtagagacagggtttcaccgtgtcggccaggatggtcttgaactcctgacttcagatgatctgcccaccttggtctccccaagtgctgggattaaaggtgtgagccactgtgcccagcccagtatttttttgtttgtttttaccgagatggagtcccgccccattgcccaggctagagtgcagtggcgtgatctcagtacactgcaacctccacttcccaggttcaagcgattctcctgcctcagcctcctgagcagttgggattacaggcacgcacttccacacctggcttacttttgtatttttagtagagacggggtttcaccatgttggccaggctggtctccaattcctgaccccaagggatccaccttaggcctggccgccaacattctgaaccttgtcttttctctgtcatgtattcaaagtccacgctggaaactccaatttcaggtcccttcagttttttgtccgttgtctttcgttctttgtccacgttgcccgtcccttgtgaactggatgctgtgtgtgagcaccagggactgaaaagctccagtgcagtg

SEQ ID NO: 356472 - DNA, 11786 bp, Homo sapiens
gggggcgctaggcgcccttcgctccctccctctggaggagctgccgccgccaccgccgccactctgctgctgccgccgccgccgccgccgctcccgccgccattttgggttcgctttgcggaggggagacgatcccagtctcggttgcgggacccgcctcccctcagtttgccccctttagccttccacctttcccttctcctctctcgcatttccgccagtcagcttacccgctggccgcctcctgacaagcgggagggatccgccgtggacccagggaagcggaggagcctggcggccaccccctcttccccacttccctgcactctcatcgctctcggcctcggcctcggcctccgacacgagaaagatgctggtttcgagttttggagatccttgttttttatggaacacagttctgtaaaattttcataagattccttggcaataacatacgcttgtgatggaccctagaaatactgctatgttaggattgggttctgattccgaaggtttttcaagaaagagtccttctgccatcagtactggcacattggtcagtaagagagaagtagagctagaaaaaaacacaaaggaggaagaggaccttcgcaaacggaatcgagaaagaaacatcgaagctgggaaagatgatggtttgactgatgcacagcaacagttttcagtgaaagaaacaaacttttcagagggaaatttaaaattgaaaattggcctccaggctaagagaactaaaaaacctccaaagaacttggagaactatgtatgtcgacctgccataaaaacaactattaagcacccaaggaaagcacttaaaagtggaaagatgacggatgaaaagaatgaacactgtccttcaaaacgagacccttcaaagttgtacaagaaagcagatgatgttgcagccattgaatgccagtctgaagaagtcatccgtcttcattcacagggagaaaacaatcctttgtctaagaagctgtctccagtacactcagaaatggcagattatattaatgcaacgccatctactcttcttggtagccgggatcctgatttaaaggacagagcattacttaatggaggaactagtgtaacagaaaagttggcacagctgattgctacctgtcctccttccaagtcttccaagacaaaaccgaagaagttaggaactggcactacagcaggattggttagcaaggatttgatcaggaaagcaggtgttggctctgtagctggaataatacataaggacttaataaaaaagccaaccatcagcacagcagttggattggtaactaaagatcctgggaaaaagccagtgtttaatgcagcagtaggattggtcaataaggactctgtgaaaaaactgggaactggcactacagcggtattcattaataaaaacttaggcaaaaagccaggaactatcactacagtaggactgctaagcaaagattcaggaaagaagctaggaattggtattgttccaggtttagtgcataaagagtctggcaagaagttaggacttggcactgtggttggactggttaataaagatttgggaaagaaattgggttctactgttggcctagtggccaaggactgtgcaaagaagattgtagcaagttcagcaatgggattggttaataaggacattggaaagaaactaatgagttgtcctttggcaggtctgatcagtaaagatgccataaaccttaaagccgaagcactgctccccactcaggaaccgcttaaggcttcttgtagtacaaacatcaataatcaggaaagtcaggaactttctgaatccctgaaagatagtgccaccagcaaaacttttgaaaagaatgttgtacggcagaataaagaaagcatattggaaaagttctcagtacgaaaagaaatcattaatttggagaaagaaatgtttaatgaaggaacatgcattcagcaagacagtttctcatccagtgaaaagggatcttatgaaacctcaaagcatgaaaagcagcctcctgtatattgcacttctccggactttaaaatgggaggtgcttctgatgtatctaccgctaaatccccattcagtgcagtaggagaaagcaatctcccttccccatcacctactgtatctgttaatcctttaaccagaagtccccctgaaacttcttcacagttggctcctaatccattacttttaagttctactacagaactaatcgaagaaatttctgaatctgttggaaagaaccagtttacttctgaaagtacccacttgaacgttggtcataggtcagttggtcatagtataagtattgaatgtaaagggattgataaagaggtaaatgattcaaaaactacccatatagatattccaagaataagctcttcccttggaaaaaagccaagtttgacttctgaatccagcattcatactattactccttcagttgttaacttcactagtttatttagtaataagccttttttaaaactgggtgcagtatctgcatcagacaaacactgccaagttgctgaaagcctaagtactagtttgcagtccaaaccattaaaaaaaagaaaaggaagaaaacctcggtggactaaagtggtggcaagaagcacatgccggtctccaaaagggctagaattagaaagatcagagctttttaaaaacgtttcatgtagctcactatcaaatagtaattctgagccagccaagtttatgaaaaacattggacccccttcatttgtagatcatgacttccttaaacgccgattgccaaagttgagcaaatccacagctccatctcttgctctcttagctgatagtgaaaaaccatctcataagtcttttgctactcacaaactatcctccagtatgtgtgtctctagtgaccttttgtctgatatttataagcccaaaagaggaaggcctaaatctaaggagatgcctcaactggaagggccacctaaaaggactttaaaaatccctgcttctaaagtgttttctttacagtctaaggaagaacaagaacccccaattttacagccagaaattgaaatcccttccttcaaacaaggtctgtctgtgtctccttttccaaaaaagagaggcaggcctaagaggcaaatgaggtcaccagtcaagatgaagccacctgtactgtcagtggctccatttgttgccactgaaagtccaagcaagctagaatctgaaagtgacaaccatagaagtagcagtgatttctttgagagcgaggatcaacttcaggatccagatgacctagatgacagtcataggccaagtgtctgtagtatgagtgaccttgagatggaaccagataaaaaaattaccaagagaaacaatggacaattaatgaaaacaattatccgcaaaataaataaaatgaagactttaaagagaaagaaactgttgaatcagattctttcaagttctgtagaatcaagtaataaagggaaagtgcaatccaaactccataatacggtatcaagtcttgctgccacatttggctctaaattgggccaacagataaatgtcagcaagaaaggaaccatttatataggaaagagaagaggtcgcaaaccaaaaactgtcttaaatggtattctttctggtagtcctactagccttgctgttcttgagcaaacagctcaacaggcagctgggtcagcattaggacagattcttcccccattactgccttcatctgctagtagttctgagattcttccatcacctatttgctctcagtcttctgggactagtggaggtcagagccctgtaagtagtgatgcaggttttgttgaacccagttcagtgccatatttgcatttacactccagacagggcagtatgattcagactcttgcaatgaagaaggcctcaaaggggaggaggcggttatctcctcctactttgttgccaaattctccttcgcacttgagtgaactcacatctctaaaagaagctactccttccccaatcagtgagtctcatagtgatgagaccattcccagtgatagtggaattggaacagataataacagcacatcagacagggcagagaaattttgtgggcaaaaaaagaggaggcattcttttgagcatgtttctctgattccccctgaaacctctacagtgctaagcagtcttaaagaaaaacataaacacaaatgtaagcgcaggaatcatgattacctcagctatgacaagatgaaaaggcagaaacgaaaacggaaaaagaaatatccccagcttcgaaatagacaggatccagactttattgcagagctggaggaactaataagtcgcctaagtgaaattcggatcactcatcgaagtcatcattttatcccccgagatcttctgccaactatctttcgaatcaactttaatagtttctatacacatccttctttccccttagaccctttgcactacattcgaaaacctgacttaaaaaagaaaagagggagaccccctaagatgagggaggcaatggctgaaatgccttttatgcacagccttagttttcctctttctagtactggattctatccatcttatggtatgccttactctccttcaccccttacagctgctcccataggattaggttactatggaaggtatcctcccactctttatccacctcctccatctccttctttcaccacgccacttccacctccttcctatatgcatgctggtcatttacttctcaatcctgccaaataccataagaaaaagcataagctacttcgacaggaggcctttcttacaaccagcaggactcccctcctttccatgagtacctaccccagtgttcctcctgagatggcctatggttggatggttgagcacaaacacaggcaccgtcacaaacacagagaacaccgttcttctgaacaaccccaggtttctatggacactggctcttcccgatctgtcctggaatctttgaagcgctatagatttggaaaggatgctgttggagagcgatataagcataaggaaaagcaccgttgtcacatgtcctgccctcatctctctccttcaaaaagcttaataaacagagaggaacagtgggtccaccgagagccttcagaatctagtccattggccttgggattgcagacacctttacagattgactgttcagaaagttctccaagcttatcccttggaggattcactcccaactctgagccagccagcagtgatgaacatacaaaccttttcacaagtgcaataggcagctgcagagtttcaaaccctaactccagtggccggaagaaattaactgacagccctggactcttttctgcacaggacacttcactaaatcggcttcacagaaaggagtcactgccttctaacgaaagggcagtacagactttggcaggctcccagccaacctctgataaaccctcccagcggccatcagagagcacaaattgtagccctacccggaaaaggtcttcatctgagagtacttcttcaacagtaaacggagttccctctcgaagtccaagattagttgcttctggggatgactctgtggatagtctgctgcagcggatggtacaaaatgaggaccaagagcccatggagaaaagtattgatgctgtgattgcaactgcctctgcaccaccttcttccagtccaggccgtagccacagcaaggaccgaaccctgggaaaaccagacagccttttagtgcctgcagtcgcaagtgactcttgcaataatagcatctcactcctatctgaaaagttgacaagcagctgttccccccatcatatcaagagaagtgtagtggaagctatgcaacgccaagctcggaaaatgtgcaattacgacaaaatcttggccacaaagaaaaacctagaccatgtcaataaaatcttaaaagccaaaaaacttcaaaggcaggccaggacagggaataactttgtgaaacgtaggccaggtcgacctcggaaatgtccccttcaggctgtcgtatcaatgcaagcattccaggctgctcagtttgtcaacccagaattgaacagagacgaggaaggagcagcactgcacctcagtcctgacacagttacagatgtaattgaggctgttgttcagagtgtaaatctgaacccagaacataaaaaggggttgaagagaaaaggttggctattggaagaacagaccagaaaaaagcagaagccattaccagaggaagaagagcaagagaataataaaagctttaatgaagcaccagttgagattcccagtccttctgaaaccccagctaaaccttctgaacctgaaagtaccttgcagcctgtgctttctctcatcccaagggaaaagaagcccccacgtcccccaaagaagaagtatcagaaagcagggctgtattctgacgtttacaaaactacagacccaaagagtcgattgatccaattaaagaaagagaagctggagtatactccaggagagcatgaatatggattatttccagcgcccattcatgttgtgttttttgtttcaggaaagtatctaagacaaaagagaattgacttccagcttccttatgatatcctttggcagtggaaacacaatcagctatacaaaaagccagatgtcccactatataagaaaattcgttcaaatgtctacgttgatgtcaaacccctttctggttacgaagctaccacctgtaactgtaagaagccagatgatgacaccaggaagggctgtgttgatgactgcctcaatagaatgatctttgctgagtgttcccccaacacttgcccatgtggcgagcaatgctgtaaccagaggatacagaggcatgaatgggtgcaatgtctagaacgatttcgagctgaggaaaaaggttggggaatcagaaccaaagagcccctaaaagctgggcagttcatcattgaatacctaggggaggtcgtcagtgaacaggagttcaggaacaggatgattgagcagtatcataatcacagtgaccactactgcctgaacctggatagtgggatggtgattgacagttaccgcatgggaaatgaggcccgattcatcaaccatagctgtgacccaaattgtgaaatgcagaaatggtctgttaatggagtataccggattggactctatgctcttaaagacatgccagctgggactgaactcacttatgattataactttcattccttcaatgtggaaaaacagcaactttgtaagtgtggctttgagaaatgtcgaggaatcatcggaggcaagagtcagcgtgtgaatggactcaccagcagcaaaaacagccagcccatggccacacacaaaaaatctggacggtcaaaagagaagagaaagtctaagcacaagctgaagaaaaggagaggccatctctctgaggaacccagtgaaaatatcaacaccccaactagattgaccccccaattacagatgaagccaatgtccaatcgtgaaaggaactttgtgttaaagcatcatgtattcttggtccgaaactgggagaagattcgtcaaaaacaggaggaagtaaagcacaccagtgataatattcactcagcatcattatatacccgttggaatgggatctgccgagatgatgggaatatcaagtctgatgtcttcatgacccagttctctgccctgcagacagctcgatctgttcgaacaagacggttggcagctgcagaggaaaatattgaagtggctcgggcagcccgcctagcccagatcttcaaagaaatttgtgatggtatcatctcttataaagattcttcccggcaagcactggcagctccacttttgaaccttcccccaaagaaaaagaatgctgattattatgagaagatctctgatcccctagatcttatcaccatagagaagcagatcctcactggttactataagacagtggaagcttttgatgctgacatgctcaaagtctttcggaatgctgagaagtactatgggcgtaaatccccagttgggagagatgtttgtcgtctacgaaaggcctattacaatgcccggcatgaggcatcagcccagattgatgagattgtgggagagacagcaagtgaggcagacagcagtgagacctcagtctctgaaaaggagaatgggcatgagaaggacgacgatgttattcgctgtatctgtggcctctacaacgatgaaggtctcatgatccagtgtgacaagtgcatggtatggcagcactgtgattgtatgggagtgaactcagatgtggagcactacctttgtgagcagtgtgacccaaggcctgtggacagggaggttcccatgatccctcggccccactatgcccaacctggctgtgtctacttcatctgtttgctccgagatgacttgctgcttcgtcagggtgactgtgtgtatctgatgagggatagtcggcgcacccctgatggccacccggtccgtcagtcctatcgactgttatctcacattaaccgagataaacttgacatctttcgcattgagaagctttggaagaatgaaaaagaggaacggtttgcctttggtcaccattatttccgtccccacgaaacacaccactctccatcccgtcggttctatcataatgaactatttcgggtgccactctatgagatcattcccttggaggctgtagtggggacctgctgtgtgttggacctttatacgtattgtaaagggagacccaaaggagtaaaggagcaagatgtgtacatctgtgattatcggcttgacaagtcagcacacctgttttacaagatccaccggaaccgctatcctgtctgcaccaaaccctatgcttttgatcacttccccaagaagctcactcccaaaaaagatttctcgcctcattacgtcccagacaactacaagaggaatggaggacgatcatcctggaagtctgagcgctcaaagccacccctaaaagacttgggccaggaggatgatgctctacccttgattgaagaggttctagccagtcaagagcaagcagccaatgagatacccagcctggaggagccagaacgggaaggggccactgctaacgtcagtgagggtgaaaaaaaaacagaggaaagtagtcaagaaccccagtcaacctgtacccctgaggaacgacggcataaccaacgggaacgactcaaccagatcttgctcaatctccttgaaaaaatccctggaaaaaatgccattgatgtgacctacttgctggaggaaggatcaggcaggaaactgcgaaggcgtactttgtttatcccagaaaacagctttcgaaagtgaccctcaaagaatgagaacctcaagcatctgggatccagtggagctaatcagtcctgcctcctgctctctgggtatagacaggggtgggaagggtccatctgggcaaggggaatggggccatgttgttgacattaggtacttaataagccttggagctagtggagagggagaggaaagggttctgtccaagacagttcaggttaattaattttcttctccattgcttcaccttaagggttaataatgtagagaggagggaggaccacattgatgaccagaacctactggtactttatagcatttgccccaccccacagcttaggtttttctgtcatcctcagatcccacaggcattgcgaagaagctgcttcctatacccaggtataactcaaaatccaaagggatagggccaggatccctattcctaccccatctattctctgttggctccaagagctaccccagagaccttaaacagaaacagtagctgaggcttcttcctagatacctgactagggaagtttgtctctcctttcttgcccaaccaggtcaaagtaaaatgtgagttgacagctcaaagcacttgtaactgctgccccctccctacctctactccccaaaatggaatcatgggatagggaaggcccccatggggtcagaagggcacggtagttcttgcaattatttttgttttacccttcataacctgtcaaacatatttttttctaatgagaaagccaggcccccgccagcacacatgctgtttttaatgcgctgtagttcttgtgtgtctgctgtgctgtgcaaatggagattcagttcaaaataaaatcatttaaaaacctacataaaaagaactctaaacccacccctgcaacaaaagtcactacataaactgttcagcagtattcacctatcagagtatttgttgtgagtatagattatcaattgaaaacactactcttgttttcttaattgtacagttttcaatgtccctttcttaaagagacagtatatttctcttcacccctagcccatcttccctcaccctcctgaatgacatcaggaggtatatccagggtgtctccttccttcctactctcttgaccagaagttaacagactatactgtctctttaaaaataaaatttaaaaagctttgttgtcttttcagacatacatatgcatatatgttttagatgttcttataagagaaaagatggtttttaaatgtgccaagttgtgtgtgtgtgtgtatatatatgtgtgtatgtgtgtgtatatatatatgtgtgtgtgtgtgtatatatatacacacacacacacacacctgctgtgtgattggtaagcaatacaatagtaaacatgtccccattacttttttctaatattggaccaatgctgtcctaattgtacatttccccttatggtgacgatgctctgactcgtttaggtagacacattgaccaccttccattccattaaatattttttcctttttcccctttctgtgtcattcttgaggaaaaaacaaaagagagaggggatgccaatgatccccttgagcagagaaaaagcaaaataaatattttattaaagaaaaaagagaattaagaaaatagtttggagtattttcttactgtagagaagcactgtacattactaagagacctgggtataagatactcacatgtggagctggaaaaatcgcatgtccaagcccgtttgagtggtttcttttgtttttcattgcagggagtgggtgggagggaggtgggactaggggcactttgggggtctccttttagtcaaaagcgagaaaatgacaagaaagagattaaaattcaatgtttcctttatagtgttaaacactaaaattttaaaaaagatgaaaaagaaaaaaaaactttgtaaaatgcgagaacagaagcaaaagacactacgctctgtcattttatctttcttttgttgaaagactaaaaaaaaactgaaatgttttttagacaatcaaatgttaggtaagtgcaaaaacttgttttttcttactggtgtagaaattaatgcctttttttatttttcagttattttataataacgaaataaaaagaaccccccagctgccaggcgggttttggtgtttgaaatgcggggcaaagcactacatcactgcaaatagatacagagttagtctgcatgtctgtaggctgtgtgattgcggaaaatataaatgctgctaatatatttcctttttacaaaagcatatctaaatagatgattgttttgatgttaatctttgtaaattatgtattaccaattttaacattggatgtaattgcatacaaagcttgcatctcaatccttgaaagtctagtattaaatggaaaaaacttttcctaactgtggaaaaaaaaaaa

SEQ ID NO: 356473 - DNA, 11736 bp, Homo sapiens
gggggcgctaggcgcccttcgctccctccctctggaggagctgccgccgccaccgccgccactctgctgctgccgccgccgccgccgccgctcccgccgccattttgggttcgctttgcggaggggagacgatcccagtctcggttgcgggacccgcctcccctcagtttgccccctttagccttccacctttcccttctcctctctcgcatttccgccagtcagcttacccgctggccgcctcctgacaagcgggagggatccgccgtggacccagggaagcggaggagcctggcggccaccccctcttccccacttccctgcactctcatcgctctcggcctcggcctcggcctccgacacgagaaagatgctggtttcgagttttggagatccttgttttttatggaacacagttctgtaaaattttcataagattccttggcaataacatacgcttgtgatggaccctagaaatactgctatgttaggattgggttctgattccgaaggtttttcaagaaagagtccttctgccatcagtactggcacattggtcagtaagagagaagtagagctagaaaaaaacacaaaggaggaagaggaccttcgcaaacggaatcgagaaagaaacatcgaagctgggaaagatgatggtttgactgatgcacagcaacagttttcagtgaaagaaacaaacttttcagagggaaatttaaaattgaaaattggcctccaggctaagagaactaaaaaacctccaaagaacttggagaactatgtatgtcgacctgccataaaaacaactattaagcacccaaggaaagcacttaaaagtggaaagatgacggatgaaaagaatgaacactgtccttcaaaacgagacccttcaaagttgtacaagaaagcagatgatgttgcagccattgaatgccagtctgaagaagtcatccgtcttcattcacagggagaaaacaatcctttgtctaagaagctgtctccagtacactcagaaatggcagattatattaatgcaacgccatctactcttcttggtagccgggatcctgatttaaaggacagagcattacttaatggaggaactagtgtaacagaaaagttggcacagctgattgctacctgtcctccttccaagtcttccaagacaaaaccgaagaagttaggaactggcactacagcaggattggttagcaaggatttgatcaggaaagcaggtgttggctctgtagctggaataatacataaggacttaataaaaaagccaaccatcagcacagcagttggattggtaactaaagatcctgggaaaaagccagtgtttaatgcagcagtaggattggtcaataaggactctgtgaaaaaactgggaactggcactacagcggtattcattaataaaaacttaggcaaaaagccaggaactatcactacagtaggactgctaagcaaagattcaggaaagaagctaggaattggtattgttccaggtttagtgcataaagagtctggcaagaagttaggacttggcactgtggttggactggttaataaagatttgggaaagaaattgggttctactgttggcctagtggccaaggactgtgcaaagaagattgtagcaagttcagcaatgggattggttaataaggacattggaaagaaactaatgagttgtcctttggcaggtctgatcagtaaagatgccataaaccttaaagccgaagcactgctccccactcaggaaccgcttaaggcttcttgtagtacaaacatcaataatcaggaaagtcaggaactttctgaatccctgaaagatagtgccaccagcaaaacttttgaaaagaatgttgtacggcagaataaagaaagcatattggaaaagttctcagtacgaaaagaaatcattaatttggagaaagaaatgtttaatgaaggaacatgcattcagcaagacagtttctcatccagtgaaaagggatcttatgaaacctcaaagcatgaaaagcagcctcctgtatattgcacttctccggactttaaaatgggaggtgcttctgatgtatctaccgctaaatccccattcagtgcagtaggagaaagcaatctcccttccccatcacctactgtatctgttaatcctttaaccagaagtccccctgaaacttcttcacagttggctcctaatccattacttttaagttctactacagaactaatcgaagaaatttctgaatctgttggaaagaaccagtttacttctgaaagtacccacttgaacgttggtcataggtcagttggtcatagtataagtattgaatgtaaagggattgataaagaggtaaatgattcaaaaactacccatatagatattccaagaataagctcttcccttggaaaaaagccaagtttgacttctgaatccagcattcatactattactccttcagttgttaacttcactagtttatttagtaataagccttttttaaaactgggtgcagtatctgcatcagacaaacactgccaagttgctgaaagcctaagtactagtttgcagtccaaaccattaaaaaaaagaaaaggaagaaaacctcggtggactaaagtggtggcaagaagcacatgccggtctccaaaagggctagaattagaaagatcagagctttttaaaaacgtttcatgtagctcactatcaaatagtaattctgagccagccaagtttatgaaaaacattggacccccttcatttgtagatcatgacttccttaaacgccgattgccaaagttgagcaaatccacagctccatctcttgctctcttagctgatagtgaaaaaccatctcataagtcttttgctactcacaaactatcctccagtatgtgtgtctctagtgaccttttgtctgatatttataagcccaaaagaggaaggcctaaatctaaggagatgcctcaactggaagggccacctaaaaggactttaaaaatccctgcttctaaagtgttttctttacagtctaaggaagaacaagaacccccaattttacagccagaaattgaaatcccttccttcaaacaaggtctgtctgtgtctccttttccaaaaaagagaggcaggcctaagaggcaaatgaggtcaccagtcaagatgaagccacctgtactgtcagtggctccatttgttgccactgaaagtccaagcaagctagaatctgaaagtgacaaccatagaagtagcagtgatttctttgagagcgaggatcaacttcaggatccagatgacctagatgacagtcataggccaagtgtctgtagtatgagtgaccttgagatggaaccagataaaaaaattaccaagagaaacaatggacaattaatgaaaacaattatccgcaaaataaataaaatgaagactttaaagagaaagaaactgttgaatcagattctttcaagttctgtagaatcaagtaataaagggaaagtgcaatccaaactccataatacggtatcaagtcttgctgccacatttggctctaaattgggccaacagataaatgtcagcaagaaaggaaccatttatataggaaagagaagaggtcgcaaaccaaaaactgtcttaaatggtattctttctggtagtcctactagccttgctgttcttgagcaaacagctcaacaggcagctgggtcagcattaggacagattcttcccccattactgccttcatctgctagtagttctgagattcttccatcacctatttgctctcagtcttctgggactagtggaggtcagagccctgtaagtagtgatgcaggttttgttgaacccagttcagtgccatatttgcatttacactccagacagggcagtatgattcagactcttgcaatgaagaaggcctcaaaggggaggaggcggttatctcctcctactttgttgccaaattctccttcgcacttgagtgaactcacatctctaaaagaagctactccttccccaatcagtgagtctcatagtgatgagaccattcccagtgatagtggaattggaacagataataacagcacatcagacagggcagagaaattttgtgggcaaaaaaagaggaggcattcttttgagcatgtttctctgattccccctgaaacctctacagtgctaagcagtcttaaagaaaaacataaacacaaatgtaagcgcaggaatcatgattacctcagctatgacaagatgaaaaggcagaaacgaaaacggaaaaagaaatatccccagcttcgaaatagacaggatccagactttattgcagagctggaggaactaataagtcgcctaagtgaaattcggatcactcatcgaagtcatcattttatcccccgagatcttctgccaactatctttcgaatcaactttaatagtttctatacacatccttctttccccttagaccctttgcactacattcgaaaacctgacttaaaaaagaaaagagggagaccccctaagatgagggaggcaatggctgaaatgccttttatgcacagccttagttttcctctttctagtactggattctatccatcttatggtatgccttactctccttcaccccttacagctgctcccataggattaggttactatggaaggtatcctcccactctttatccacctcctccatctccttctttcaccacgccacttccacctccttcctatatgcatgctggtcatttacttctcaatcctgccaaataccataagaaaaagcataagctacttcgacaggaggcctttcttacaaccagcaggactcccctcctttccatgagtacctaccccagtgttcctcctgagatggcctatggttggatggttgagcacaaacacaggcaccgtcacaaacacagagaacaccgttcttctgaacaaccccaggtttctatggacactggctcttcccgatctgtcctggaatctttgaagcgctatagatttggaaaggatgctgttggagagcgatataagcataaggaaaagcaccgttgtcacatgtcctgccctcatctctctccttcaaaaagcttaataaacagagaggaacagtgggtccaccgagagccttcagaatctagtccattggccttgggattgcagacacctttacagattgactgttcagaaagttctccaagcttatcccttggaggattcactcccaactctgagccagccagcagtgatgaacatacaaaccttttcacaagtgcaataggcagctgcagagtttcaaaccctaactccagtggccggaagaaattaactgacagccctggactcttttctgcacaggacacttcactaaatcggcttcacagaaaggagtcactgccttctaacgaaagggcagtacagactttggcaggctcccagccaacctctgataaaccctcccagcggccatcagagagcacaaattgtagccctacccggaaaaggtcttcatctgagagtacttcttcaacagtaaacggagttccctctcgaagtccaagattagttgcttctggggatgactctgtggatagtctgctgcagcggatggtacaaaatgaggaccaagagcccatggagaaaagtattgatgctgtgattgcaactgcctctgcaccaccttcttccagtccaggccgtagccacagcaaggaccgaaccctgggaaaaccagacagccttttagtgcctgcagtcgcaagtgactcttgcaataatagcatctcactcctatctgaaaagttgacaagcagctgttccccccatcatatcaagagaagtgtagtggaagctatgcaacgccaagctcggaaaatgtgcaattacgacaaaatcttggccacaaagaaaaacctagaccatgtcaataaaatcttaaaagccaaaaaacttcaaaggcaggccaggacagggaataactttgtgaaacgtaggccaggtcgacctcggaaatgtccccttcaggctgtcgtatcaatgcaagcattccaggctgctcagtttgtcaacccagaattgaacagagacgaggaaggagcagcactgcacctcagtcctgacacagttacagatgtaattgaggctgttgttcagagtgtaaatctgaacccagaacataaaaaggggttgaagagaaaaggttggctattggaagaacagaccagaaaaaagcagaagccattaccagaggaagaagagcaagagaataataaaagctttaatgaagcaccagttgagattcccagtccttctgaaaccccagctaaaccttctgaacctgaaagtaccttgcagcctgtgctttctctcatcccaagggaaaagaagcccccacgtcccccaaagaagaagtatcagaaagcagggctgtattctgacgtttacaaaactacagacccaaagagtcgattgatccaattaaagaaagagaagctggagtatactccaggagagcatgaatatggattatttccagcgcccattcatgttgtgttttttgtttcaggaaagtatctaagacaaaagagaattgacttccagcttccttatgatatcctttggcagtggaaacacaatcagctatacaaaaagccagatgtcccactatataagaaaattcgttcaaatgtctacgttgatgtcaaacccctttctggttacgaagctaccacctgtaactgtaagaagccagatgatgacaccaggaagggctgtgttgatgactgcctcaatagaatgatctttgctgagtgttcccccaacacttgcccatgtggcgagcaatgctgtaaccagaggatacagaggcatgaatgggtgcaatgtctagaacgatttcgagctgaggaaaaaggttggggaatcagaaccaaagagcccctaaaagctgggcagttcatcattgaatacctaggggaggtcgtcagtgaacaggagttcaggaacaggatgattgagcagtatcataatcacagtgaccactactgcctgaacctggatagtgggatggtgattgacagttaccgcatgggaaatgaggcccgattcatcaaccatagctgtgacccaaattgtgaaatgcagaaatggtctgttaatggagtataccggattggactctatgctcttaaagacatgccagctgggactgaactcacttatgattataactttcattccttcaatgtggaaaaacagcaactttgtaagtgtggctttgagaaatgtcgaggaatcatcggaggcaagagtcagcgtgtgaatggactcaccagcagcaaaaacagccagcccatggccacacacaaaaaatctggacggtcaaaagagaagagaaagtctaagcacaagctgaagaaaaggagaggccatctctctgaggaacccagtgaaaatatcaacaccccaactagattgaccccccaattacagatgaagccaatgtccaatcgtgaaaggaactttgtgttaaagcatcatgtattcttggtccgaaactgggagaagattcgtcaaaaacaggaggaagtaaagcacaccagtgataatattcactcagcatcattatatacccgttggaatgggatctgccgagatgatgggaatatcaagtctgatgtcttcatgacccagttctctgccctgcagacagctcgatctgttcgaacaagacggttggcagctgcagaggaaaatattgaagtggctcgggcagcccgcctagcccagatcttcaaagaaatttgtgatggtatcatctcttataaagattcttcccggcaagcactggcagctccacttttgaaccttcccccaaagaaaaagaatgctgattattatgagaagatctctgatcccctagatcttatcaccatagagaagcagatcctcactggttactataagacagtggaagcttttgatgctgacatgctcaaagtctttcggaatgctgagaagtactatgggcgtaaatccccagttgggagagatgtttgtcgtctacgaaaggcctattacaatgcccggcatgaggcatcagcccagattgatgagattgtgggagagacagcaagtgaggcagacagcagtgagacctcagtctctgaaaaggagaatgggcatgagaaggacgacgatgttattcgctgtatctgtggcctctacaacgatgaaggtctcatgatccagtgtgacaagtgcatggtatggcagcactgtgattgtatgggagtgaactcagatgtggagcactacctttgtgagcagtgtgacccaaggcctgtggacagggaggttcccatgatccctcggccccactatgcccaacctggctgtgtctacttcatctgtttgctccgagatgacttgctgcttcgtcagggtgactgtgtgtatctgatgagggatagtcggcgcacccctgatggccacccggtccgtcagtcctatcgactgttatctcacattaaccgagataaacttgacatctttcgcattgagaagctttggaagaatgaaaaaccactctccatcccgtcggttctatcataatgaactatttcgggtgccactctatgagatcattcccttggaggctgtagtggggacctgctgtgtgttggacctttatacgtattgtaaagggagacccaaaggagtaaaggagcaagatgtgtacatctgtgattatcggcttgacaagtcagcacacctgttttacaagatccaccggaaccgctatcctgtctgcaccaaaccctatgcttttgatcacttccccaagaagctcactcccaaaaaagatttctcgcctcattacgtcccagacaactacaagaggaatggaggacgatcatcctggaagtctgagcgctcaaagccacccctaaaagacttgggccaggaggatgatgctctacccttgattgaagaggttctagccagtcaagagcaagcagccaatgagatacccagcctggaggagccagaacgggaaggggccactgctaacgtcagtgagggtgaaaaaaaaacagaggaaagtagtcaagaaccccagtcaacctgtacccctgaggaacgacggcataaccaacgggaacgactcaaccagatcttgctcaatctccttgaaaaaatccctggaaaaaatgccattgatgtgacctacttgctggaggaaggatcaggcaggaaactgcgaaggcgtactttgtttatcccagaaaacagctttcgaaagtgaccctcaaagaatgagaacctcaagcatctgggatccagtggagctaatcagtcctgcctcctgctctctgggtatagacaggggtgggaagggtccatctgggcaaggggaatggggccatgttgttgacattaggtacttaataagccttggagctagtggagagggagaggaaagggttctgtccaagacagttcaggttaattaattttcttctccattgcttcaccttaagggttaataatgtagagaggagggaggaccacattgatgaccagaacctactggtactttatagcatttgccccaccccacagcttaggtttttctgtcatcctcagatcccacaggcattgcgaagaagctgcttcctatacccaggtataactcaaaatccaaagggatagggccaggatccctattcctaccccatctattctctgttggctccaagagctaccccagagaccttaaacagaaacagtagctgaggcttcttcctagatacctgactagggaagtttgtctctcctttcttgcccaaccaggtcaaagtaaaatgtgagttgacagctcaaagcacttgtaactgctgccccctccctacctctactccccaaaatggaatcatgggatagggaaggcccccatggggtcagaagggcacggtagttcttgcaattatttttgttttacccttcataacctgtcaaacatatttttttctaatgagaaagccaggcccccgccagcacacatgctgtttttaatgcgctgtagttcttgtgtgtctgctgtgctgtgcaaatggagattcagttcaaaataaaatcatttaaaaacctacataaaaagaactctaaacccacccctgcaacaaaagtcactacataaactgttcagcagtattcacctatcagagtatttgttgtgagtatagattatcaattgaaaacactactcttgttttcttaattgtacagttttcaatgtccctttcttaaagagacagtatatttctcttcacccctagcccatcttccctcaccctcctgaatgacatcaggaggtatatccagggtgtctccttccttcctactctcttgaccagaagttaacagactatactgtctctttaaaaataaaatttaaaaagctttgttgtcttttcagacatacatatgcatatatgttttagatgttcttataagagaaaagatggtttttaaatgtgccaagttgtgtgtgtgtgtgtatatatatgtgtgtatgtgtgtgtatatatatatgtgtgtgtgtgtgtatatatatacacacacacacacacacctgctgtgtgattggtaagcaatacaatagtaaacatgtccccattacttttttctaatattggaccaatgctgtcctaattgtacatttccccttatggtgacgatgctctgactcgtttaggtagacacattgaccaccttccattccattaaatattttttcctttttcccctttctgtgtcattcttgaggaaaaaacaaaagagagaggggatgccaatgatccccttgagcagagaaaaagcaaaataaatattttattaaagaaaaaagagaattaagaaaatagtttggagtattttcttactgtagagaagcactgtacattactaagagacctgggtataagatactcacatgtggagctggaaaaatcgcatgtccaagcccgtttgagtggtttcttttgtttttcattgcagggagtgggtgggagggaggtgggactaggggcactttgggggtctccttttagtcaaaagcgagaaaatgacaagaaagagattaaaattcaatgtttcctttatagtgttaaacactaaaattttaaaaaagatgaaaaagaaaaaaaaactttgtaaaatgcgagaacagaagcaaaagacactacgctctgtcattttatctttcttttgttgaaagactaaaaaaaaactgaaatgttttttagacaatcaaatgttaggtaagtgcaaaaacttgttttttcttactggtgtagaaattaatgcctttttttatttttcagttattttataataacgaaataaaaagaaccccccagctgccaggcgggttttggtgtttgaaatgcggggcaaagcactacatcactgcaaatagatacagagttagtctgcatgtctgtaggctgtgtgattgcggaaaatataaatgctgctaatatatttcctttttacaaaagcatatctaaatagatgattgttttgatgttaatctttgtaaattatgtattaccaattttaacattggatgtaattgcatacaaagcttgcatctcaatccttgaaagtctagtattaaatggaaaaaacttttcctaactgtggaaaaaaaaaaa

SEQ ID NO: 356474 - DNA, 11447 bp, Homo sapiens
gaggcttgggcttgcgccgttgaagagaaagatgctggtttcgagttttggagatccttgttttttatggaacacagttctgtaaaattttcataagattccttggcaataacatacgcttgtgatggaccctagaaatactgctatgttaggattgggttctgattccgaaggtttttcaagaaagagtccttctgccatcagtactggcacattggtcagtaagagagaagtagagctagaaaaaaacacaaaggaggaagaggaccttcgcaaacggaatcgagaaagaaacatcgaagctgggaaagatgatggtttgactgatgcacagcaacagttttcagtgaaagaaacaaacttttcagagggaaatttaaaattgaaaattggcctccaggctaagagaactaaaaaacctccaaagaacttggagaactatgtatgtcgacctgccataaaaacaactattaagcacccaaggaaagcacttaaaagtggaaagatgacggatgaaaagaatgaacactgtccttcaaaacgagacccttcaaagttgtacaagaaagcagatgatgttgcagccattgaatgccagtctgaagaagtcatccgtcttcattcacagggagaaaacaatcctttgtctaagaagctgtctccagtacactcagaaatggcagattatattaatgcaacgccatctactcttcttggtagccgggatcctgatttaaaggacagagcattacttaatggaggaactagtgtaacagaaaagttggcacagctgattgctacctgtcctccttccaagtcttccaagacaaaaccgaagaagttaggaactggcactacagcaggattggttagcaaggatttgatcaggaaagcaggtgttggctctgtagctggaataatacataaggacttaataaaaaagccaaccatcagcacagcagttggattggtaactaaagatcctgggaaaaagccagtgtttaatgcagcagtaggattggtcaataaggactctgtgaaaaaactgggaactggcactacagcggtattcattaataaaaacttaggcaaaaagccaggaactatcactacagtaggactgctaagcaaagattcaggaaagaagctaggaattggtattgttccaggtttagtgcataaagagtctggcaagaagttaggacttggcactgtggttggactggttaataaagatttgggaaagaaattgggttctactgttggcctagtggccaaggactgtgcaaagaagattgtagcaagttcagcaatgggattggttaataaggacattggaaagaaactaatgagttgtcctttggcaggtctgatcagtaaagatgccataaaccttaaagccgaagcactgctccccactcaggaaccgcttaaggcttcttgtagtacaaacatcaataatcaggaaagtcaggaactttctgaatccctgaaagatagtgccaccagcaaaacttttgaaaagaatgttgtacggcagaataaagaaagcatattggaaaagttctcagtacgaaaagaaatcattaatttggagaaagaaatgtttaatgaaggaacatgcattcagcaagacagtttctcatccagtgaaaagggatcttatgaaacctcaaagcatgaaaagcagcctcctgtatattgcacttctccggactttaaaatgggaggtgcttctgatgtatctaccgctaaatccccattcagtgcagtaggagaaagcaatctcccttccccatcacctactgtatctgttaatcctttaaccagaagtccccctgaaacttcttcacagttggctcctaatccattacttttaagttctactacagaactaatcgaagaaatttctgaatctgttggaaagaaccagtttacttctgaaagtacccacttgaacgttggtcataggtcagttggtcatagtataagtattgaatgtaaagggattgataaagaggtaaatgattcaaaaactacccatatagatattccaagaataagctcttcccttggaaaaaagccaagtttgacttctgaatccagcattcatactattactccttcagttgttaacttcactagtttatttagtaataagccttttttaaaactgggtgcagtatctgcatcagacaaacactgccaagttgctgaaagcctaagtactagtttgcagtccaaaccattaaaaaaaagaaaaggaagaaaacctcggtggactaaagtggtggcaagaagcacatgccggtctccaaaagggctagaattagaaagatcagagctttttaaaaacgtttcatgtagctcactatcaaatagtaattctgagccagccaagtttatgaaaaacattggacccccttcatttgtagatcatgacttccttaaacgccgattgccaaagttgagcaaatccacagctccatctcttgctctcttagctgatagtgaaaaaccatctcataagtcttttgctactcacaaactatcctccagtatgtgtgtctctagtgaccttttgtctgatatttataagcccaaaagaggaaggcctaaatctaaggagatgcctcaactggaagggccacctaaaaggactttaaaaatccctgcttctaaagtgttttctttacagtctaaggaagaacaagaacccccaattttacagccagaaattgaaatcccttccttcaaacaaggtctgtctgtgtctccttttccaaaaaagagaggcaggcctaagaggcaaatgaggtcaccagtcaagatgaagccacctgtactgtcagtggctccatttgttgccactgaaagtccaagcaagctagaatctgaaagtgacaaccatagaagtagcagtgatttctttgagagcgaggatcaacttcaggatccagatgacctagatgacagtcataggccaagtgtctgtagtatgagtgaccttgagatggaaccagataaaaaaattaccaagagaaacaatggacaattaatgaaaacaattatccgcaaaataaataaaatgaagactttaaagagaaagaaactgttgaatcagattctttcaagttctgtagaatcaagtaataaagggaaagtgcaatccaaactccataatacggtatcaagtcttgctgccacatttggctctaaattgggccaacagataaatgtcagcaagaaaggaaccatttatataggaaagagaagaggtcgcaaaccaaaaactgtcttaaatggtattctttctggtagtcctactagccttgctgttcttgagcaaacagctcaacaggcagctgggtcagcattaggacagattcttcccccattactgccttcatctgctagtagttctgagattcttccatcacctatttgctctcagtcttctgggactagtggaggtcagagccctgtaagtagtgatgcaggttttgttgaacccagttcagtgccatatttgcatttacactccagacagggcagtatgattcagactcttgcaatgaagaaggcctcaaaggggaggaggcggttatctcctcctactttgttgccaaattctccttcgcacttgagtgaactcacatctctaaaagaagctactccttccccaatcagtgagtctcatagtgatgagaccattcccagtgatagtggaattggaacagataataacagcacatcagacagggcagagaaattttgtgggcaaaaaaagaggaggcattcttttgagcatgtttctctgattccccctgaaacctctacagtgctaagcagtcttaaagaaaaacataaacacaaatgtaagcgcaggaatcatgattacctcagctatgacaagatgaaaaggcagaaacgaaaacggaaaaagaaatatccccagcttcgaaatagacaggatccagactttattgcagagctggaggaactaataagtcgcctaagtgaaattcggatcactcatcgaagtcatcattttatcccccgagatcttctgccaactatctttcgaatcaactttaatagtttctatacacatccttctttccccttagaccctttgcactacattcgaaaacctgacttaaaaaagaaaagagggagaccccctaagatgagggaggcaatggctgaaatgccttttatgcacagccttagttttcctctttctagtactggattctatccatcttatggtatgccttactctccttcaccccttacagctgctcccataggattaggttactatggaaggtatcctcccactctttatccacctcctccatctccttctttcaccacgccacttccacctccttcctatatgcatgctggtcatttacttctcaatcctgccaaataccataagaaaaagcataagctacttcgacaggaggcctttcttacaaccagcaggactcccctcctttccatgagtacctaccccagtgttcctcctgagatggcctatggttggatggttgagcacaaacacaggcaccgtcacaaacacagagaacaccgttcttctgaacaaccccaggtttctatggacactggctcttcccgatctgtcctggaatctttgaagcgctatagatttggaaaggatgctgttggagagcgatataagcataaggaaaagcaccgttgtcacatgtcctgccctcatctctctccttcaaaaagcttaataaacagagaggaacagtgggtccaccgagagccttcagaatctagtccattggccttgggattgcagacacctttacagattgactgttcagaaagttctccaagcttatcccttggaggattcactcccaactctgagccagccagcagtgatgaacatacaaaccttttcacaagtgcaataggcagctgcagagtttcaaaccctaactccagtggccggaagaaattaactgacagccctggactcttttctgcacaggacacttcactaaatcggcttcacagaaaggagtcactgccttctaacgaaagggcagtacagactttggcaggctcccagccaacctctgataaaccctcccagcggccatcagagagcacaaattgtagccctacccggaaaaggtcttcatctgagagtacttcttcaacagtaaacggagttccctctcgaagtccaagattagttgcttctggggatgactctgtggatagtctgctgcagcggatggtacaaaatgaggaccaagagcccatggagaaaagtattgatgctgtgattgcaactgcctctgcaccaccttcttccagtccaggccgtagccacagcaaggaccgaaccctgggaaaaccagacagccttttagtgcctgcagtcgcaagtgactcttgcaataatagcatctcactcctatctgaaaagttgacaagcagctgttccccccatcatatcaagagaagtgtagtggaagctatgcaacgccaagctcggaaaatgtgcaattacgacaaaatcttggccacaaagaaaaacctagaccatgtcaataaaatcttaaaagccaaaaaacttcaaaggcaggccaggacagggaataactttgtgaaacgtaggccaggtcgacctcggaaatgtccccttcaggctgtcgtatcaatgcaagcattccaggctgctcagtttgtcaacccagaattgaacagagacgaggaaggagcagcactgcacctcagtcctgacacagttacagatgtaattgaggctgttgttcagagtgtaaatctgaacccagaacataaaaaggggttgaagagaaaaggttggctattggaagaacagaccagaaaaaagcagaagccattaccagaggaagaagagcaagagaataataaaagctttaatgaagcaccagttgagattcccagtccttctgaaaccccagctaaaccttctgaacctgaaagtaccttgcagcctgtgctttctctcatcccaagggaaaagaagcccccacgtcccccaaagaagaagtatcagaaagcagggctgtattctgacgtttacaaaactacagacccaaagagtcgattgatccaattaaagaaagagaagctggagtatactccaggagagcatgaatatggattatttccagcgcccattcatgttgtgttttttgtttcaggaaagtatctaagacaaaagagaattgacttccagcttccttatgatatcctttggcagtggaaacacaatcagctatacaaaaagccagatgtcccactatataagaaaattcgttcaaatgtctacgttgatgtcaaacccctttctggttacgaagctaccacctgtaactgtaagaagccagatgatgacaccaggaagggctgtgttgatgactgcctcaatagaatgatctttgctgagtgttcccccaacacttgcccatgtggcgagcaatgctgtaaccagaggatacagaggcatgaatgggtgcaatgtctagaacgatttcgagctgaggaaaaaggttggggaatcagaaccaaagagcccctaaaagctgggcagttcatcattgaatacctaggggaggtcgtcagtgaacaggagttcaggaacaggatgattgagcagtatcataatcacagtgaccactactgcctgaacctggatagtgggatggtgattgacagttaccgcatgggaaatgaggcccgattcatcaaccatagctgtgacccaaattgtgaaatgcagaaatggtctgttaatggagtataccggattggactctatgctcttaaagacatgccagctgggactgaactcacttatgattataactttcattccttcaatgtggaaaaacagcaactttgtaagtgtggctttgagaaatgtcgaggaatcatcggaggcaagagtcagcgtgtgaatggactcaccagcagcaaaaacagccagcccatggccacacacaaaaaatctggacggtcaaaagagaagagaaagtctaagcacaagctgaagaaaaggagaggccatctctctgaggaacccagtgaaaatatcaacaccccaactagattgaccccccaattacagatgaagccaatgtccaatcgtgaaaggaactttgtgttaaagcatcatgtattcttggtccgaaactgggagaagattcgtcaaaaacaggaggaagtaaagcacaccagtgataatattcactcagcatcattatatacccgttggaatgggatctgccgagatgatgggaatatcaagtctgatgtcttcatgacccagttctctgccctgcagacagctcgatctgttcgaacaagacggttggcagctgcagaggaaaatattgaagtggctcgggcagcccgcctagcccagatcttcaaagaaatttgtgatggtatcatctcttataaagattcttcccggcaagcactggcagctccacttttgaaccttcccccaaagaaaaagaatgctgattattatgagaagatctctgatcccctagatcttatcaccatagagaagcagatcctcactggttactataagacagtggaagcttttgatgctgacatgctcaaagtctttcggaatgctgagaagtactatgggcgtaaatccccagttgggagagatgtttgtcgtctacgaaaggcctattacaatgcccggcatgaggcatcagcccagattgatgagattgtgggagagacagcaagtgaggcagacagcagtgagacctcagtctctgaaaaggagaatgggcatgagaaggacgacgatgttattcgctgtatctgtggcctctacaacgatgaaggtctcatgatccagtgtgacaagtgcatggtatggcagcactgtgattgtatgggagtgaactcagatgtggagcactacctttgtgagcagtgtgacccaaggcctgtggacagggaggttcccatgatccctcggccccactatgcccaacctggctgtgtctacttcatctgtttgctccgagatgacttgctgcttcgtcagggtgactgtgtgtatctgatgagggatagtcggcgcacccctgatggccacccggtccgtcagtcctatcgactgttatctcacattaaccgagataaacttgacatctttcgcattgagaagctttggaagaatgaaaaagaggaacggtttgcctttggtcaccattatttccgtccccacgaaacacaccactctccatcccgtcggttctatcataatgaactatttcgggtgccactctatgagatcattcccttggaggctgtagtggggacctgctgtgtgttggacctttatacgtattgtaaagggagacccaaaggagtaaaggagcaagatgtgtacatctgtgattatcggcttgacaagtcagcacacctgttttacaagatccaccggaaccgctatcctgtctgcaccaaaccctatgcttttgatcacttccccaagaagctcactcccaaaaaagatttctcgcctcattacgtcccagacaactacaagaggaatggaggacgatcatcctggaagtctgagcgctcaaagccacccctaaaagacttgggccaggaggatgatgctctacccttgattgaagaggttctagccagtcaagagcaagcagccaatgagatacccagcctggaggagccagaacgggaaggggccactgctaacgtcagtgagggtgaaaaaaaaacagaggaaagtagtcaagaaccccagtcaacctgtacccctgaggaacgacggcataaccaacgggaacgactcaaccagatcttgctcaatctccttgaaaaaatccctggaaaaaatgccattgatgtgacctacttgctggaggaaggatcaggcaggaaactgcgaaggcgtactttgtttatcccagaaaacagctttcgaaagtgaccctcaaagaatgagaacctcaagcatctgggatccagtggagctaatcagtcctgcctcctgctctctgggtatagacaggggtgggaagggtccatctgggcaaggggaatggggccatgttgttgacattaggtacttaataagccttggagctagtggagagggagaggaaagggttctgtccaagacagttcaggttaattaattttcttctccattgcttcaccttaagggttaataatgtagagaggagggaggaccacattgatgaccagaacctactggtactttatagcatttgccccaccccacagcttaggtttttctgtcatcctcagatcccacaggcattgcgaagaagctgcttcctatacccaggtataactcaaaatccaaagggatagggccaggatccctattcctaccccatctattctctgttggctccaagagctaccccagagaccttaaacagaaacagtagctgaggcttcttcctagatacctgactagggaagtttgtctctcctttcttgcccaaccaggtcaaagtaaaatgtgagttgacagctcaaagcacttgtaactgctgccccctccctacctctactccccaaaatggaatcatgggatagggaaggcccccatggggtcagaagggcacggtagttcttgcaattatttttgttttacccttcataacctgtcaaacatatttttttctaatgagaaagccaggcccccgccagcacacatgctgtttttaatgcgctgtagttcttgtgtgtctgctgtgctgtgcaaatggagattcagttcaaaataaaatcatttaaaaacctacataaaaagaactctaaacccacccctgcaacaaaagtcactacataaactgttcagcagtattcacctatcagagtatttgttgtgagtatagattatcaattgaaaacactactcttgttttcttaattgtacagttttcaatgtccctttcttaaagagacagtatatttctcttcacccctagcccatcttccctcaccctcctgaatgacatcaggaggtatatccagggtgtctccttccttcctactctcttgaccagaagttaacagactatactgtctctttaaaaataaaatttaaaaagctttgttgtcttttcagacatacatatgcatatatgttttagatgttcttataagagaaaagatggtttttaaatgtgccaagttgtgtgtgtgtgtgtatatatatgtgtgtatgtgtgtgtatatatatatgtgtgtgtgtgtgtatatatatacacacacacacacacacctgctgtgtgattggtaagcaatacaatagtaaacatgtccccattacttttttctaatattggaccaatgctgtcctaattgtacatttccccttatggtgacgatgctctgactcgtttaggtagacacattgaccaccttccattccattaaatattttttcctttttcccctttctgtgtcattcttgaggaaaaaacaaaagagagaggggatgccaatgatccccttgagcagagaaaaagcaaaataaatattttattaaagaaaaaagagaattaagaaaatagtttggagtattttcttactgtagagaagcactgtacattactaagagacctgggtataagatactcacatgtggagctggaaaaatcgcatgtccaagcccgtttgagtggtttcttttgtttttcattgcagggagtgggtgggagggaggtgggactaggggcactttgggggtctccttttagtcaaaagcgagaaaatgacaagaaagagattaaaattcaatgtttcctttatagtgttaaacactaaaattttaaaaaagatgaaaaagaaaaaaaaactttgtaaaatgcgagaacagaagcaaaagacactacgctctgtcattttatctttcttttgttgaaagactaaaaaaaaactgaaatgttttttagacaatcaaatgttaggtaagtgcaaaaacttgttttttcttactggtgtagaaattaatgcctttttttatttttcagttattttataataacgaaataaaaagaaccccccagctgccaggcgggttttggtgtttgaaatgcggggcaaagcactacatcactgcaaatagatacagagttagtctgcatgtctgtaggctgtgtgattgcggaaaatataaatgctgctaatatatttcctttttacaaaagcatatctaaatagatgattgttttgatgttaatctttgtaaattatgtattaccaattttaacattggatgtaattgcatacaaagcttgcatctcaatccttgaaagtctagtattaaatggaaaaaacttttcctaactgtggaaaaaaaaaaa

SEQ ID NO: 356475 - DNA, 10002 bp, Homo sapiens
gggggcgctaggcgcccttcgctccctccctctggaggagctgccgccgccaccgccgccactctgctgctgccgccgccgccgccgccgctcccgccgccattttgggttcgctttgcggaggggagacgatcccagtctcggttgcgggacccgcctcccctcagtttgccccctttagccttccacctttcccttctcctctctcgcatttccgccagtcagcttacccgctggccgcctcctgacaagcgggagggatccgccgtggacccagggaagcggaggagcctggcggccaccccctcttccccacttccctgcactctcatcgctctcggcctcggcctcggcctccgacacgagaaagatgctggtttcgagttttggagatccttgttttttatggaacacagttctgtaaaattttcataagattccttggcaataacatacgcttgtgatggaccctagaaatactgctatgttaggattgggttctgattccgaaggtttttcaagaaagagtccttctgccatcagtactggcacattggtcagtaagagagaagtagagctagaaaaaaacacaaaggaggaagaggaccttcgcaaacggaatcgagaaagaaacatcgaagctgggaaagatgatggtttgactgatgcacagcaacagttttcagtgaaagaaacaaacttttcagagggaaatttaaaattgaaaattggcctccaggctaagagaactaaaaaacctccaaagaacttggagaactatgtatgtcgacctgccataaaaacaactattaagcacccaaggaaagcacttaaaagtggaaagatgacggatgaaaagaatgaacactgtccttcaaaacgagacccttcaaagttgtacaagaaagcagatgatgttgcagccattgaatgccagtctgaagaagtcatccgtcttcattcacagggagaaaacaatcctttgtctaagaagctgtctccagtacactcagaaatggcagattatattaatgcaacgccatctactcttcttggtagccgggatcctgatttaaaggacagagcattacttaatggaggaactagtgtaacagaaaagttggcacagctgattgctacctgtcctccttccaagtcttccaagacaaaaccgaagaagttaggaactggcactacagcaggattggttagcaaggatttgatcaggaaagcaggtgttggctctgtagctggaataatacataaggacttaataaaaaagccaaccatcagcacagcagttggattggtaactaaagatcctgggaaaaagccagtgtttaatgcagcagtaggattggtcaataaggactctgtgaaaaaactgggaactggcactacagcggtattcattaataaaaacttaggcaaaaagccaggaactatcactacagtaggactgctaagcaaagattcaggaaagaagctaggaattggtattgttccaggtttagtgcataaagagtctggcaagaagttaggacttggcactgtggttggactggttaataaagatttgggaaagaaattgggttctactgttggcctagtggccaaggactgtgcaaagaagattgtagcaagttcagcaatgggattggttaataaggacattggaaagaaactaatgagttgtcctttggcaggtctgatcagtaaagatgccataaaccttaaagccgaagcactgctccccactcaggaaccgcttaaggcttcttgtagtacaaacatcaataatcaggaaagtcaggaactttctgaatccctgaaagatagtgccaccagcaaaacttttgaaaagaatgttgtacggcagaataaagaaagcatattggaaaagttctcagtacgaaaagaaatcattaatttggagaaagaaatgtttaatgaaggaacatgcattcagcaagacagtttctcatccagtgaaaagggatcttatgaaacctcaaagcatgaaaagcagcctcctgtatattgcacttctccggactttaaaatgggaggtgcttctgatgtatctaccgctaaatccccattcagtgcagtaggagaaagcaatctcccttccccatcacctactgtatctgttaatcctttaaccagaagtccccctgaaacttcttcacagttggctcctaatccattacttttaagttctactacagaactaatcgaagaaatttctgaatctgttggaaagaaccagtttacttctgaaagtacccacttgaacgttggtcataggtcagttggtcatagtataagtattgaatgtaaagggattgataaagaggtaaatgattcaaaaactacccatatagatattccaagaataagctcttcccttggaaaaaagccaagtttgacttctgaatccagcattcatactattactccttcagttgttaacttcactagtttatttagtaataagccttttttaaaactgggtgcagtatctgcatcagacaaacactgccaagttgctgaaagcctaagtactagtttgcagtccaaaccattaaaaaaaagaaaaggaagaaaacctcggtggactaaagtggtggcaagaagcacatgccggtctccaaaagggctagaattagaaagatcagagctttttaaaaacgtttcatgtagctcactatcaaatagtaattctgagccagccaagtttatgaaaaacattggacccccttcatttgtagatcatgacttccttaaacgccgattgccaaagttgagcaaatccacagctccatctcttgctctcttagctgatagtgaaaaaccatctcataagtcttttgctactcacaaactatcctccagtatgtgtgtctctagtgaccttttgtctgatatttataagcccaaaagaggaaggcctaaatctaaggagatgcctcaactggaagggccacctaaaaggactttaaaaatccctgcttctaaagtgttttctttacagtctaaggaagaacaagaacccccaattttacagccagaaattgaaatcccttccttcaaacaaggtctgtctgtgtctccttttccaaaaaagagaggcaggcctaagaggcaaatgaggtcaccagtcaagatgaagccacctgtactgtcagtggctccatttgttgccactgaaagtccaagcaagctagaatctgaaagtgacaaccatagaagtagcagtgatttctttgagagcgaggatcaacttcaggatccagatgacctagatgacagtcataggccaagtgtctgtagtatgagtgaccttgagatggaaccagataaaaaaattaccaagagaaacaatggacaattaatgaaaacaattatccgcaaaataaataaaatgaagactttaaagagaaagaaactgttgaatcagattctttcaagttctgtagaatcaagtaataaagggaaagtgcaatccaaactccataatacggtatcaagtcttgctgccacatttggctctaaattgggccaacagataaatgtcagcaagaaaggaaccatttatataggaaagagaagaggtcgcaaaccaaaaactgtcttaaatggtattctttctggtagtcctactagccttgctgttcttgagcaaacagctcaacaggcagctgggtcagcattaggacagattcttcccccattactgccttcatctgctagtagttctgagattcttccatcacctatttgctctcagtcttctgggactagtggaggtcagagccctgtaagtagtgatgcaggttttgttgaacccagttcagtgccatatttgcatttacactccagacagggcagtatgattcagactcttgcaatgaagaaggcctcaaaggggaggaggcggttatctcctcctactttgttgccaaattctccttcgcacttgagtgaactcacatctctaaaagaagctactccttccccaatcagtgagtctcatagtgatgagaccattcccagtgatagtggaattggaacagataataacagcacatcagacagggcagagaaattttgtgggcaaaaaaagaggaggcattcttttgagcatgtttctctgattccccctgaaacctctacagtgctaagcagtcttaaagaaaaacataaacacaaatgtaagcgcaggaatcatgattacctcagctatgacaagatgaaaaggcagaaacgaaaacggaaaaagaaatatccccagcttcgaaatagacaggatccagactttattgcagagctggaggaactaataagtcgcctaagtgaaattcggatcactcatcgaagtcatcattttatcccccgagatcttctgccaactatctttcgaatcaactttaatagtttctatacacatccttctttccccttagaccctttgcactacattcgaaaacctgacttaaaaaagaaaagagggagaccccctaagatgagggaggcaatggctgaaatgccttttatgcacagccttagttttcctctttctagtactggattctatccatcttatggtatgccttactctccttcaccccttacagctgctcccataggattaggttactatggaaggtatcctcccactctttatccacctcctccatctccttctttcaccacgccacttccacctccttcctatatgcatgctggtcatttacttctcaatcctgccaaataccataagaaaaagcataagctacttcgacaggaggcctttcttacaaccagcaggactcccctcctttccatgagtacctaccccagtgttcctcctgagatggcctatggttggatggttgagcacaaacacaggcaccgtcacaaacacagagaacaccgttcttctgaacaaccccaggtttctatggacactggctcttcccgatctgtcctggaatctttgaagcgctatagatttggaaaggatgctgttggagagcgatataagcataaggaaaagcaccgttgtcacatgtcctgccctcatctctctccttcaaaaagcttaataaacagagaggaacagtgggtccaccgagagccttcagaatctagtccattggccttgggattgcagacacctttacagattgactgttcagaaagttctccaagcttatcccttggaggattcactcccaactctgagccagccagcagtgatgaacatacaaaccttttcacaagtgcaataggcagctgcagagtttcaaaccctaactccagtggccggaagaaattaactgacagccctggactcttttctgcacaggacacttcactaaatcggcttcacagaaaggagtcactgccttctaacgaaagggcagtacagactttggcaggctcccagccaacctctgataaaccctcccagcggccatcagagagcacaaattgtagccctacccggaaaaggtcttcatctgagagtacttcttcaacagtaaacggagttccctctcgaagtccaagattagttgcttctggggatgactctgtggatagtctgctgcagcggatggtacaaaatgaggaccaagagcccatggagaaaagtattgatgctgtgattgcaactgcctctgcaccaccttcttccagtccaggccgtagccacagcaaggaccgaaccctgggaaaaccagacagccttttagtgcctgcagtcgcaagtgactcttgcaataatagcatctcactcctatctgaaaagttgacaagcagctgttccccccatcatatcaagagaagtgtagtggaagctatgcaacgccaagctcggaaaatgtgcaattacgacaaaatcttggccacaaagaaaaacctagaccatgtcaataaaatcttaaaagccaaaaaacttcaaaggcaggccaggacagggaataactttgtgaaacgtaggccaggtcgacctcggaaatgtccccttcaggctgtcgtatcaatgcaagcattccaggctgctcagtttgtcaacccagaattgaacagagacgaggaaggagcagcactgcacctcagtcctgacacagttacagatgtaattgaggctgttgttcagagtgtaaatctgaacccagaacataaaaaggggttgaagagaaaaggttggctattggaagaacagaccagaaaaaagcagaagccattaccagaggaagaagagcaagagaataataaaagctttaatgaagcaccagttgagattcccagtccttctgaaaccccagctaaaccttctgaacctgaaagtaccttgcagcctgtgctttctctcatcccaagggaaaagaagcccccacgtcccccaaagaagaagtatcagaaagcagggctgtattctgacgtttacaaaactacagacccaaagagtcgattgatccaattaaagaaagagaagctggagtatactccaggagagcatgaatatggattatttccagcgcccattcatgttgtgttttttgtttcaggaaagtatctaagacaaaagagaattgacttccagcttccttatgatatcctttggcagtggaaacacaatcagctatacaaaaagccagatgtcccactatataagaaaattcgttcaaatgtctacgttgatgtcaaacccctttctggttacgaagctaccacctgtaactgtaagaagccagatgatgacaccaggaagggctgtgttgatgactgcctcaatagaatgatctttgctgagtgttcccccaacacttgcccatgtggcgagcaatgctgtaaccagaggatacagaggcatgaatgggtgcaatgtctagaacgatttcgagctgaggaaaaaggttggggaatcagaaccaaagagcccctaaaagctgggcagttcatcattgaatacctaggggaggtcgtcagtgaacaggagttcaggaacaggatgattgagcagtatcataatcacagtgaccactactgcctgaacctggatagtgggatggtgattgacagttaccgcatgggaaatgaggcccgattcatcaaccatagctgtgacccaaattgtgaaatgcagaaatggtctgttaatggagtataccggattggactctatgctcttaaagacatgccagctgggactgaactcacttatgattataactttcattccttcaatgtggaaaaacagcaactttgtaagtgtggctttgagaaatgtcgaggaatcatcggaggcaagagtcagcgtgtgaatggactcaccagcagcaaaaacagccagcccatggccacacacaaaaaatctggacggtcaaaagagaagagaaagtctaagcacaagctgaagaaaaggagaggccatctctctgaggaacccagtgaaaatatcaacaccccaactagattgaccccccaattacagatgaagccaatgtccaatcgtgaaaggaactttgtgttaaagcatcatgtattcttggtccgaaactgggagaagattcgtcaaaaacaggaggaagtaaagcacaccagtgataatattcactcagcatcattatatacccgttggaatgggatctgccgagatgatgggaatatcaagtctgatgtcttcatgacccagttctctgccctgcagacagctcgatctgttcgaacaagacggttggcagctgcagaggaaaatattgaagtggctcgggcagcccgcctagcccagatcttcaaagaaatttgtgatggtatcatctcttataaagattcttcccggcaagcactggcagctccacttttgaaccttcccccaaagaaaaagaatgctgattattatgagaagatctctgatcccctagatcttatcaccatagagaagcagatcctcactggttactataagacagtggaagcttttgatgctgacatgctcaaagtctttcggaatgctgagaagtactatgggcgtaaatccccagttgggagagatgtttgtcgtctacgaaaggcctattacaatgcccggcatgaggcatcagcccagattgatgagattgtgggagagacagcaagtgaggcagacagcagtgagacctcagtctctgaaaaggagaatgggcatgagaaggacgacgatgttattcgctgtatctgtggcctctacaacgatgaaggtctcatgatccagtgtgacaagtgcatggtatggcagcactgtgattgtatgggagtgaactcagatgtggagcactacctttgtgagcagtgtgacccaaggcctgtggacagggaggttcccatgatccctcggccccactatgcccaacctggctgtgtctacttcatctgtttgctccgagatgacttgctgcttcgtcagggtgactgtgtgtatctgatgagggatagtcggcgcacccctgatggccacccggtccgtcagtcctatcgactgttatctcacattaaccgagataaacttgacatctttcgcattgagaagctttggaagaatgaaaaagaggaacggtttgcctttggtcaccattatttccgtccccacgaaacacaccactctccatcccgtcggttctatcataatgaactatttcgggtgccactctatgagatcattcccttggaggctgtagtggggacctgctgtgtgttggacctttatacgtattgtaaagggagacccaaaggagtaaaggagcaagatgtgtacatctgtgattatcggcttgacaagtcagcacacctgttttacaagatccaccggaaccgctatcctgtctgcaccaaaccctatgcttttgatcacttccccaagaagctcactcccaaaaaagatttctcgcctcattacgtcccagacaactacaagaggaatggaggacgatcatcctggaagtctgagcgctcaaagccacccctaaaagacttgggccaggaggatgatgctctacccttgattgaagaggttctagccagtcaagagcaagcagccaatgagatacccagcctggaggagccagaacgggaaggggccactgctaacgtcagtgagggtgaaaaaaaaacagaggaaagtagtcaagaaccccagtcaacctgtacccctgaggaacgacggcataaccaacgggaacgactcaaccagatcttgctcaatctccttgaaaaaatccctggaaaaaatgccattgatgtgacctacttgctggaggaaggatcaggcaggaaactgcgaaggcgtactttgtttatcccagaaaacagctttcgaaagtgaccctcaaagaatgagaacctcaagcatctgggatccagtggagctaatcagtcctgcctcctgctctctgggtatagacaggggtgggaagggtccatctgggcaaggggaatggggccatgttgttgacattaggtacttaataagccttggagctagtggagagggagaggaaagggttctgtccaagacagttcaggttaattaattttcttctccattgcttcaccttaagggttaataatgtagagaggagggaggaccacattgatgaccagaacctactggtactttatagcatttgccccaccccacagcttaggtttttctgtcatcctcagatcccacaggcattgcgaagaagctgcttcctatacccaggtataactcaaaatccaaagggatagggccaggatccctattcctaccccatctattctctgttggctccaagagctaccccagagaccttaaacagaaacagtagctgaggcttcttcctagatacctgactagggaagtagggactcatttttggccaccaggcgaggtaaagtgattgcagtccaggctgttatgtggccccctgatcccggacagggaagggaggcctgtgtaagggggtctgg

SEQ ID NO: 356476 - DNA, 4427 bp, Homo sapiens
gtgggctgtgtatttgcctaatcataattactgttgggatggacaaggagggaatgggtaaaaataattaagaaaaaggagaggccatctctctgaggaacccagtgaaaatatcaacaccccaactagattgaccccccaattacagatgaagccaatgtccaatcgtgaaaggaactttgtgttaaagcatcatgtattcttggtccgaaactgggagaagattcgtcaaaaacaggaggaagtaaagcacaccagtgataatattcactcagcatcattatatacccgttggaatgggatctgccgagatgatgggaatatcaagtctgatgtcttcatgacccagttctctgccctgcagacagctcgatctgttcgaacaagacggttggcagctgcagaggaaaatattgaagtggctcgggcagcccgcctagcccagatcttcaaagaaatttgtgatggtatcatctcttataaagattcttcccggcaagcactggcagctccacttttgaaccttcccccaaagaaaaagaatgctgattattatgagaagatctctgatcccctagatcttatcaccatagagaagcagatcctcactggttactataagacagtggaagcttttgatgctgacatgctcaaagtctttcggaatgctgagaagtactatgggcgtaaatccccagttgggagagatgtttgtcgtctacgaaaggcctattacaatgcccggcatgaggcatcagcccagattgatgagattgtgggagagacagcaagtgaggcagacagcagtgagacctcagtctctgaaaaggagaatgggcatgagaaggacgacgatgttattcgctgtatctgtggcctctacaacgatgaaggtctcatgatccagtgtgacaagtgcatggtatggcagcactgtgattgtatgggagtgaactcagatgtggagcactacctttgtgagcagtgtgacccaaggcctgtggacagggaggttcccatgatccctcggccccactatgcccaacctggctgtgtctacttcatctgtttgctccgagatgacttgctgcttcgtcagggtgactgtgtgtatctgatgagggatagtcggcgcacccctgatggccacccggtccgtcagtcctatcgactgttatctcacattaaccgagataaacttgacatctttcgcattgagaagctttggaagaatgaaaaagaggaacggtttgcctttggtcaccattatttccgtccccacgaaacacaccactctccatcccgtcggttctatcataatgaactatttcgggtgccactctatgagatcattcccttggaggctgtagtggggacctgctgtgtgttggacctttatacgtattgtaaagggagacccaaaggagtaaaggagcaagatgtgtacatctgtgattatcggcttgacaagtcagcacacctgttttacaagatccaccggaaccgctatcctgtctgcaccaaaccctatgcttttgatcacttccccaagaagctcactcccaaaaaagatttctcgcctcattacgtcccagacaactacaagaggaatggaggacgatcatcctggaagtctgagcgctcaaagccacccctaaaagacttgggccaggaggatgatgctctacccttgattgaagaggttctagccagtcaagagcaagcagccaatgagatacccagcctggaggagccagaacgggaaggggccactgctaacgtcagtgagggtgaaaaaaaaacagaggaaagtagtcaagaaccccagtcaacctgtacccctgaggaacgacggcataaccaacgggaacgactcaaccagatcttgctcaatctccttgaaaaaatccctggaaaaaatgccattgatgtgacctacttgctggaggaaggatcaggcaggaaactgcgaaggcgtactttgtttatcccagaaaacagctttcgaaagtgaccctcaaagaatgagaacctcaagcatctgggatccagtggagctaatcagtcctgcctcctgctctctgggtatagacaggggtgggaagggtccatctgggcaaggggaatggggccatgttgttgacattaggtacttaataagccttggagctagtggagagggagaggaaagggttctgtccaagacagttcaggttaattaattttcttctccattgcttcaccttaagggttaataatgtagagaggagggaggaccacattgatgaccagaacctactggtactttatagcatttgccccaccccacagcttaggtttttctgtcatcctcagatcccacaggcattgcgaagaagctgcttcctatacccaggtataactcaaaatccaaagggatagggccaggatccctattcctaccccatctattctctgttggctccaagagctaccccagagaccttaaacagaaacagtagctgaggcttcttcctagatacctgactagggaagtttgtctctcctttcttgcccaaccaggtcaaagtaaaatgtgagttgacagctcaaagcacttgtaactgctgccccctccctacctctactccccaaaatggaatcatgggatagggaaggcccccatggggtcagaagggcacggtagttcttgcaattatttttgttttacccttcataacctgtcaaacatatttttttctaatgagaaagccaggcccccgccagcacacatgctgtttttaatgcgctgtagttcttgtgtgtctgctgtgctgtgcaaatggagattcagttcaaaataaaatcatttaaaaacctacataaaaagaactctaaacccacccctgcaacaaaagtcactacataaactgttcagcagtattcacctatcagagtatttgttgtgagtatagattatcaattgaaaacactactcttgttttcttaattgtacagttttcaatgtccctttcttaaagagacagtatatttctcttcacccctagcccatcttccctcaccctcctgaatgacatcaggaggtatatccagggtgtctccttccttcctactctcttgaccagaagttaacagactatactgtctctttaaaaataaaatttaaaaagctttgttgtcttttcagacatacatatgcatatatgttttagatgttcttataagagaaaagatggtttttaaatgtgccaagttgtgtgtgtgtgtgtatatatatgtgtgtatgtgtgtgtatatatatatgtgtgtgtgtgtgtatatatatacacacacacacacacacctgctgtgtgattggtaagcaatacaatagtaaacatgtccccattacttttttctaatattggaccaatgctgtcctaattgtacatttccccttatggtgacgatgctctgactcgtttaggtagacacattgaccaccttccattccattaaatattttttcctttttcccctttctgtgtcattcttgaggaaaaaacaaaagagagaggggatgccaatgatccccttgagcagagaaaaagcaaaataaatattttattaaagaaaaaagagaattaagaaaatagtttggagtattttcttactgtagagaagcactgtacattactaagagacctgggtataagatactcacatgtggagctggaaaaatcgcatgtccaagcccgtttgagtggtttcttttgtttttcattgcagggagtgggtgggagggaggtgggactaggggcactttgggggtctccttttagtcaaaagcgagaaaatgacaagaaagagattaaaattcaatgtttcctttatagtgttaaacactaaaattttaaaaaagatgaaaaagaaaaaaaaactttgtaaaatgcgagaacagaagcaaaagacactacgctctgtcattttatctttcttttgttgaaagactaaaaaaaaactgaaatgttttttagacaatcaaatgttaggtaagtgcaaaaacttgttttttcttactggtgtagaaattaatgcctttttttatttttcagttattttataataacgaaataaaaagaaccccccagctgccaggcgggttttggtgtttgaaatgcggggcaaagcactacatcactgcaaatagatacagagttagtctgcatgtctgtaggctgtgtgattgcggaaaatataaatgctgctaatatatttcctttttacaaaagcatatctaaatagatgattgttttgatgttaatctttgtaaattatgtattaccaattttaacattggatgtaattgcatacaaagcttgcatctcaatccttgaaagtctagtattaaatggaaaaaacttttcctaactgtggaaaaaaaaaaa

SEQ ID NO: 356477 - DNA, 2463 bp, Homo sapiens
ctgaccaacatggtgaaaccccatctctactaaaaagcaaaaattagctgggcgtggtggtgcacacctgtaatcgcagctactcaggaggctgaggcaggagaattgcttgaatctctgggtatagacaggggtgggaagggtccatctgggcaaggggaatggggccatgttgttgacattaggtacttaataagccttggagctagtggagagggagaggaaagggttctgtccaagacagttcaggttaattaattttcttctccattgcttcaccttaagggttaataatgtagagaggagggaggaccacattgatgaccagaacctactggtactttatagcatttgccccaccccacagcttaggtttttctgtcatcctcagatcccacaggcattgcgaagaagctgcttcctatacccaggtataactcaaaatccaaagggatagggccaggatccctattcctaccccatctattctctgttggctccaagagctaccccagagaccttaaacagaaacagtagctgaggcttcttcctagatacctgactagggaagtttgtctctcctttcttgcccaaccaggtcaaagtaaaatgtgagttgacagctcaaagcacttgtaactgctgccccctccctacctctactccccaaaatggaatcatgggatagggaaggcccccatggggtcagaagggcacggtagttcttgcaattatttttgttttacccttcataacctgtcaaacatatttttttctaatgagaaagccaggcccccgccagcacacatgctgtttttaatgcgctgtagttcttgtgtgtctgctgtgctgtgcaaatggagattcagttcaaaataaaatcatttaaaaacctacataaaaagaactctaaacccacccctgcaacaaaagtcactacataaactgttcagcagtattcacctatcagagtatttgttgtgagtatagattatcaattgaaaacactactcttgttttcttaattgtacagttttcaatgtccctttcttaaagagacagtatatttctcttcacccctagcccatcttccctcaccctcctgaatgacatcaggaggtatatccagggtgtctccttccttcctactctcttgaccagaagttaacagactatactgtctctttaaaaataaaatttaaaaagctttgttgtcttttcagacatacatatgcatatatgttttagatgttcttataagagaaaagatggtttttaaatgtgccaagttgtgtgtgtgtgtgtatatatatgtgtgtatgtgtgtgtatatatatatgtgtgtgtgtgtgtatatatatacacacacacacacacacctgctgtgtgattggtaagcaatacaatagtaaacatgtccccattacttttttctaatattggaccaatgctgtcctaattgtacatttccccttatggtgacgatgctctgactcgtttaggtagacacattgaccaccttccattccattaaatattttttcctttttcccctttctgtgtcattcttgaggaaaaaacaaaagagagaggggatgccaatgatccccttgagcagagaaaaagcaaaataaatattttattaaagaaaaaagagaattaagaaaatagtttggagtattttcttactgtagagaagcactgtacattactaagagacctgggtataagatactcacatgtggagctggaaaaatcgcatgtccaagcccgtttgagtggtttcttttgtttttcattgcagggagtgggtgggagggaggtgggactaggggcactttgggggtctccttttagtcaaaagcgagaaaatgacaagaaagagattaaaattcaatgtttcctttatagtgttaaacactaaaattttaaaaaagatgaaaaagaaaaaaaaactttgtaaaatgcgagaacagaagcaaaagacactacgctctgtcattttatctttcttttgttgaaagactaaaaaaaaactgaaatgttttttagacaatcaaatgttaggtaagtgcaaaaacttgttttttcttactggtgtagaaattaatgcctttttttatttttcagttattttataataacgaaataaaaagaaccccccagctgccaggcgggttttggtgtttgaaatgcggggcaaagcactacatcactgcaaatagatacagagttagtctgcatgtctgtaggctgtgtgattgcggaaaatataaatgctgctaatatatttcctttttacaaaagcatatctaaatagatgattgttttgatgttaatctttgtaaattatgtattaccaattttaacattggatgtaattgcatacaaagcttgcatctcaatccttgaaagtctagtattaaatggaaaaaacttttcctaactgtggaaaaaaaaaaa

SEQ ID NO: 356478 - DNA, 1145 bp, Homo sapiens
gggggcgctaggcgcccttcgctccctccctctggaggagctgccgccgccaccgccgccactctgctgctgccgccgccgccgccgccgctcccgccgccattttgggttcgctttgcggaggggagacgatcccagtctcggttgcgggacccgcctcccctcagtttgccccctttagccttccacctttcccttctcctctctcgcatttccgccagtcagcttacccgctggccgcctcctgacaagcgggagggatccgccgtggacccagggaagcggaggagcctggcggccaccccctcttccccacttccctgcactctcatcgctctcggcctcggcctcggcctccgacacggtgagtagaacgatttgggccggcattcgggcctaagcactctctcagcgattgaatcctgggctttctgggagccactgtcatctcccggacctggatctctgagagagcagtggtgaagatgggggaggggagagcagggagggggatcctgagcctaccgggaagtccctccaggcggggtgaaggggtgtccctgacaggcagactcccggagggggctgggaagtaagcgagtggaggcggagtcggctgtgcccctgacaggttagtttgtgtttgtaggcatgatcggagcctcccccatagtccagtttgtgtgtgtttaattaagggataagagtggtcgaggacacgatcttgagaggggattttacctgtgtgacaaggtctgtggtgtccctgccgcgttgaacggtatgtgggaacgacaggatgatctcagtgttgtaagtttaataaatgtcactggttagtttgtacatggaaagagatgtttttggtctagcagacagatggtctgttggtgtgtagcggctgtgttggtgtgtgtatgtgaggatggcaagtgtttccgtaagagtttgcctttatttgtgtaagtgtaatggagttccccttataagttagcttatttcttgaataaatgttgggaggttccttgcaggttgatatgtgtgtgtattttagggattgggagcccctagttacttgttgggaaagagcggcaatggtagtgttctgtacagcatgtgtctgtgaggtcagggaggggagaaac

SEQ ID NO: 356479 - DNA, 1461 bp, Homo sapiens
gaggcttgggcttgcgccgttgaagagaaagatgctggtttcgagttttggagatccttgttttttatggaacacagttctgtaaaattttcataagattccttggcaataacatacgcttgtgatggaccctagaaatactgctatgttaggattgggttctgattccgaaggtttttcaagaaagagtccttctgccatcagtactggcacattggtcagtaagagagaagtagagctagaaaaaaacacaaaggaggaagaggaccttcgcaaacggaatcgagaaagaaacatcgaagctgggaaagatgatggtttgactgatgcacagcaacagttttcagtgaaagaaacaaacttttcagagggaaatttaaaattgaaaattggcctccaggctaagagaactaaaaaacctccaaagaacttggagaactatgtatgtcgacctgccataaaaacaactattaagcacccaaggaaagcacttaaaagtggaaagatgacggatgaaaagaatgaacactgtccttcaaaacgagacccttcaaagttgtacaagaaagcagatgatgttgcagccattgaatgccagtctgaagaagtcatccgtcttcattcacagggagaaaacaatcctttgtctaagaagctgtctccagtacactcagaaatggcagattatattaatgcaacgccatctactcttcttggtagccgggatcctgatttaaaggacagagcattacttaatggaggaactagtgtaacagaaaagttggcacagctgattgctacctgtcctccttccaagtcttccaagacaaaaccgaagaagttaggaactggcactacagcaggattggttagcaaggatttgatcaggaaagcaggtgttggctctgtagctggaataatacataaggacttaataaaaaagccaaccatcagcacagcagttggattggtaactaaagatcctgggaaaaagccagtgtttaatgcagcagtaggattggtcaataaggactctgtgaaaaaactgggaactggcactacagcggtattcattaataaaaacttaggcaaaaagccaggaactatcactacagtaggactgctaagcaaagattcaggaaagaagctaggaattggtattgttccaggtttagtgcataaagagtctggcaagaagttaggacttggcactgtggttggactggttaataaagatttgggaaagaaattgggttctactgttggcctagtggccaaggactgtgcaaagaagattgtagcaagttcagcaatgggattggttaataaggacattggaaagaaactaatgagttgtcctttggcaggtctgatcagtaaagatgccataacttaagcgagatgtccatagaacgtaggtctgtgtgactcatatcggagggatttgatccgaaattgccg

SEQ ID NO: 356480 - DNA, 557 bp, Homo sapiens
ttcacccagttatcccttagttcctcttttactttaccctgacctattgctaattttttattctgggctcccaggacactctcaataagtcatagcctccatgttccccaaactgtatgtttttctacaggtatggcagcactgtgattgtatgggagtgaactcagatgtggagcactacctttgtgagcagtgtgacccaaggcctgtggacagggtaagctgaacctctgataaaactctgatctataagtaggagaggtagcacatggtatctcacctgtcctgctcctgctttgcagaatttcctttaataggttgttcagcctctctgggccttggtttcttaaactttacattaagggtcataattctgttcttccctatttcaggagtatgaccaaagggaaaataaaatacttagaaatctgtggaaggaatggcactatataaaactaaggtttttggccgggcacggtcgctcatgcctgtaatcctagcacactgggaggctaaggcggatggattgcctgagctcaggagttcgagaccagcct

SEQ ID NO: 356481 - DNA, 625 bp, Homo sapiens
aagacttggatttttctctcacttttaatttgagggattctattcttccagttaggagatgcttgcctcccttgtatggtggaatctttctactaaacctcacattcttttgcagattcttcccggcaagcactggcagctccacttttgaaccttcccccaaagaaaaagtaggttcacatttgtgggaatcatctgagtttttaaaaagtgctaagtgtgccagattgacaccctggctttgtgttccaggaatgctgattattatgagaagatctctgatcccctagatcttatcaccatagagaagcagatcctcactggttactataagacagtggaagcttttgatgctgacatgctcaaagtctttcggaatgctgaggtatttttcactgacttcaaacagatttcacaagtttgttctgaaaagaattagtctagaagtttaagatttttaccctcctctatcagccatatttctggttggaaaagccagtcatttttgagtatccttggggtatgtgttacagtatactaaatattatagaaggctatctatgaagacattgataggactagaatggaaggttaaatcattcccccccaaaaaaataatttttgt

SEQ ID NO: 356482 - DNA, 409 bp, Homo sapiens
agttcttttataggcttgcttttagttgtatcttggtagtgaaactggaaggtgagatgatctcctctaaagaaccacctttttcacgtagggttggaggatgggctaaattgcttataggtcagaaaaggaatcattgagttcgtgtgctctccttagagctcaaatctggaataaggagtaggagattggtattttgatgagcctccttggttctgttttcagccattgatgtgacctacttgctggaggaaggatcaggcaggaaactgcgaaggcgtactttgtttatcccagaaaacagctttcgaaagtgaccctcaaagaatgagaacctcaagcatctgggatccagtggagctaatcagtcctgcctcctgctctctgggtatagacaggggtgggaagg

SEQ ID NO: 356483 - DNA, 408 bp, Homo sapiens
ctcccaactctgagccagccagcagtgatgaacatacaaaccttttcacaagtgcaataggcagctgcagagtttcaaaccctaactccagtggccggaagaaattaactgacagccctggactcttttctgcacaggacacttcactaaatcggcttcacagaaaggagtcactgccttctaacgaaagggcagtacagactttggcaggtaagagggttattttgttacctgttatttgttaaagaaataggttattttccacaggtgcctgataaatgtagatgaacttttaatatatatatctttttttgttttttaataagtgtattttgaaatctcagtattccttttccttaagatttaagaagtagggaatgtctatattatttttttgttttgagaaga

SEQ ID NO: 356484 - DNA, 11518 bp, Homo sapiens
gggggcgctaggcgcccttcgctccctccctctggaggagctgccgccgccaccgccgccactctgctgctgccgccgccgccgccgccgctcccgccgccattttgggttcgctttgcggaggggagacgatcccagtctcggttgcgggacccgcctcccctcagtttgccccctttagccttccacctttcccttctcctctctcgcatttccgccagtcagcttacccgctggccgcctcctgacaagcgggagggatccgccgtggacccagggaagcggaggagcctggcggccaccccctcttccccacttccctgcactctcatcgctctcggcctcggcctcggcctccgacacgagaaagatgctggtttcgagttttggagatccttgttttttatggaacacagttctgtaaaattttcataagattccttggcaataacatacgcttgtgatggaccctagaaatactgctatgttaggattgggttctgattccgaaggtttttcaagaaagagtccttctgccatcagtactggcacattggtcagtaagagagaagtagagctagaaaaaaacacaaaggaggaagaggaccttcgcaaacggaatcgagaaagaaacatcgaagctgggaaagatgatggtttgactgatgcacagcaacagttttcagtgaaagaaacaaacttttcagagggaaatttaaaattgaaaattggcctccaggctaagagaactaaaaaacctccaaagaacttggagaactatgtatgtcgacctgccataaaaacaactattaagcacccaaggaaagcacttaaaagtggaaagatgacggatgaaaagaatgaacactgtccttcaaaacgagacccttcaaagttgtacaagaaagcagatgatgttgcagccattgaatgccagtctgaagaagtcatccgtcttcattcacagggagaaaacaatcctttgtctaagaagctgtctccagtacactcagaaatggcagattatattaatgcaacgccatctactcttcttggtagccgggatcctgatttaaaggacagagcattacttaatggaggaactagtgtaacagaaaagttggcacagctgattgctacctgtcctccttccaagtcttccaagacaaaaccgaagaagttaggaactggcactacagcaggattggttagcaaggatttgatcaggaaagcaggtgttggctctgtagctggaataatacataaggacttaataaaaaagccaaccatcagcacagcagttggattggtaactaaagatcctgggaaaaagccagtgtttaatgcagcagtaggattggtcaataaggactctgtgaaaaaactgggaactggcactacagcggtattcattaataaaaacttaggcaaaaagccaggaactatcactacagtaggactgctaagcaaagattcaggaaagaagctaggaattggtattgttccaggtttagtgcataaagagtctggcaagaagttaggacttggcactgtggttggactggttaataaagatttgggaaagaaattgggttctactgttggcctagtggccaaggactgtgcaaagaagattgtagcaagttcagcaatgggattggttaataaggacattggaaagaaactaatgagttgtcctttggcaggtctgatcagtaaagatgccataaaccttaaagccgaagcactgctccccactcaggaaccgcttaaggcttcttgtagtacaaacatcaataatcaggaaagtcaggaactttctgaatccctgaaagatagtgccaccagcaaaacttttgaaaagaatgttgtacggcagaataaagaaagcatattggaaaagttctcagtacgaaaagaaatcattaatttggagaaagaaatgtttaatgaaggaacatgcattcagcaagacagtttctcatccagtgaaaagggatcttatgaaacctcaaagcatgaaaagcagcctcctgtatattgcacttctccggactttaaaatgggaggtgcttctgatgtatctaccgctaaatccccattcagtgcagtaggagaaagcaatctcccttccccatcacctactgtatctgttaatcctttaaccagaagtccccctgaaacttcttcacagttggctcctaatccattacttttaagttctactacagaactaatcgaagaaatttctgaatctgttggaaagaaccagtttacttctgaaagtacccacttgaacgttggtcataggtcagttggtcatagtataagtattgaatgtaaagggattgataaagaggtaaatgattcaaaaactacccatatagatattccaagaataagctcttcccttggaaaaaagccaagtttgacttctgaatccagcattcatactattactccttcagttgttaacttcactagtttatttagtaataagccttttttaaaactgggtgcagtatctgcatcagacaaacactgccaagttgctgaaagcctaagtactagtttgcagtccaaaccattaaaaaaaagaaaaggaagaaaacctcggtggactaaagtggtggcaagaagcacatgccggtctccaaaagggctagaattagaaagatcagagctttttaaaaacgtttcatgtagctcactatcaaatagtaattctgagccagccaagtttatgaaaaacattggacccccttcatttgtagatcatgacttccttaaacgccgattgccaaagttgagcaaatccacagctccatctcttgctctcttagctgatagtgaaaaaccatctcataagtcttttgctactcacaaactatcctccagtatgtgtgtctctagtgaccttttgtctgatatttataagcccaaaagaggaaggcctaaatctaaggagatgcctcaactggaagggccacctaaaaggactttaaaaatccctgcttctaaagtgttttctttacagtctaaggaagaacaagaacccccaattttacagccagaaattgaaatcccttccttcaaacaaggtctgtctgtgtctccttttccaaaaaagagaggcaggcctaagaggcaaatgaggtcaccagtcaagatgaagccacctgtactgtcagtggctccatttgttgccactgaaagtccaagcaagctagaatctgaaagtgacaaccatagaagtagcagtgatttctttgagagcgaggatcaacttcaggatccagatgacctagatgacagtcataggccaagtgtctgtagtatgagtgaccttgagatggaaccagataaaaaaattaccaagagaaacaatggacaattaatgaaaacaattatccgcaaaataaataaaatgaagactttaaagagaaagaaactgttgaatcagattctttcaagttctgtagaatcaagtaataaagggaaagtgcaatccaaactccataatacggtatcaagtcttgctgccacatttggctctaaattgggccaacagataaatgtcagcaagaaaggaaccatttatataggaaagagaagaggtcgcaaaccaaaaactgtcttaaatggtattctttctggtagtcctactagccttgctgttcttgagcaaacagctcaacaggcagctgggtcagcattaggacagattcttcccccattactgccttcatctgctagtagttctgagattcttccatcacctatttgctctcagtcttctgggactagtggaggtcagagccctgtaagtagtgatgcaggttttgttgaacccagttcagtgccatatttgcatttacactccagacagggcagtatgattcagactcttgcaatgaagaaggcctcaaaggggaggaggcggttatctcctcctactttgttgccaaattctccttcgcacttgagtgaactcacatctctaaaagaagctactccttccccaatcagtgagtctcatagtgatgagaccattcccagtgatagtggaattggaacagataataacagcacatcagacagggcagagaaattttgtgggcaaaaaaagaggaggcattcttttgagcatgtttctctgattccccctgaaacctctacagtgctaagcagtcttaaagaaaaacataaacacaaatgtaagcgcaggaatcatgattacctcagctatgacaagatgaaaaggcagaaacgaaaacggaaaaagaaatatccccagcttcgaaatagacaggatccagactttattgcagagctggaggaactaataagtcgcctaagtgaaattcggatcactcatcgaagtcatcattttatcccccgagatcttctgccaactatctttcgaatcaactttaatagtttctatacacatccttctttccccttagaccctttgcactacattcgaaaacctgacttaaaaaagaaaagagggagaccccctaagatgagggaggcaatggctgaaatgccttttatgcacagccttagttttcctctttctagtactggattctatccatcttatggtatgccttactctccttcaccccttacagctgctcccataggattaggttactatggaaggtatcctcccactctttatccacctcctccatctccttctttcaccacgccacttccacctccttcctatatgcatgctggtcatttacttctcaatcctgccaaataccataagaaaaagcataagctacttcgacaggaggcctttcttacaaccagcaggactcccctcctttccatgagtacctaccccagtgttcctcctgagatggcctatggttggatggttgagcacaaacacaggcaccgtcacaaacacagagaacaccgttcttctgaacaaccccaggtttctatggacactggctcttcccgatctgtcctggaatctttgaagcgctatagatttggaaaggatgctgttggagagcgatataagcataaggaaaagcaccgttgtcacatgtcctgccctcatctctctccttcaaaaagcttaataaacagagaggaacagtgggtccaccgagagccttcagaatctagtccattggccttgggattgcagacacctttacagattgactgttcagaaagttctccaagcttatcccttggaggattcactcccaactctgagccagccagcagtgatgaacatacaaaccttttcacaagtgcaataggcagctgcagagtttcaaaccctaactccagtggccggaagaaattaactgacagccctggactcttttctgcacaggacacttcactaaatcggcttcacagaaaggagtcactgccttctaacgaaagggcagtacagactttggcaggctcccagccaacctctgataaaccctcccagcggccatcagagagcacaaattgtagccctacccggaaaaggtcttcatctgagagtacttcttcaacagtaaacggagttccctctcgaagtccaagattagttgcttctggggatgactctgtggatagtctgctgcagcggatggtacaaaatgaggaccaagagcccatggagaaaagtattgatgctgtgattgcaactgcctctgcaccaccttcttccagtccaggccgtagccacagcaaggaccgaaccctgggaaaaccagacagccttttagtgcctgcagtcgcaagtgactcttgcaataatagcatctcactcctatctgaaaagttgacaagcagctgttccccccatcatatcaagagaagtgtagtggaagctatgcaacgccaagctcggaaaatgtgcaattacgacaaaatcttggccacaaagaaaaacctagaccatgtcaataaaatcttaaaagccaaaaaacttcaaaggcaggccaggacagggaataactttgtgaaacgtaggccaggtcgacctcggaaatgtccccttcaggctgtcgtatcaatgcaagcattccaggctgctcagtttgtcaacccagaattgaacagagacgaggaaggagcagcactgcacctcagtcctgacacagttacagatgtaattgaggctgttgttcagagtgtaaatctgaacccagaacataaaaaggggttgaagagaaaaggttggctattggaagaacagaccagaaaaaagcagaagccattaccagaggaagaagagcaagagaataataaaagctttaatgaagcaccagttgagattcccagtccttctgaaaccccagctaaaccttctgaacctgaaagtaccttgcagcctgtgctttctctcatcccaagggaaaagaagcccccacgtcccccaaagaagaagtatcagaaagcagggctgtattctgacgtttacaaaactacagacccaaagagtcgattgatccaattaaagaaagagaagctggagtatactccaggagagcatgaatatggattatttccagcgcccattcatgttgtgttttttgtttcaggaaagtatctaagacaaaagagaattgacttccagcttccttatgatatcctttggcagtggaaacacaatcagctatacaaaaagccagatgtcccactatataagaaaattcgttcaaatgtctacgttgatgtcaaacccctttctggttacgaagctaccacctgtaactgtaagaagccagatgatgacaccaggaagggctgtgttgatgactgcctcaatagaatgatctttgctgagtgttcccccaacacttgcccatgtggcgagcaatgctgtaaccagaggatacagaggcatgaatgggtgcaatgtctagaacgatttcgagctgaggaaaaaggttggggaatcagaaccaaagagcccctaaaagctgggcagttcatcattgaatacctaggggaggtcgtcagtgaacaggagttcaggaacaggatgattgagcagtatcataatcacagtgaccactactgcctgaacctggatagtgggatggtgattgacagttaccgcatgggaaatgaggcccgattcatcaaccatagctgtgacccaaattgtgaaatgcagaaatggtctgttaatggagtataccggattggactctatgctcttaaagacatgccagctgggactgaactcacttatgattataactttcattccttcaatgtggaaaaacagcaactttgtaagtgtggctttgagaaatgtcgaggaatcatcggaggcaagagtcagcgtgtgaatggactcaccagcagcaaaaacagccagcccatggccacacacaaaaaatctggacggtcaaaagagaagagaaagtctaagcacaagctgaagaaaaggagaggccatctctctgaggaacccagtgaaaatatcaacaccccaactagattgaccccccaattacagatgaagccaatgtccaatcgtgaaaggaactttgtgttaaagcatcatgtattcttggtccgaaactgggagaagattcgtcaaaaacaggaggaagtaaagcacaccagtgataatattcactcagcatcattatatacccgttggaatgggatctgccgagatgatgggaatatcaagtctgatgtcttcatgacccagttctctgccctgcagacagctcgatctgttcgaacaagacggttggcagctgcagaggaaaatattgaagtggctcgggcagcccgcctagcccagatcttcaaagaaatttgtgatggtatcatctcttataaagattcttcccggcaagcactggcagctccacttttgaaccttcccccaaagaaaaagaatgctgattattatgagaagatctctgatcccctagatcttatcaccatagagaagcagatcctcactggttactataagacagtggaagcttttgatgctgacatgctcaaagtctttcggaatgctgagaagtactatgggcgtaaatccccagttgggagagatgtttgtcgtctacgaaaggcctattacaatgcccggcatgaggcatcagcccagattgatgagattgtgggagagacagcaagtgaggcagacagcagtgagacctcagtctctgaaaaggagaatgggcatgagaaggacgacgatgttattcgctgtatctgtggcctctacaacgatgaaggtctcatgatccagtgtgacaagtgcatggtatggcagcactgtgattgtatgggagtgaactcagatgtggagcactacctttgtgagcagtgtgacccaaggcctgtggacagggaggttcccatgatccctcggccccactatgcccaacctggctgtgtctacttcatctgtttgctccgagatgacttgctgcttcgtcagggtgactgtgtgtatctgatgagggatagtcggcgcacccctgatggccacccggtccgtcagtcctatcgactgttatctcacattaaccgagataaacttgacatctttcgcattgagaagctttggaagaatgaaaaagaggaacggtttgcctttggtcaccattatttccgtccccacgaaacacaccactctccatcccgtcggttctatcataatgaactatttcgggtgccactctatgagatcattcccttggaggctgtagtggggacctgctgtgtgttggacctttatacgtattgtaaagggagacccaaaggagtaaaggagcaagatgtgtacatctgtgattatcggcttgacaagtcagcacacctgttttacaagatccaccggaaccgctatcctgtctgcaccaaaccctatgcttttgatcacttccccaagaagctcactcccaaaaaagatttctcgcctcattacgtcccagacaactacaagaggaatggaggacgatcatcctggaagtctgagcgctcaaagccacccctaaaagacttgggccaggaggatgatgctctacccttgattgaagaggttctagccagtcaagagcaagcagccaatgagatacccagcctggaggagccagaacgggaaggggccactgctaacgtcagtgagggtgaaaaaaaaacagaggaaagtagtcaagaaccccagtcaacctgtacccctgaggaacgacggcataaccaacgggaacgactcaaccagatcttgctcaatctccttgaaaaaatccctggaaaaaatgccattgatgtgacctacttgctggaggaaggatcaggcaggaaactgcgaaggcgtactttgtttatcccagaaaacagctttcgaaagtgaccctcaaagaatgagaacctcaagcatctgggatccagtggagctaatcagtcctgcctcctgctctctgggtatagacaggggtgggaagggtccatctgggcaaggggaatggggccatgttgttgacattaggtacttaataagccttggagctagtggagagggagaggaaagggttctgtccaagacagttcaggttaattaattttcttctccattgcttcaccttaagggttaataatgtagagaggagggaggaccacattgatgaccagaacctactggtactttatagcatttgccccaccccacagcttaggtttttctgtcatcctcagatcccacaggcattgcgaagaagctgcttcctatacccaggtataactcaaaatccaaagggatagggccaggatccctattcctaccccatctattctctgttggctccaagagctaccccagagaccttaaacagaaacagtagctgaggcttcttcctagatacctgactagggaagtttgtctctcctttcttgcccaaccaggtcaaagtaaaatgtgagttgacagctcaaagcacttgtaactgctgccccctccctacctctactccccaaaatggaatcatgggatagggaaggcccccatggggtcagaagggcacggtagttcttgcaattatttttgttttacccttcataacctgtcaaacatatttttttctaatgagaaagccaggcccccgccagcacacatgctgtttttaatgcgctgtagttcttgtgtgtctgctgtgctgtgcaaatggagattcagttcaaaataaaatcatttaaaaacctacataaaaagaactctaaacccacccctgcaacaaaagtcactacataaactgttcagcagtattcacctatcagagtatttgttgtgagtatagattatcaattgaaaacactactcttgttttcttaattgtacagttttcaatgtccctttcttaaagagacagtatatttctcttcacccctagcccatcttccctcaccctcctgaatgacatcaggaggtatatccagggtgtctccttccttcctactctcttgaccagaagttaacagactatactgtctctttaaaaataaaatttaaaaagctttgttgtcttttcagacatacatatgcatatatgttttagatgttcttataagagaaaagatggtttttaaatgtgccaagttgtgtgtgtgtgtgtatatatatgtgtgtatgtgtgtgtatatatatatgtgtgtgtgtgtgtatatatatacacacacacacacacacctgctgtgtgattggtaagcaatacaatagtaaacatgtccccattacttttttctaatattggaccaatgctgtcctaattgtacatttccccttatggtgacgatgctctgactcgtttaggtagacacattgaccaccttccattccattaaatattttttcctttttcccctttctgtgtcattcttgaggaaaaaacaaaagagagaggggatgccaatgatccccttgagcagagaaaaagcaaaataaatattttattaaagaaaaaagagaattaagaaaatagtttggagtattttcttactgtagagaagcactgtacattactaagagacctgggtataagatactcacatgtggagctggaaaaatcgcatgtccaagcccgtttgagtggtttcttttgtttttcattgcagggagtgggtgggagggaggtgggactaggggcactttgggggtctccttttagtcaaaagcgagaaaatgacaagaaagagattaaaattcaatgtttcctttatagtgttaaacactaaaattttaaaaaagatgaaaaagaaaaaaaaactttgtaaaatgcgagaacagaagcaaaagacactacgctctgtcattttatctttcttttgttgaaagactaaaaaaaaactgaaatgttttttagacaatcaaatgttaggtaagtgcaaaaacttgttttttcttactggtgtagaaattaatgcctttttttatttttcagttattgtagttatacgttagtaaacagaatacgcacccatgattacggacggcactggctgtctg

SEQ ID NO: 356485 - DNA, 9044 bp, Homo sapiens
gggggcgctaggcgcccttcgctccctccctctggaggagctgccgccgccaccgccgccactctgctgctgccgccgccgccgccgccgctcccgccgccattttgggttcgctttgcggaggggagacgatcccagtctcggttgcgggacccgcctcccctcagtttgccccctttagccttccacctttcccttctcctctctcgcatttccgccagtcagcttacccgctggccgcctcctgacaagcgggagggatccgccgtggacccagggaagcggaggagcctggcggccaccccctcttccccacttccctgcactctcatcgctctcggcctcggcctcggcctccgacacgagaaagatgctggtttcgagttttggagatccttgttttttatggaacacagttctgtaaaattttcataagattccttggcaataacatacgcttgtgatggaccctagaaatactgctatgttaggattgggttctgattccgaaggtttttcaagaaagagtccttctgccatcagtactggcacattggtcagtaagagagaagtagagctagaaaaaaacacaaaggaggaagaggaccttcgcaaacggaatcgagaaagaaacatcgaagctgggaaagatgatggtttgactgatgcacagcaacagttttcagtgaaagaaacaaacttttcagagggaaatttaaaattgaaaattggcctccaggctaagagaactaaaaaacctccaaagaacttggagaactatgtatgtcgacctgccataaaaacaactattaagcacccaaggaaagcacttaaaagtggaaagatgacggatgaaaagaatgaacactgtccttcaaaacgagacccttcaaagttgtacaagaaagcagatgatgttgcagccattgaatgccagtctgaagaagtcatccgtcttcattcacagggagaaaacaatcctttgtctaagaagctgtctccagtacactcagaaatggcagattatattaatgcaacgccatctactcttcttggtagccgggatcctgatttaaaggacagagcattacttaatggaggaactagtgtaacagaaaagttggcacagctgattgctacctgtcctccttccaagtcttccaagacaaaaccgaagaagttaggaactggcactacagcaggattggttagcaaggatttgatcaggaaagcaggtgttggctctgtagctggaataatacataaggacttaataaaaaagccaaccatcagcacagcagttggattggtaactaaagatcctgggaaaaagccagtgtttaatgcagcagtaggattggtcaataaggactctgtgaaaaaactgggaactggcactacagcggtattcattaataaaaacttaggcaaaaagccaggaactatcactacagtaggactgctaagcaaagattcaggaaagaagctaggaattggtattgttccaggtttagtgcataaagagtctggcaagaagttaggacttggcactgtggttggactggttaataaagatttgggaaagaaattgggttctactgttggcctagtggccaaggactgtgcaaagaagattgtagcaagttcagcaatgggattggttaataaggacattggaaagaaactaatgagttgtcctttggcaggtctgatcagtaaagatgccataaaccttaaagccgaagcactgctccccactcaggaaccgcttaaggcttcttgtagtacaaacatcaataatcaggaaagtcaggaactttctgaatccctgaaagatagtgccaccagcaaaacttttgaaaagaatgttgtacggcagaataaagaaagcatattggaaaagttctcagtacgaaaagaaatcattaatttggagaaagaaatgtttaatgaaggaacatgcattcagcaagacagtttctcatccagtgaaaagggatcttatgaaacctcaaagcatgaaaagcagcctcctgtatattgcacttctccggactttaaaatgggaggtgcttctgatgtatctaccgctaaatccccattcagtgcagtaggagaaagcaatctcccttccccatcacctactgtatctgttaatcctttaaccagaagtccccctgaaacttcttcacagttggctcctaatccattacttttaagttctactacagaactaatcgaagaaatttctgaatctgttggaaagaaccagtttacttctgaaagtacccacttgaacgttggtcataggtcagttggtcatagtataagtattgaatgtaaagggattgataaagaggtaaatgattcaaaaactacccatatagatattccaagaataagctcttcccttggaaaaaagccaagtttgacttctgaatccagcattcatactattactccttcagttgttaacttcactagtttatttagtaataagccttttttaaaactgggtgcagtatctgcatcagacaaacactgccaagttgctgaaagcctaagtactagtttgcagtccaaaccattaaaaaaaagaaaaggaagaaaacctcggtggactaaagtggtggcaagaagcacatgccggtctccaaaagggctagaattagaaagatcagagctttttaaaaacgtttcatgtagctcactatcaaatagtaattctgagccagccaagtttatgaaaaacattggacccccttcatttgtagatcatgacttccttaaacgccgattgccaaagttgagcaaatccacagctccatctcttgctctcttagctgatagtgaaaaaccatctcataagtcttttgctactcacaaactatcctccagtatgtgtgtctctagtgaccttttgtctgatatttataagcccaaaagaggaaggcctaaatctaaggagatgcctcaactggaagggccacctaaaaggactttaaaaatccctgcttctaaagtgttttctttacagtctaaggaagaacaagaacccccaattttacagccagaaattgaaatcccttccttcaaacaaggtctgtctgtgtctccttttccaaaaaagagaggcaggcctaagaggcaaatgaggtcaccagtcaagatgaagccacctgtactgtcagtggctccatttgttgccactgaaagtccaagcaagctagaatctgaaagtgacaaccatagaagtagcagtgatttctttgagagcgaggatcaacttcaggatccagatgacctagatgacagtcataggccaagtgtctgtagtatgagtgaccttgagatggaaccagataaaaaaattaccaagagaaacaatggacaattaatgaaaacaattatccgcaaaataaataaaatgaagactttaaagagaaagaaactgttgaatcagattctttcaagttctgtagaatcaagtaataaagggaaagtgcaatccaaactccataatacggtatcaagtcttgctgccacatttggctctaaattgggccaacagataaatgtcagcaagaaaggaaccatttatataggaaagagaagaggtcgcaaaccaaaaactgtcttaaatggtattctttctggtagtcctactagccttgctgttcttgagcaaacagctcaacaggcagctgggtcagcattaggacagattcttcccccattactgccttcatctgctagtagttctgagattcttccatcacctatttgctctcagtcttctgggactagtggaggtcagagccctgtaagtagtgatgcaggttttgttgaacccagttcagtgccatatttgcatttacactccagacagggcagtatgattcagactcttgcaatgaagaaggcctcaaaggggaggaggcggttatctcctcctactttgttgccaaattctccttcgcacttgagtgaactcacatctctaaaagaagctactccttccccaatcagtgagtctcatagtgatgagaccattcccagtgatagtggaattggaacagataataacagcacatcagacagggcagagaaattttgtgggcaaaaaaagaggaggcattcttttgagcatgtttctctgattccccctgaaacctctacagtgctaagcagtcttaaagaaaaacataaacacaaatgtaagcgcaggaatcatgattacctcagctatgacaagatgaaaaggcagaaacgaaaacggaaaaagaaatatccccagcttcgaaatagacaggatccagactttattgcagagctggaggaactaataagtcgcctaagtgaaattcggatcactcatcgaagtcatcattttatcccccgagatcttctgccaactatctttcgaatcaactttaatagtttctatacacatccttctttccccttagaccctttgcactacattcgaaaacctgacttaaaaaagaaaagagggagaccccctaagatgagggaggcaatggctgaaatgccttttatgcacagccttagttttcctctttctagtactggattctatccatcttatggtatgccttactctccttcaccccttacagctgctcccataggattaggttactatggaaggtatcctcccactctttatccacctcctccatctccttctttcaccacgccacttccacctccttcctatatgcatgctggtcatttacttctcaatcctgccaaataccataagaaaaagcataagctacttcgacaggaggcctttcttacaaccagcaggactcccctcctttccatgagtacctaccccagtgttcctcctgagatggcctatggttggatggttgagcacaaacacaggcaccgtcacaaacacagagaacaccgttcttctgaacaaccccaggtttctatggacactggctcttcccgatctgtcctggaatctttgaagcgctatagatttggaaaggatgctgttggagagcgatataagcataaggaaaagcaccgttgtcacatgtcctgccctcatctctctccttcaaaaagcttaataaacagagaggaacagtgggtccaccgagagccttcagaatctagtccattggccttgggattgcagacacctttacagattgactgttcagaaagttctccaagcttatcccttggaggattcactcccaactctgagccagccagcagtgatgaacatacaaaccttttcacaagtgcaataggcagctgcagagtttcaaaccctaactccagtggccggaagaaattaactgacagccctggactcttttctgcacaggacacttcactaaatcggcttcacagaaaggagtcactgccttctaacgaaagggcagtacagactttggcaggctcccagccaacctctgataaaccctcccagcggccatcagagagcacaaattgtagccctacccggaaaaggtcttcatctgagagtacttcttcaacagtaaacggagttccctctcgaagtccaagattagttgcttctggggatgactctgtggatagtctgctgcagcggatggtacaaaatgaggaccaagagcccatggagaaaagtattgatgctgtgattgcaactgcctctgcaccaccttcttccagtccaggccgtagccacagcaaggaccgaaccctgggaaaaccagacagccttttagtgcctgcagtcgcaagtgactcttgcaataatagcatctcactcctatctgaaaagttgacaagcagctgttccccccatcatatcaagagaagtgtagtggaagctatgcaacgccaagctcggaaaatgtgcaattacgacaaaatcttggccacaaagaaaaacctagaccatgtcaataaaatcttaaaagccaaaaaacttcaaaggcaggccaggacagggaataactttgtgaaacgtaggccaggtcgacctcggaaatgtccccttcaggctgtcgtatcaatgcaagcattccaggctgctcagtttgtcaacccagaattgaacagagacgaggaaggagcagcactgcacctcagtcctgacacagttacagatgtaattgaggctgttgttcagagtgtaaatctgaacccagaacataaaaaggggttgaagagaaaaggttggctattggaagaacagaccagaaaaaagcagaagccattaccagaggaagaagagcaagagaataataaaagctttaatgaagcaccagttgagattcccagtccttctgaaaccccagctaaaccttctgaacctgaaagtaccttgcagcctgtgctttctctcatcccaagggaaaagaagcccccacgtcccccaaagaagaagtatcagaaagcagggctgtattctgacgtttacaaaactacagacccaaagagtcgattgatccaattaaagaaagagaagctggagtatactccaggagagcatgaatatggattatttccagcgcccattcatgttgtgttttttgtttcaggaaagtatctaagacaaaagagaattgacttccagcttccttatgatatcctttggcagtggaaacacaatcagctatacaaaaagccagatgtcccactatataagaaaattcgttcaaatgtctacgttgatgtcaaacccctttctggttacgaagctaccacctgtaactgtaagaagccagatgatgacaccaggaagggctgtgttgatgactgcctcaatagaatgatctttgctgagtgttcccccaacacttgcccatgtggcgagcaatgctgtaaccagaggatacagaggcatgaatgggtgcaatgtctagaacgatttcgagctgaggaaaaaggttggggaatcagaaccaaagagcccctaaaagctgggcagttcatcattgaatacctaggggaggtcgtcagtgaacaggagttcaggaacaggatgattgagcagtatcataatcacagtgaccactactgcctgaacctggatagtgggatggtgattgacagttaccgcatgggaaatgaggcccgattcatcaaccatagctgtgacccaaattgtgaaatgcagaaatggtctgttaatggagtataccggattggactctatgctcttaaagacatgccagctgggactgaactcacttatgattataactttcattccttcaatgtggaaaaacagcaactttgtaagtgtggctttgagaaatgtcgaggaatcatcggaggcaagagtcagcgtgtgaatggactcaccagcagcaaaaacagccagcccatggccacacacaaaaaatctggacggtcaaaagagaagagaaagtctaagcacaagctgaagaaaaggagaggccatctctctgaggaacccagtgaaaatatcaacaccccaactagattgaccccccaattacagatgaagccaatgtccaatcgtgaaaggaactttgtgttaaagcatcatgtattcttggtccgaaactgggagaagattcgtcaaaaacaggaggaagtaaagcacaccagtgataatattcactcagcatcattatatacccgttggaatgggatctgccgagatgatgggaatatcaagtctgatgtcttcatgacccagttctctgccctgcagacagctcgatctgttcgaacaagacggttggcagctgcagaggaaaatattgaagtggctcgggcagcccgcctagcccagatcttcaaagaaatttgtgatggtatcatctcttataaagattcttcccggcaagcactggcagctccacttttgaaccttcccccaaagaaaaagaatgctgattattatgagaagatctctgatcccctagatcttatcaccatagagaagcagatcctcactggttactataagacagtggaagcttttgatgctgacatgctcaaagtctttcggaatgctgagaagtactatgggcgtaaatccccagttgggagagatgtttgtcgtctacgaaaggcctattacaatgcccggcatgaggcatcagcccagattgatgagattgtgggagagacagcaagtgaggcagacagcagtgagacctcagtctctgaaaaggagaatgggcatgagaaggacgacgatgttattcgctgtatctgtggcctctacaacgatgaaggtctcatgatccagtgtgacaagtgcatggtatggcagcactgtgattgtatgggagtgaactcagatgtggagcactacctttgtgagcagtgtgacccaaggcctgtggacagggaggttcccatgatccctcggccccactatgcccaacctggctgtgtctacttcatctgtttgctccgagatgacttgctgcttcgtcagggtgactgtgtgtatctgatgagggatagtcggcgcacccctgatggccacccggtccgtcagtcctatcgactgttatctcacattaaccgagataaacttgacatctttcgcattgagaagctttggaagaatgaaaaagaggaacggtttgcctttggtcaccattatttccgtccccacgaaacacaccactctccatcccgtcggttctatcataatgaactatttcgggtgccactctatgagatcattcccttggaggctgtagtggggacctgctgtgtgttggacctttatacgtattgtaaaggtaagtgatctgggctagttaaaaaatgacctcggccaagtgcagtggctcacgctgataatcccagcggtgtgggaggccgaggcaggcagattgcttaagcccaggagtgtgagaccagcctggccaacgtggcaaaactctgcctctgtagctgggcatggcagtgtaggcctgtagtcccaactactgggaggattgctgagcctgggaggcagaggttgcagtgagccaagatcgcaccactgcactccaacctgtgcaacagaatga

SEQ ID NO: 356486 - DNA, 7528 bp, Homo sapiens
gggggcgctaggcgcccttcgctccctccctctggaggagctgccgccgccaccgccgccactctgctgctgccgccgccgccgccgccgctcccgccgccattttgggttcgctttgcggaggggagacgatcccagtctcggttgcgggacccgcctcccctcagtttgccccctttagccttccacctttcccttctcctctctcgcatttccgccagtcagcttacccgctggccgcctcctgacaagcgggagggatccgccgtggacccagggaagcggaggagcctggcggccaccccctcttccccacttccctgcactctcatcgctctcggcctcggcctcggcctccgacacgagaaagatgctggtttcgagttttggagatccttgttttttatggaacacagttctgtaaaattttcataagattccttggcaataacatacgcttgtgatggaccctagaaatactgctatgttaggattgggttctgattccgaaggtttttcaagaaagagtccttctgccatcagtactggcacattggtcagtaagagagaagtagagctagaaaaaaacacaaaggaggaagaggaccttcgcaaacggaatcgagaaagaaacatcgaagctgggaaagatgatggtttgactgatgcacagcaacagttttcagtgaaagaaacaaacttttcagagggaaatttaaaattgaaaattggcctccaggctaagagaactaaaaaacctccaaagaacttggagaactatgtatgtcgacctgccataaaaacaactattaagcacccaaggaaagcacttaaaagtggaaagatgacggatgaaaagaatgaacactgtccttcaaaacgagacccttcaaagttgtacaagaaagcagatgatgttgcagccattgaatgccagtctgaagaagtcatccgtcttcattcacagggagaaaacaatcctttgtctaagaagctgtctccagtacactcagaaatggcagattatattaatgcaacgccatctactcttcttggtagccgggatcctgatttaaaggacagagcattacttaatggaggaactagtgtaacagaaaagttggcacagctgattgctacctgtcctccttccaagtcttccaagacaaaaccgaagaagttaggaactggcactacagcaggattggttagcaaggatttgatcaggaaagcaggtgttggctctgtagctggaataatacataaggacttaataaaaaagccaaccatcagcacagcagttggattggtaactaaagatcctgggaaaaagccagtgtttaatgcagcagtaggattggtcaataaggactctgtgaaaaaactgggaactggcactacagcggtattcattaataaaaacttaggcaaaaagccaggaactatcactacagtaggactgctaagcaaagattcaggaaagaagctaggaattggtattgttccaggtttagtgcataaagagtctggcaagaagttaggacttggcactgtggttggactggttaataaagatttgggaaagaaattgggttctactgttggcctagtggccaaggactgtgcaaagaagattgtagcaagttcagcaatgggattggttaataaggacattggaaagaaactaatgagttgtcctttggcaggtctgatcagtaaagatgccataaaccttaaagccgaagcactgctccccactcaggaaccgcttaaggcttcttgtagtacaaacatcaataatcaggaaagtcaggaactttctgaatccctgaaagatagtgccaccagcaaaacttttgaaaagaatgttgtacggcagaataaagaaagcatattggaaaagttctcagtacgaaaagaaatcattaatttggagaaagaaatgtttaatgaaggaacatgcattcagcaagacagtttctcatccagtgaaaagggatcttatgaaacctcaaagcatgaaaagcagcctcctgtatattgcacttctccggactttaaaatgggaggtgcttctgatgtatctaccgctaaatccccattcagtgcagtaggagaaagcaatctcccttccccatcacctactgtatctgttaatcctttaaccagaagtccccctgaaacttcttcacagttggctcctaatccattacttttaagttctactacagaactaatcgaagaaatttctgaatctgttggaaagaaccagtttacttctgaaagtacccacttgaacgttggtcataggtcagttggtcatagtataagtattgaatgtaaagggattgataaagaggtaaatgattcaaaaactacccatatagatattccaagaataagctcttcccttggaaaaaagccaagtttgacttctgaatccagcattcatactattactccttcagttgttaacttcactagtttatttagtaataagccttttttaaaactgggtgcagtatctgcatcagacaaacactgccaagttgctgaaagcctaagtactagtttgcagtccaaaccattaaaaaaaagaaaaggaagaaaacctcggtggactaaagtggtggcaagaagcacatgccggtctccaaaagggctagaattagaaagatcagagctttttaaaaacgtttcatgtagctcactatcaaatagtaattctgagccagccaagtttatgaaaaacattggacccccttcatttgtagatcatgacttccttaaacgccgattgccaaagttgagcaaatccacagctccatctcttgctctcttagctgatagtgaaaaaccatctcataagtcttttgctactcacaaactatcctccagtatgtgtgtctctagtgaccttttgtctgatatttataagcccaaaagaggaaggcctaaatctaaggagatgcctcaactggaagggccacctaaaaggactttaaaaatccctgcttctaaagtgttttctttacagtctaaggaagaacaagaacccccaattttacagccagaaattgaaatcccttccttcaaacaaggtctgtctgtgtctccttttccaaaaaagagaggcaggcctaagaggcaaatgaggtcaccagtcaagatgaagccacctgtactgtcagtggctccatttgttgccactgaaagtccaagcaagctagaatctgaaagtgacaaccatagaagtagcagtgatttctttgagagcgaggatcaacttcaggatccagatgacctagatgacagtcataggccaagtgtctgtagtatgagtgaccttgagatggaaccagataaaaaaattaccaagagaaacaatggacaattaatgaaaacaattatccgcaaaataaataaaatgaagactttaaagagaaagaaactgttgaatcagattctttcaagttctgtagaatcaagtaataaagggaaagtgcaatccaaactccataatacggtatcaagtcttgctgccacatttggctctaaattgggccaacagataaatgtcagcaagaaaggaaccatttatataggaaagagaagaggtcgcaaaccaaaaactgtcttaaatggtattctttctggtagtcctactagccttgctgttcttgagcaaacagctcaacaggcagctgggtcagcattaggacagattcttcccccattactgccttcatctgctagtagttctgagattcttccatcacctatttgctctcagtcttctgggactagtggaggtcagagccctgtaagtagtgatgcaggttttgttgaacccagttcagtgccatatttgcatttacactccagacagggcagtatgattcagactcttgcaatgaagaaggcctcaaaggggaggaggcggttatctcctcctactttgttgccaaattctccttcgcacttgagtgaactcacatctctaaaagaagctactccttccccaatcagtgagtctcatagtgatgagaccattcccagtgatagtggaattggaacagataataacagcacatcagacagggcagagaaattttgtgggcaaaaaaagaggaggcattcttttgagcatgtttctctgattccccctgaaacctctacagtgctaagcagtcttaaagaaaaacataaacacaaatgtaagcgcaggaatcatgattacctcagctatgacaagatgaaaaggcagaaacgaaaacggaaaaagaaatatccccagcttcgaaatagacaggatccagactttattgcagagctggaggaactaataagtcgcctaagtgaaattcggatcactcatcgaagtcatcattttatcccccgagatcttctgccaactatctttcgaatcaactttaatagtttctatacacatccttctttccccttagaccctttgcactacattcgaaaacctgacttaaaaaagaaaagagggagaccccctaagatgagggaggcaatggctgaaatgccttttatgcacagccttagttttcctctttctagtactggattctatccatcttatggtatgccttactctccttcaccccttacagctgctcccataggattaggttactatggaaggtatcctcccactctttatccacctcctccatctccttctttcaccacgccacttccacctccttcctatatgcatgctggtcatttacttctcaatcctgccaaataccataagaaaaagcataagctacttcgacaggaggcctttcttacaaccagcaggactcccctcctttccatgagtacctaccccagtgttcctcctgagatggcctatggttggatggttgagcacaaacacaggcaccgtcacaaacacagagaacaccgttcttctgaacaaccccaggtttctatggacactggctcttcccgatctgtcctggaatctttgaagcgctatagatttggaaaggatgctgttggagagcgatataagcataaggaaaagcaccgttgtcacatgtcctgccctcatctctctccttcaaaaagcttaataaacagagaggaacagtgggtccaccgagagccttcagaatctagtccattggccttgggattgcagacacctttacagattgactgttcagaaagttctccaagcttatcccttggaggattcactcccaactctgagccagccagcagtgatgaacatacaaaccttttcacaagtgcaataggcagctgcagagtttcaaaccctaactccagtggccggaagaaattaactgacagccctggactcttttctgcacaggacacttcactaaatcggcttcacagaaaggagtcactgccttctaacgaaagggcagtacagactttggcaggctcccagccaacctctgataaaccctcccagcggccatcagagagcacaaattgtagccctacccggaaaaggtcttcatctgagagtacttcttcaacagtaaacggagttccctctcgaagtccaagattagttgcttctggggatgactctgtggatagtctgctgcagcggatggtacaaaatgaggaccaagagcccatggagaaaagtattgatgctgtgattgcaactgcctctgcaccaccttcttccagtccaggccgtagccacagcaaggaccgaaccctgggaaaaccagacagccttttagtgcctgcagtcgcaagtgactcttgcaataatagcatctcactcctatctgaaaagttgacaagcagctgttccccccatcatatcaagagaagtgtagtggaagctatgcaacgccaagctcggaaaatgtgcaattacgacaaaatcttggccacaaagaaaaacctagaccatgtcaataaaatcttaaaagccaaaaaacttcaaaggcaggccaggacagggaataactttgtgaaacgtaggccaggtcgacctcggaaatgtccccttcaggctgtcgtatcaatgcaagcattccaggctgctcagtttgtcaacccagaattgaacagagacgaggaaggagcagcactgcacctcagtcctgacacagttacagatgtaattgaggctgttgttcagagtgtaaatctgaacccagaacataaaaaggggttgaagagaaaaggttggctattggaagaacagaccagaaaaaagcagaagccattaccagaggaagaagagcaagagaataataaaagctttaatgaagcaccagttgagattcccagtccttctgaaaccccagctaaaccttctgaacctgaaagtaccttgcagcctgtgctttctctcatcccaagggaaaagaagcccccacgtcccccaaagaagaagtatcagaaagcagggctgtattctgacgtttacaaaactacagacccaaagagtcgattgatccaattaaagaaagagaagctggagtatactccaggagagcatgaatatggattatttccagcgcccattcatgttgtgttttttgtttcaggaaagtatctaagacaaaagagaattgacttccagcttccttatgatatcctttggcagtggaaacacaatcagctatacaaaaagccagatgtcccactatataagaaaattcgttcaaatgtctacgttgatgtcaaacccctttctggttacgaagctaccacctgtaactgtaagaagccagatgatgacaccaggaagggctgtgttgatgactgcctcaatagaatgatctttgctgagtgttcccccaacacttgcccatgtggcgagcaatgctgtaaccagaggatacagaggcatgaatgggtgcaatgtctagaacgatttcgagctgaggaaaaaggttggggaatcagaaccaaagagcccctaaaagctgggcagttcatcattgaatacctaggggaggtcgtcagtgaacaggagttcaggaacaggatgattgagcagtatcataatcacagtgaccactactgcctgaacctggatagtgggatggtgattgacagttaccgcatgggaaatgaggcccgattcatcaaccatagctgtgacccaaattgtgaaatgcagaaatggtaaggaagcaaaagaaggtgaagacaagaatccagcagaataagcattgagtgcagcaagggattgatctttccagtgtcagtcagcttacacaaagcagctcaggctgttccccattaccccagatcccacgggcagagtaagctgcttcgttttcaccctaacttctcactcccagacagatatttttgtttttatttgtgttctgtttttttgttttgcttttttggtttttttgtttggcatgcaagtagtttcaggatctatgtcctagaaaaatataataatgatgatgatgatagccagggtggtggtacacacctgtagtcccagctatttgagaggttgaggtgagaggatcac

SEQ ID NO: 356487 - DNA, 11394 bp, Homo sapiens
gaggcttgggcttgcgccgttgaagagaaagatgctggtttcgagttttggagatccttgttttttatggaacacagttctgtaaaattttcataagattccttggcaataacatacgcttgtgatggaccctagaaatactgctatgttaggattgggttctgattccgaaggtttttcaagaaagagtccttctgccatcagtactggcacattggtcagtaagagagaagtagagctagaaaaaaacacaaaggaggaagaggaccttcgcaaacggaatcgagaaagaaacatcgaagctgggaaagatgatggtttgactgatgcacagcaacagttttcagtgaaagaaacaaacttttcagagggaaatttaaaattgaaaattggcctccaggctaagagaactaaaaaacctccaaagaacttggagaactatgtatgtcgacctgccataaaaacaactattaagcacccaaggaaagcacttaaaagtggaaagatgacggatgaaaagaatgaacactgtccttcaaaacgagacccttcaaagttgtacaagaaagcagatgatgttgcagccattgaatgccagtctgaagaagtcatccgtcttcattcacagggagaaaacaatcctttgtctaagaagctgtctccagtacactcagaaatggcagattatattaatgcaacgccatctactcttcttggtagccgggatcctgatttaaaggacagagcattacttaatggaggaactagtgtaacagaaaagttggcacagctgattgctacctgtcctccttccaagtcttccaagacaaaaccgaagaagttaggaactggcactacagcaggattggttagcaaggatttgatcaggaaagcaggtgttggctctgtagctggaataatacataaggacttaataaaaaagccaaccatcagcacagcagttggattggtaactaaagatcctgggaaaaagccagtgtttaatgcagcagtaggattggtcaataaggactctgtgaaaaaactgggaactggcactacagcggtattcattaataaaaacttaggcaaaaagccaggaactatcactacagtaggactgctaagcaaagattcaggaaagaagctaggaattggtattgttccaggtttagtgcataaagagtctggcaagaagttaggacttggcactgtggttggactggttaataaagatttgggaaagaaattgggttctactgttggcctagtggccaaggactgtgcaaagaagattgtagcaagttcagcaatgggattggttaataaggacattggaaagaaactaatgagttgtcctttggcaggtctgatcagtaaagatgccataaaccttaaagccgaagcactgctccccactcaggaaccgcttaaggcttcttgtagtacaaacatcaataatcaggaaagtcaggaactttctgaatccctgaaagatagtgccaccagcaaaacttttgaaaagaatgttgtacggcagaataaagaaagcatattggaaaagttctcagtacgaaaagaaatcattaatttggagaaagaaatgtttaatgaaggaacatgcattcagcaagacagtttctcatccagtgaaaagggatcttatgaaacctcaaagcatgaaaagcagcctcctgtatattgcacttctccggactttaaaatgggaggtgcttctgatgtatctaccgctaaatccccattcagtgcagtaggagaaagcaatctcccttccccatcacctactgtatctgttaatcctttaaccagaagtccccctgaaacttcttcacagttggctcctaatccattacttttaagttctactacagaactaatcgaagaaatttctgaatctgttggaaagaaccagtttacttctgaaagtacccacttgaacgttggtcataggtcagttggtcatagtataagtattgaatgtaaagggattgataaagaggtaaatgattcaaaaactacccatatagatattccaagaataagctcttcccttggaaaaaagccaagtttgacttctgaatccagcattcatattaaaactgggtgcagtatctgcatcagacaaacactgccaagttgctgaaagcctaagtactagtttgcagtccaaaccattaaaaaaaagaaaaggaagaaaacctcggtggactaaagtggtggcaagaagcacatgccggtctccaaaagggctagaattagaaagatcagagctttttaaaaacgtttcatgtagctcactatcaaatagtaattctgagccagccaagtttatgaaaaacattggacccccttcatttgtagatcatgacttccttaaacgccgattgccaaagttgagcaaatccacagctccatctcttgctctcttagctgatagtgaaaaaccatctcataagtcttttgctactcacaaactatcctccagtatgtgtgtctctagtgaccttttgtctgatatttataagcccaaaagaggaaggcctaaatctaaggagatgcctcaactggaagggccacctaaaaggactttaaaaatccctgcttctaaagtgttttctttacagtctaaggaagaacaagaacccccaattttacagccagaaattgaaatcccttccttcaaacaaggtctgtctgtgtctccttttccaaaaaagagaggcaggcctaagaggcaaatgaggtcaccagtcaagatgaagccacctgtactgtcagtggctccatttgttgccactgaaagtccaagcaagctagaatctgaaagtgacaaccatagaagtagcagtgatttctttgagagcgaggatcaacttcaggatccagatgacctagatgacagtcataggccaagtgtctgtagtatgagtgaccttgagatggaaccagataaaaaaattaccaagagaaacaatggacaattaatgaaaacaattatccgcaaaataaataaaatgaagactttaaagagaaagaaactgttgaatcagattctttcaagttctgtagaatcaagtaataaagggaaagtgcaatccaaactccataatacggtatcaagtcttgctgccacatttggctctaaattgggccaacagataaatgtcagcaagaaaggaaccatttatataggaaagagaagaggtcgcaaaccaaaaactgtcttaaatggtattctttctggtagtcctactagccttgctgttcttgagcaaacagctcaacaggcagctgggtcagcattaggacagattcttcccccattactgccttcatctgctagtagttctgagattcttccatcacctatttgctctcagtcttctgggactagtggaggtcagagccctgtaagtagtgatgcaggttttgttgaacccagttcagtgccatatttgcatttacactccagacagggcagtatgattcagactcttgcaatgaagaaggcctcaaaggggaggaggcggttatctcctcctactttgttgccaaattctccttcgcacttgagtgaactcacatctctaaaagaagctactccttccccaatcagtgagtctcatagtgatgagaccattcccagtgatagtggaattggaacagataataacagcacatcagacagggcagagaaattttgtgggcaaaaaaagaggaggcattcttttgagcatgtttctctgattccccctgaaacctctacagtgctaagcagtcttaaagaaaaacataaacacaaatgtaagcgcaggaatcatgattacctcagctatgacaagatgaaaaggcagaaacgaaaacggaaaaagaaatatccccagcttcgaaatagacaggatccagactttattgcagagctggaggaactaataagtcgcctaagtgaaattcggatcactcatcgaagtcatcattttatcccccgagatcttctgccaactatctttcgaatcaactttaatagtttctatacacatccttctttccccttagaccctttgcactacattcgaaaacctgacttaaaaaagaaaagagggagaccccctaagatgagggaggcaatggctgaaatgccttttatgcacagccttagttttcctctttctagtactggattctatccatcttatggtatgccttactctccttcaccccttacagctgctcccataggattaggttactatggaaggtatcctcccactctttatccacctcctccatctccttctttcaccacgccacttccacctccttcctatatgcatgctggtcatttacttctcaatcctgccaaataccataagaaaaagcataagctacttcgacaggaggcctttcttacaaccagcaggactcccctcctttccatgagtacctaccccagtgttcctcctgagatggcctatggttggatggttgagcacaaacacaggcaccgtcacaaacacagagaacaccgttcttctgaacaaccccaggtttctatggacactggctcttcccgatctgtcctggaatctttgaagcgctatagatttggaaaggatgctgttggagagcgatataagcataaggaaaagcaccgttgtcacatgtcctgccctcatctctctccttcaaaaagcttaataaacagagaggaacagtgggtccaccgagagccttcagaatctagtccattggccttgggattgcagacacctttacagattgactgttcagaaagttctccaagcttatcccttggaggattcactcccaactctgagccagccagcagtgatgaacatacaaaccttttcacaagtgcaataggcagctgcagagtttcaaaccctaactccagtggccggaagaaattaactgacagccctggactcttttctgcacaggacacttcactaaatcggcttcacagaaaggagtcactgccttctaacgaaagggcagtacagactttggcaggctcccagccaacctctgataaaccctcccagcggccatcagagagcacaaattgtagccctacccggaaaaggtcttcatctgagagtacttcttcaacagtaaacggagttccctctcgaagtccaagattagttgcttctggggatgactctgtggatagtctgctgcagcggatggtacaaaatgaggaccaagagcccatggagaaaagtattgatgctgtgattgcaactgcctctgcaccaccttcttccagtccaggccgtagccacagcaaggaccgaaccctgggaaaaccagacagccttttagtgcctgcagtcgcaagtgactcttgcaataatagcatctcactcctatctgaaaagttgacaagcagctgttccccccatcatatcaagagaagtgtagtggaagctatgcaacgccaagctcggaaaatgtgcaattacgacaaaatcttggccacaaagaaaaacctagaccatgtcaataaaatcttaaaagccaaaaaacttcaaaggcaggccaggacagggaataactttgtgaaacgtaggccaggtcgacctcggaaatgtccccttcaggctgtcgtatcaatgcaagcattccaggctgctcagtttgtcaacccagaattgaacagagacgaggaaggagcagcactgcacctcagtcctgacacagttacagatgtaattgaggctgttgttcagagtgtaaatctgaacccagaacataaaaaggggttgaagagaaaaggttggctattggaagaacagaccagaaaaaagcagaagccattaccagaggaagaagagcaagagaataataaaagctttaatgaagcaccagttgagattcccagtccttctgaaaccccagctaaaccttctgaacctgaaagtaccttgcagcctgtgctttctctcatcccaagggaaaagaagcccccacgtcccccaaagaagaagtatcagaaagcagggctgtattctgacgtttacaaaactacagacccaaagagtcgattgatccaattaaagaaagagaagctggagtatactccaggagagcatgaatatggattatttccagcgcccattcatgttgtgttttttgtttcaggaaagtatctaagacaaaagagaattgacttccagcttccttatgatatcctttggcagtggaaacacaatcagctatacaaaaagccagatgtcccactatataagaaaattcgttcaaatgtctacgttgatgtcaaacccctttctggttacgaagctaccacctgtaactgtaagaagccagatgatgacaccaggaagggctgtgttgatgactgcctcaatagaatgatctttgctgagtgttcccccaacacttgcccatgtggcgagcaatgctgtaaccagaggatacagaggcatgaatgggtgcaatgtctagaacgatttcgagctgaggaaaaaggttggggaatcagaaccaaagagcccctaaaagctgggcagttcatcattgaatacctaggggaggtcgtcagtgaacaggagttcaggaacaggatgattgagcagtatcataatcacagtgaccactactgcctgaacctggatagtgggatggtgattgacagttaccgcatgggaaatgaggcccgattcatcaaccatagctgtgacccaaattgtgaaatgcagaaatggtctgttaatggagtataccggattggactctatgctcttaaagacatgccagctgggactgaactcacttatgattataactttcattccttcaatgtggaaaaacagcaactttgtaagtgtggctttgagaaatgtcgaggaatcatcggaggcaagagtcagcgtgtgaatggactcaccagcagcaaaaacagccagcccatggccacacacaaaaaatctggacggtcaaaagagaagagaaagtctaagcacaagctgaagaaaaggagaggccatctctctgaggaacccagtgaaaatatcaacaccccaactagattgaccccccaattacagatgaagccaatgtccaatcgtgaaaggaactttgtgttaaagcatcatgtattcttggtccgaaactgggagaagattcgtcaaaaacaggaggaagtaaagcacaccagtgataatattcactcagcatcattatatacccgttggaatgggatctgccgagatgatgggaatatcaagtctgatgtcttcatgacccagttctctgccctgcagacagctcgatctgttcgaacaagacggttggcagctgcagaggaaaatattgaagtggctcgggcagcccgcctagcccagatcttcaaagaaatttgtgatggtatcatctcttataaagattcttcccggcaagcactggcagctccacttttgaaccttcccccaaagaaaaagaatgctgattattatgagaagatctctgatcccctagatcttatcaccatagagaagcagatcctcactggttactataagacagtggaagcttttgatgctgacatgctcaaagtctttcggaatgctgagaagtactatgggcgtaaatccccagttgggagagatgtttgtcgtctacgaaaggcctattacaatgcccggcatgaggcatcagcccagattgatgagattgtgggagagacagcaagtgaggcagacagcagtgagacctcagtctctgaaaaggagaatgggcatgagaaggacgacgatgttattcgctgtatctgtggcctctacaacgatgaaggtctcatgatccagtgtgacaagtgcatggtatggcagcactgtgattgtatgggagtgaactcagatgtggagcactacctttgtgagcagtgtgacccaaggcctgtggacagggaggttcccatgatccctcggccccactatgcccaacctggctgtgtctacttcatctgtttgctccgagatgacttgctgcttcgtcagggtgactgtgtgtatctgatgagggatagtcggcgcacccctgatggccacccggtccgtcagtcctatcgactgttatctcacattaaccgagataaacttgacatctttcgcattgagaagctttggaagaatgaaaaagaggaacggtttgcctttggtcaccattatttccgtccccacgaaacacaccactctccatcccgtcggttctatcataatgaactatttcgggtgccactctatgagatcattcccttggaggctgtagtggggacctgctgtgtgttggacctttatacgtattgtaaagggagacccaaaggagtaaaggagcaagatgtgtacatctgtgattatcggcttgacaagtcagcacacctgttttacaagatccaccggaaccgctatcctgtctgcaccaaaccctatgcttttgatcacttccccaagaagctcactcccaaaaaagatttctcgcctcattacgtcccagacaactacaagaggaatggaggacgatcatcctggaagtctgagcgctcaaagccacccctaaaagacttgggccaggaggatgatgctctacccttgattgaagaggttctagccagtcaagagcaagcagccaatgagatacccagcctggaggagccagaacgggaaggggccactgctaacgtcagtgagggtgaaaaaaaaacagaggaaagtagtcaagaaccccagtcaacctgtacccctgaggaacgacggcataaccaacgggaacgactcaaccagatcttgctcaatctccttgaaaaaatccctggaaaaaatgccattgatgtgacctacttgctggaggaaggatcaggcaggaaactgcgaaggcgtactttgtttatcccagaaaacagctttcgaaagtgaccctcaaagaatgagaacctcaagcatctgggatccagtggagctaatcagtcctgcctcctgctctctgggtatagacaggggtgggaagggtccatctgggcaaggggaatggggccatgttgttgacattaggtacttaataagccttggagctagtggagagggagaggaaagggttctgtccaagacagttcaggttaattaattttcttctccattgcttcaccttaagggttaataatgtagagaggagggaggaccacattgatgaccagaacctactggtactttatagcatttgccccaccccacagcttaggtttttctgtcatcctcagatcccacaggcattgcgaagaagctgcttcctatacccaggtataactcaaaatccaaagggatagggccaggatccctattcctaccccatctattctctgttggctccaagagctaccccagagaccttaaacagaaacagtagctgaggcttcttcctagatacctgactagggaagtttgtctctcctttcttgcccaaccaggtcaaagtaaaatgtgagttgacagctcaaagcacttgtaactgctgccccctccctacctctactccccaaaatggaatcatgggatagggaaggcccccatggggtcagaagggcacggtagttcttgcaattatttttgttttacccttcataacctgtcaaacatatttttttctaatgagaaagccaggcccccgccagcacacatgctgtttttaatgcgctgtagttcttgtgtgtctgctgtgctgtgcaaatggagattcagttcaaaataaaatcatttaaaaacctacataaaaagaactctaaacccacccctgcaacaaaagtcactacataaactgttcagcagtattcacctatcagagtatttgttgtgagtatagattatcaattgaaaacactactcttgttttcttaattgtacagttttcaatgtccctttcttaaagagacagtatatttctcttcacccctagcccatcttccctcaccctcctgaatgacatcaggaggtatatccagggtgtctccttccttcctactctcttgaccagaagttaacagactatactgtctctttaaaaataaaatttaaaaagctttgttgtcttttcagacatacatatgcatatatgttttagatgttcttataagagaaaagatggtttttaaatgtgccaagttgtgtgtgtgtgtgtatatatatgtgtgtatgtgtgtgtatatatatatgtgtgtgtgtgtgtatatatatacacacacacacacacacctgctgtgtgattggtaagcaatacaatagtaaacatgtccccattacttttttctaatattggaccaatgctgtcctaattgtacatttccccttatggtgacgatgctctgactcgtttaggtagacacattgaccaccttccattccattaaatattttttcctttttcccctttctgtgtcattcttgaggaaaaaacaaaagagagaggggatgccaatgatccccttgagcagagaaaaagcaaaataaatattttattaaagaaaaaagagaattaagaaaatagtttggagtattttcttactgtagagaagcactgtacattactaagagacctgggtataagatactcacatgtggagctggaaaaatcgcatgtccaagcccgtttgagtggtttcttttgtttttcattgcagggagtgggtgggagggaggtgggactaggggcactttgggggtctccttttagtcaaaagcgagaaaatgacaagaaagagattaaaattcaatgtttcctttatagtgttaaacactaaaattttaaaaaagatgaaaaagaaaaaaaaactttgtaaaatgcgagaacagaagcaaaagacactacgctctgtcattttatctttcttttgttgaaagactaaaaaaaaactgaaatgttttttagacaatcaaatgttaggtaagtgcaaaaacttgttttttcttactggtgtagaaattaatgcctttttttatttttcagttattttataataacgaaataaaaagaaccccccagctgccaggcgggttttggtgtttgaaatgcggggcaaagcactacatcactgcaaatagatacagagttagtctgcatgtctgtaggctgtgtgattgcggaaaatataaatgctgctaatatatttcctttttacaaaagcatatctaaatagatgattgttttgatgttaatctttgtaaattatgtattaccaattttaacattggatgtaattgcatacaaagcttgcatctcaatccttgaaagtctagtattaaatggaaaaaacttttcctaactgtggaaaaaaaaaaa

SEQ ID NO: 356488 - DNA, 1061 bp, Homo sapiens
gggggcgctaggcgcccttcgctccctccctctggaggagctgccgccgccaccgccgccactctgctgctgccgccgccgccgccgccgctcccgccgccattttgggttcgctttgcggaggggagacgatcccagtctcggttgcgggacccgcctcccctcagtttgccccctttagccttccacctttcccttctcctctctcgcatttccgccagtcagcttacccgctggccgcctcctgacaagcgggagggatccgccgtggacccagggaagcggaggagcctggcggccaccccctcttccccacttccctgcactctcatcgctctcggcctcggcctcggcctccgacacggtgagtagaacgatttgggccggcattcgggcctaagcactctctcagcgattgaatcctgggctttctgggagccactgtcatctcccggacctggatctctgagagagcagtggtgaagatgggggaggggagagcagggagggggatcctgagcctaccgggaagtccctccaggcggggtgaaggggtgtccctgacaggcagactcccggagggggctgggaagtaagcgagtggaggcggagtcggctgtgcccctgacaggttagtttgtgtttgtaggcatgatcggagcctcccccatagtccagtttgtgtgtgtttaattaagggataagagtggtcgaggacacgatcttgagaggggattttacctgtgtgacaaggtctgtggtgtccctgccgcgttgaacggtatgtgggaacgacaggatgatctcagtgttgtaagtttaataaatgtcactggttagtttgtacatggaaagagatgtttttggtctagcagacagatggtctgttggtgtgtagcggctgtgttggtgtgtgtatgtgaggatggcaagtgtttccgtaagagtttgcctttatttgtgtaagtgtaatggagttccccttataagttagcttatttcttgaatccgtgttcaagggtacagctgtttcttatttttgtgcgtacggccagtgaagc

SEQ ID NO: 356489 - DNA, 1001 bp, Homo sapiens
gggggcgctaggcgcccttcgctccctccctctggaggagctgccgccgccaccgccgccactctgctgctgccgccgccgccgccgccgctcccgccgccattttgggttcgctttgcggaggggagacgatcccagtctcggttgcgggacccgcctcccctcagtttgccccctttagccttccacctttcccttctcctctctcgcatttccgccagtcagcttacccgctggccgcctcctgacaagcgggagggatccgccgtggacccagggaagcggaggagcctggcggccaccccctcttccccacttccctgcactctcatcgctctcggccatccgaccaccgaacacagggaagcaaatgcagctgcgcatgcgacacgatcgtgttgtcgaaactagaccagggtctatgccatgttctggcaactcatcaggctcacagtaatcttcctgccgtcaacctcccagaagtgctggaattaccagttccacagatgcagcatgggcattctcccaacatggacagatgcatggcccagaagaggaggagcgtgtggctgagcctcacgctaactttaacacccctcaagctctacggcttcgaggaactactggcccaacctacctaaactgaacaacactcacgatagccgaacggacactcatccgacaccagctgacacgactgaccgaaccccttcagcccacaccacgccagaccgcgcagcgctcgcgcccggtccccccccccagctgctaacgcgccgtcccactcaagcaccgcctgcccttcctcgccacccagcacccccaacgcgaccgcagactccccccacgccacgactgccacgccagcacttgcttccaggcatcctctgaacaccacaacctcccacaacctctctgtgccccaccccctggccacaacccccacacgtctccccacttcgcgcggacgcggccaaagttacaccaccccacggcctccc

SEQ ID NO: 356490 - DNA, 2264 bp, Homo sapiens
agagcccgggaagcgctcgggcgaagaggaggagccaagggtaccgagcgggtggagtcgggagccggagagcggtggaggcggatttcctgggcccggccctctggcgctaccatggcgtttggcaagagtcaccgggatccctacgcgacctccgtgggccacctcatagaaaaggctacatttgctggagttcagactgaagattggggccagttcatgcacatctgtgacataattaacactacccaggatgggccaaaagatgcagtgaaagctttgaagaaaaggatttccaaaaactacaatcataaagaaatccaacttaccttgtcacttattgacatgtgtgtgcagaactgtggtccaagtttccagtctctgattgtgaagaaggaatttgttaaagagaatttagttaagctactgaatcccagatacaacttgccattagacattcagaatagaatcttgaatttcattaagacttggtcacagggcttcccaggaggtgtggatgtaagcgaagtcaaagaagtatacctcgacctggttaagaaaggcgttcagtttcctccctcagaagcagaggctgaaacagcaagacaagagactgctcaaatctcatcaaatcctccaacatctgtccctactgcaccagctctttcttctgtaattgctccaaagaactcgactgttacattggtcccagaacagattggaaaactgcacagtgaattggatatggtgaaaatgaatgtgcgagtgatgtccgccatattgatggagaatactcctgggtctgaaaaccatgaagacatagagcttctgcagaaactctataaaacaggtcgggagatgcaggagaggatcatggacctgcttgtggtggtggagaacgaagatgtaactgttgagctaattcaggtgaatgaggatttgaataatgctatccttggatatgagaggtttactagaaaccaacaaaggattttggagcaaaataagaaccagaaggaagccaccaatactaccagtgagccttctgccccatctcaagatctcctcgacctaagtcccagtccccggatgcctagggccactctgggagaactcaacaccatgaataatcaactttcaggcttaaatttcagccttccaagttctgatgtaacaaacaacttaaaacccagtcttcatccacagatgaacttgctagccttggagaatacagagatacccccgtttgcccaaaggaccagccaaaacctcacctcaagccacgcatatgataattttctggaacattcaaattcagtgtttctacagccagttagtctacaaaccattgcagcagcaccatcaaaccagagtctgccacctttgcccagcaatcatccagcgatgacaaaaagtgatctccagccacctaattactacgaggtaatggagtttgatcccttagctcctgctgtcactacagaagctatttatgaagaaattgatgctcaccagcacaaaggagctcaaaatgatggtgactgagaagaaagtggatgatcagctcactaccacatcaaaggtgccaactctctaaaacgtagactctgtgcagctttgaagcctggaagacaatacctaccaacatgtcaaagccatggtggcacatttctgctataatgaagattaaatagaataacagttccaggataacactgattcctgacaacagcgtgagatttcaacagaacttgtttggaacaaatactcacttaaaacttcagcagaagaaaaattacttagtccttaggccaaccaatttaactgcagtgtcatgtttcacaggccttcctacatttagaaatcgtcacacagctgtgataagagtagattattttactatgaaataattctgaatagatgaaagcataaaatgtgagaaactgaatgtattattcaggaagaatactgagtgccttcatttaactaaagttgaatgtaaaagtcaatttgcacttctttataatcctctggtttagaattataaattgttaaaaccttgataattgtcatttaattatatttcaggtgtcctgaacaggtcactagactctacattgggcagcctttaaatatgattctttgtaatgctaaatagcctttttttctctttttactgcaacttaatatttctatttagaacacagaaaatgaaaatatttagaataagttgtacatttgatgacaaataaatcactattaaa

SEQ ID NO: 356491 - DNA, 1548 bp, Homo sapiens
gacacaccgccgccacacagacgaccccaccaccgcataaattatacttctttatcagcagtagtttgtttccagaagaacttttgatgtcagtaaatcttcacaatcccacctgtacattttaacattcatggacttgtaatggtgatgctttggctaacagcctagtagatgtattttatttcaattttatgatactacagtttcaaagtaattattcagaactctgaatataaaatagccctaaaccttaaaggacaaatcaaatttgaaataagaatttaaatctttggacaagctgttagggcttagtgactcctcttctactttgagcttttaaaatactgactattcataatgaaggaaaatagcaaccaactcttttagacacaataaacatggttagaagttctggcctatgacttgaaacaaataaccctgagcatacatttttgaaaaacattgtcagattcattgctgtaagtatgaagagttaataatctggaagggaattatggaattaagctgaacccatgcctgcatatttaaaaaacaaagcggcttattttaatagtatcaaactcttcagtatggtattgaatagtcagtcatatattctagctaggcatatgagtttcttatgataaaagctgaacttgttctctcaagtttaagtgaaaaaaattagttgagaaaaaataattatttaaaatataagccttcatattattgtacaatatttctcctttgagaagataggatatatgattttcccaaaaatcacaactttgaaggaagacttagttgctgacttcaattatatcctggaactggcaacttgtgcccttcctttgcttcaaaaaaagtgtaagaaagagtgataagatcaactttaatcattcttggatcttcagcaaattcaggatcaatgtagaaaaacactggcatatctacttcctcttggggattaagcctttgttcttcaaaacagaagcactggaaattatagaaagattttaataacatttctattctcgtattacataacagaaactatacagttcttttatcttagcattccagtacacttcgtgattttaataagcatactattaaatacacagttctgtgataaattaagagcatcttttcatctcaatgagttctgctttaaggatgaagaacaaattctaatcttaaaagcagatatccatttggtttggttctcaatctctgcatagcaggtatagatagtgaagaaaaatagcttgatgtttagaagaaattcgttttcagaaatcacaagatctactaaaacactaagtttcatactaaaccgtttcatgtatctttatcatattctgtaaagtttacactttgatgtacctgtattttattgaaatactgtccagcttcaaatggaacaatattgtatgtagaaattccaattactggtttgtcagtaggattcttagctctgtaaaacgccagtgcagtctctcctggcaccacctgttttaaagaatatatatattatcaatactttga

SEQ ID NO: 356492 - DNA, 476 bp, Homo sapiens
tcaggaatcagtgagtatttgtctccacacaagttctgtgtgtcatgctatgcctaggccttcctacatttagaaatcgtcacacagctgtgataagagtagattattttactatgaaataattctgaatagatgaaagcataaaatgtgagaaactgaatgtattattcaggaagaatactgagtgccttcatttaactaaagttgaatgtaaaagtcaatttgcacttctttataatcctctggtttagaattataaattgttaaaaccttgataattgtcatttaattatatttcaggtgtcctgaacaggtcactagactctacattgggcagcctttaaatatgattctttgtaatgctaaatagcctttttttctctttttactgcaacttaatatttctatttagaacacagaaaatgaaaatatttagaataagttgtacatttgatgacaaataaatcactattaaa

SEQ ID NO: 356493 - DNA, 913 bp, Homo sapiens
gtagagctcagtatgtactgtaattttttacttttgtgctaggcagaacaagatgtaaaatcctttgcattctggatcagcttgggattttagaaaatccaatacaataatatttgttacccttacaacaacttcttctcatggcagggaaattctttctctctctacctaccataaatgatgctttttaatttctcttagagctaggaaatctcatgattttagggtgacagaaatatctaaattaatctcttttatttggtgggtttttcttttttttttctttttcttttttctttttttttgtttttactgtagaaaatccagcataactgactgacaaaatgttttaaagccaaacaagtccattttgtgttttagatttcagccttccaagttctgatgtaacaaacaacttaaaacccagtcttcatccacagatgaacttgctagccttggagaatacagagatacccccgtttgcccaaaggaccagccaaaacctcacctcaagccacgcatatgataattttctggaacattcaaattcagtgtttctacagccagttagtctacaaaccattgcagcagcaccatcaaaccagagtctgccacctttgcccagcaatcatccagcgatgacaaaaagtgatctccagccacctaattactacgaggtaatggagtttgatcccttagctcctgctgtcactacagagtatattttccagctacagacatatgtaagacgcatataaagaattgaatgggcctggcatggtggcttatgcctctaatcccaacattttgagaggctgaagtggaaggatcacttgaacctgggaggtcgaagctgcaatgggccatgattgcacccctgcactccagcctgggtgacagtgaccctgtctca

SEQ ID NO: 356494 - DNA, 802 bp, Homo sapiens
tgtttatataactgtgttcgtttttgttgttccgtcccgtcgtccttgtagactctcatcctcgtgtgttttggaccctccaggggtgacatcgggtcttgtgttcagctctcctggactgttattccttgtccgcgtgttcgtgttagacattgtccacgatctgtatcatgcctatgtctcactttggtctcttatttcagcgtgaacactatagttccaagtttgttccgaaattagcaggctggtcaccggtccggaaattcccgggacattttcgcggtacaaatactcacttaaaacttcagcagaagaaaaattacttagtccttaggccaaccaatttaactgcagtgtcatgtttcacaggccttcctacatttagaaatcgtcacacagctgtgataagagtagattattttactatgaaataattctgaatagatgaaagcataaaatgtgagaaactgaatgtattattcaggaagaatactgagtgccttcatttaactaaagttgaatgtaaaagtcaatttgcacttctttataatcctctggtttagaattataaattgttaaaaccttgataattgtcatttaattatatttcaggtgtcctgaacaggtcactagactctacattgggcagcctttaaatatgattctttgtaatgctaaatagcctttttttctctttttactgcaacttaatatttctatttagaacacagaaaatgaaaatatttagaattacgcgacttgtgcatatcctcgcgtcgttgctgttgtgtgtgctctgggc

SEQ ID NO: 356495 - DNA, 571 bp, Homo sapiens
gtagagctcagtatgtactgtaattttttacttttgtgctaggcagaacaagatgtaaaatcctttgcattctggatcagcttgggattttagaaaatccaatacaataatatttgttacccttacaacaacttcttctcatggcagggaaattctttctctctctacctaccataaatgatgctttttaatttctcttagagctaggaaatctcatgattttagggtgacagaaatatctaaattaatctcttttatttggtgggtttttcttttttttttctttttcttttttctttttttttgtttttactgtagaaaatccagcataactgactgacaaaatgttttaaagccaaacaagtccattttgtgttttagatttcagccttccaagttctgatgtaacaaacaacttaaaacccagtcttcatccacagatgaacttgctagccttggagaatacagagatacccccgtttgcccaaaggaccagccaaaacctcacctcaagccacgcatatgataatgtaagtaacaaaactcttttctagcagtgcatctagtcagc

SEQ ID NO: 356496 - DNA, 4910 bp, Homo sapiens
agagcccgggaagcgctcgggcgaagaggaggagccaagggtaccgagcgggtggagtcgggagccggagagcggtggaggcggatttcctgggcccggccctctggcgctaccatggcgtttggcaagagtcaccgggatccctacgcgacctccgtgggccacctcatagaaaaggctacatttgctggagttcagactgaagattggggccagttcatgcacatctgtgacataattaacactacccaggatgggccaaaagatgcagtgaaagctttgaagaaaaggatttccaaaaactacaatcataaagaaatccaacttaccttgtcacttattgacatgtgtgtgcagaactgtggtccaagtttccagtctctgattgtgaagaaggaatttgttaaagagaatttagttaagctactgaatcccagatacaacttgccattagacattcagaatagaatcttgaatttcattaagacttggtcacagggcttcccaggaggtgtggatgtaagcgaagtcaaagaagtatacctcgacctggttaagaaaggcgttcagtttcctccctcagaagcagaggctgaaacagcaagacaagagactgctcaaatctcatcaaatcctccaacatctgtccctactgcaccagctctttcttctgtaattgctccaaagaactcgactgttacattggtcccagaacagattggaaaactgcacagtgaattggatatggtgaaaatgaatgtgcgagtgatgtccgccatattgatggagaatactcctgggtctgaaaaccatgaagacatagagcttctgcagaaactctataaaacaggtcgggagatgcaggagaggatcatggacctgcttgtggtggtggagaacgaagatgtaactgttgagctaattcaggtgaatgaggatttgaataatgctatccttggatatgagaggtttactagaaaccaacaaaggattttggagcaaaataagaaccagaaggaagccaccaatactaccagtgagccttctgccccatctcaagatctcctcgacctaagtcccagtccccggatgcctagggccactctgggagaactcaacaccatgaataatcaactttcaggcttaagtaaataaacactcaggtcttttcagaccagcagaagagcttgatgttaaacagttctccttaattacgtgattaaataccacctaagaaggactgaagtcaggttgaatgtcagagcgctatgttaggagatgtgattacttcccggcaaatggttgagtcaaacccagtatagcaatgggatgtgtctgggcgaggaggtccttgaaactcatcctactcacttagaatctcatggaattcacctggcctgctttgtagaagttgttcagcccaatggccaatacttaaagtctactgtgaacctacacactattatcattgggtttttctgctatacctcagcatcaggtaagggagtatctctgatgcaagcggagaaattcagggattacaaggtatgaactgagtggttgtgaaatgtagaaggaaaaacacaggctttaaagtcagagaagtccaagttgaaatgccagttctgccacctctcagccacctaacttttgagagtctcactttataaaatgggaacaatgattgccttaaagggtggttgtcaaggttaacaaactaatgtttataaaatgcattgtagcaaagcttacaatgcattttataaacatttataaaagagttacctatcttacctgttatcttctgctgtccttattcccagcaagggtttggcaaattacaaaataaggatgatgaaaaatgctgaaatccagttttgtcaaattaaaagcagtttgtttttctcatatgtcatctgctgtttccggagtaaaaatattcagtatcactgaatttgtggttttcttagaactctactcagttctaaaatgttggctacttgtttatgtaggccagtgggatgtgtagagtcagttacattggagagttttcctgagtttttaattgagaattttcagagggggagggaattattccctttggggtatctcacttaagattatggcctggaggccaggcatagtggctcacacctataatcccagcactttgggaggccgagtcaggtggatcacctgaggtcaggagttcgagaccagcctggccaacatggcaaagccctgtctctactaaaaatacaaaaattagccgggagtggtggtgggcgcctataatcccagctactcaggaggctgaggcagaagaatcacttgaactcaggaggtggaggttgtggtgagccgagatcgtgccactgcactccagtctgggtgacaaagtgagactccatctcaaaaaaaaagaaaaaatgaagtgcaacattagaatttaaataaactagaatacacacttcagggcagagacttatttttactcatatgtagcctgaactccaaaaccagctcaatttttaattacagtgctggcagttaaaaaccaaaatagcactttgaaattgatacataacccttttgctgtgatggctttgtttcagagctatttatgaagaaattgatgctcaccagcacaaaggagctcaaaatgatggtgactgagaagaaagtggatgatcagctcactaccacatcaaaggtgccaactctctaaaacgtagactctgtgcagctttgaagcctggaagacaatacctaccaacatgtcaaagccatggtggcacatttctgctataatgaagattaaatagaataacagttccaggataacactgattcctgacaacagcgtgagatttcaacagaacttgtttggaacaaatactcacttaaaacttcagcagaagaaaaattacttagtccttaggccaaccaatttaactgcagtgtcatgtttcacaggccttcctacatttagaaatcgtcacacagctgtgataagagtagattattttactatgaaataattctgaatagatgaaagcataaaatgtgagaaactgaatgtattattcaggaagaatactgagtgccttcatttaactaaagttgaatgtaaaagtcaatttgcacttctttataatcctctggtttagaattataaattgttaaaaccttgataattgtcatttaattatatttcaggtgtcctgaacaggtcactagactctacattgggcagcctttaaatatgattctttgtaatgctaaatagcctttttttctctttttactgcaacttaatatttctatttagaacacagaaaatgaaaatatttagaataagttgtacatttgatgacaaataaatcactattaaaataatttaatactttttttttttaacaaaggtttgtttccagaagaacttttgatgtcagtaaatcttcacaatcccacctgtacattttaacattcatggacttgtaatggtgatgctttggctaacagcctagtagatgtattttatttcaattttatgatactacagtttcaaagtaattattcagaactctgaatataaaatagccctaaaccttaaaggacaaatcaaatttgaaataagaatttaaatctttggacaagctgttagggcttagtgactcctcttctactttgagcttttaaaatactgactattcataatgaaggaaaatagcaaccaactcttttagacacaataaacatggttagaagttctggcctatgacttgaaacaaataaccctgagcatacatttttgaaaaacattgtcagattcattgctgtaagtatgaagagttaataatctggaagggaattatggaattaagctgaacccatgcctgcatatttaaaaaacaaagcggcttattttaatagtatcaaactcttcagtatggtattgaatagtcagtcatatattctagctaggcatatgagtttcttatgataaaagctgaacttgttctctcaagtttaagtgaaaaaaattagttgagaaaaaataattatttaaaatataagccttcatattattgtacaatatttctcctttgagaagataggatatatgattttcccaaaaatcacaactttgaaggaagacttagttgctgacttcaattatatcctggaactggcaacttgtgcccttcctttgcttcaaaaaaagtgtaagaaagagtgataagatcaactttaatcattcttggatcttcagcaaattcaggatcaatgtagaaaaacactggcatatctacttcctcttggggattaagcctttgttcttcaaaacagaagcactggaaattatagaaagattttaataacatttctattctcgtattacataacagaaactatacagttcttttatcttagcattccagtacacttcgtgattttaataagcatactattaaatacacagttctgtgataaattaagagcatcttttcatctcaatgagttctgctttaaggatgaagaacaaattctaatcttaaaagcagatatccatttggtttggttctcaatctctgcatagcaggtatagatagtgaagaaaaatagcttgatgtttagaagaaattcgttttcagaaatcacaagatctactaaaacactaagtttcatactaaaccgtttcatgtatctttatcatattctgtaaagtttacactttgatgtacctgtattttattgaaatactgtccagcttcaaatggaacaatattgtatgtagaaattccaattactggtttgtcagtaggattcttagctctgtaaaacgccagtgcagtctctcctggcaccacctgttttaaagaatatatatattatcaatactttga

SEQ ID NO: 356497 - DNA, 3615 bp, Homo sapiens
agagcccgggaagcgctcgggcgaagaggaggagccaagggtaccgagcgggtggagtcgggagccggagagcggtggaggcggatttcctgggcccggccctctggcgctaccatggcgtttggcaagagtcaccgggatccctacgcgacctccgtgggccacctcatagcttattgacatgtgtgtgcagaactgtggtccaagtttccagtctctgattgtgaagaaggaatttgttaaagagaatttagttaagctactgaatcccagatacaacttgccattagacattcagaatagaatcttgaatttcattaagacttggtcacagggcttcccaggaggtgtggatgtaagcgaagtcaaagaagtatacctcgacctggttaagaaaggcgttcagtttcctccctcagaagcagaggctgaaacagcaagacaagagactgctcaaatctcatcaaatcctccaacatctgtccctactgcaccagctctttcttctgtaattgctccaaagaactcgactgttacattggtcccagaacagattggaaaactgcacagtgaattggatatggtgaaaatgaatgtgcgagtgatgtccgccatattgatggagaatactcctgggtctgaaaaccatgaagacatagagcttctgcagaaactctataaaacaggtcgggagatgcaggagaggatcatggacctgcttgtggtggtggagaacgaagatgtaactgttgagctaattcaggtgaatgaggatttgaataatgctatccttggatatgagaggtttactagaaaccaacaaaggattttggagcaaaataagaaccagaaggaagccaccaatactaccagtgagccttctgccccatctcaagatctcctcgacctaagtcccagtccccggatgcctagggccactctgggagaactcaacaccatgaataatcaactttcaggcttaaatttcagccttccaagttctgatgtaacaaacaacttaaaacccagtcttcatccacagatgaacttgctagccttggagaatacagagatacccccgtttgcccaaaggaccagccaaaacctcacctcaagccacgcatatgataattttctggaacattcaaattcagtgtttctacagccagttagtctacaaaccattgcagcagcaccatcaaaccagagtctgccacctttgcccagcaatcatccagcgatgacaaaaagtgatctccagccacctaattactacgaggtaatggagtttgatcccttagctcctgctgtcactacagaagctatttatgaagaaattgatgctcaccagcacaaaggagctcaaaatgatggtgactgagaagaaagtggatgatcagctcactaccacatcaaaggtgccaactctctaaaacgtagactctgtgcagctttgaagcctggaagacaatacctaccaacatgtcaaagccatggtggcacatttctgctataatgaagattaaatagaataacagttccaggataacactgattcctgacaacagcgtgagatttcaacagaacttgtttggaacaaatactcacttaaaacttcagcagaagaaaaattacttagtccttaggccaaccaatttaactgcagtgtcatgtttcacaggccttcctacatttagaaatcgtcacacagctgtgataagagtagattattttactatgaaataattctgaatagatgaaagcataaaatgtgagaaactgaatgtattattcaggaagaatactgagtgccttcatttaactaaagttgaatgtaaaagtcaatttgcacttctttataatcctctggtttagaattataaattgttaaaaccttgataattgtcatttaattatatttcaggtgtcctgaacaggtcactagactctacattgggcagcctttaaatatgattctttgtaatgctaaatagcctttttttctctttttactgcaacttaatatttctatttagaacacagaaaatgaaaatatttagaataagttgtacatttgatgacaaataaatcactattaaaataatttaatactttttttttttaacaaaggtttgtttccagaagaacttttgatgtcagtaaatcttcacaatcccacctgtacattttaacattcatggacttgtaatggtgatgctttggctaacagcctagtagatgtattttatttcaattttatgatactacagtttcaaagtaattattcagaactctgaatataaaatagccctaaaccttaaaggacaaatcaaatttgaaataagaatttaaatctttggacaagctgttagggcttagtgactcctcttctactttgagcttttaaaatactgactattcataatgaaggaaaatagcaaccaactcttttagacacaataaacatggttagaagttctggcctatgacttgaaacaaataaccctgagcatacatttttgaaaaacattgtcagattcattgctgtaagtatgaagagttaataatctggaagggaattatggaattaagctgaacccatgcctgcatatttaaaaaacaaagcggcttattttaatagtatcaaactcttcagtatggtattgaatagtcagtcatatattctagctaggcatatgagtttcttatgataaaagctgaacttgttctctcaagtttaagtgaaaaaaattagttgagaaaaaataattatttaaaatataagccttcatattattgtacaatatttctcctttgagaagataggatatatgattttcccaaaaatcacaactttgaaggaagacttagttgctgacttcaattatatcctggaactggcaacttgtgcccttcctttgcttcaaaaaaagtgtaagaaagagtgataagatcaactttaatcattcttggatcttcagcaaattcaggatcaatgtagaaaaacactggcatatctacttcctcttggggattaagcctttgttcttcaaaacagaagcactggaaattatagaaagattttaataacatttctattctcgtattacataacagaaactatacagttcttttatcttagcattccagtacacttcgtgattttaataagcatactattaaatacacagttctgtgataaattaagagcatcttttcatctcaatgagttctgctttaaggatgaagaacaaattctaatcttaaaagcagatatccatttggtttggttctcaatctctgcatagcaggtatagatagtgaagaaaaatagcttgatgtttagaagaaattcgttttcagaaatcacaagatctactaaaacactaagtttcatactaaaccgtttcatgtatctttatcatattctgtaaagtttacactttgatgtacctgtattttattgaaatactgtccagcttcaaatggaacaatattgtatgtagaaattccaattactggtttgtcagtaggattcttagctctgtaaaacgccagtgcagtctctcctggcaccacctgttttaaagaatatatatattatcaatactttga

SEQ ID NO: 356498 - DNA, 3655 bp, Homo sapiens
aaaaatgtaccttcctttcgatgccgcctggggagtggaaccaaacagaaaaggctacatttgctggagttcagactgaagattggggccagttcatgcacatctgtgacataattaacactacccaggatgggccaaaagatgcagtgaaagctttgaagaaaaggatttccaaaaactacaatcataaagaaatccaacttaccttgtcacttattgacatgtgtgtgcagaactgtggtccaagtttccagtctctgattgtgaagaaggaatttgttaaagagaatttagttaagctactgaatcccagatacaacttgccattagacattcagaatagaatcttgaatttcattaagacttggtcacagggcttcccaggaggtgtggatgtaagcgaagtcaaagaagtatacctcgacctggttaagaaaggcgttcagtttcctccctcagaagcagaggctgaaacagcaagacaagagactgctcaaatctcatcaaatcctccaacatctgtccctactgcaccagctctttcttctgtaattgctccaaagaactcgactgttacattggtcccagaacagattggaaaactgcacagtgaattggatatggtgaaaatgaatgtgcgagtgatgtccgccatattgatggagaatactcctgggtctgaaaaccatgaagacatagagcttctgcagaaactctataaaacaggtcgggagatgcaggagaggatcatggacctgcttgtggtggtggagaacgaagatgtaactgttgagctaattcaggtgaatgaggatttgaataatgctatccttggatatgagaggtttactagaaaccaacaaaggattttggagcaaaataagaaccagaaggaagccaccaatactaccagtgagccttctgccccatctcaagatctcctcgacctaagtcccagtccccggatgcctagggccactctgggagaactcaacaccatgaataatcaactttcaggcttaaatttcagccttccaagttctgatgtaacaaacaacttaaaacccagtcttcatccacagatgaacttgctagccttggagaatacagagatacccccgtttgcccaaaggaccagccaaaacctcacctcaagccacgcatatgataattttctggaacattcaaattcagtgtttctacagccagttagtctacaaaccattgcagcagcaccatcaaaccagagtctgccacctttgcccagcaatcatccagcgatgacaaaaagtgatctccagccacctaattactacgaggtaatggagtttgatcccttagctcctgctgtcactacagaagctatttatgaagaaattgatgctcaccagcacaaaggagctcaaaatgatggtgactgagaagaaagtggatgatcagctcactaccacatcaaaggtgccaactctctaaaacgtagactctgtgcagctttgaagcctggaagacaatacctaccaacatgtcaaagccatggtggcacatttctgctataatgaagattaaatagaataacagttccaggataacactgattcctgacaacagcgtgagatttcaacagaacttgtttggaacaaatactcacttaaaacttcagcagaagaaaaattacttagtccttaggccaaccaatttaactgcagtgtcatgtttcacaggccttcctacatttagaaatcgtcacacagctgtgataagagtagattattttactatgaaataattctgaatagatgaaagcataaaatgtgagaaactgaatgtattattcaggaagaatactgagtgccttcatttaactaaagttgaatgtaaaagtcaatttgcacttctttataatcctctggtttagaattataaattgttaaaaccttgataattgtcatttaattatatttcaggtgtcctgaacaggtcactagactctacattgggcagcctttaaatatgattctttgtaatgctaaatagcctttttttctctttttactgcaacttaatatttctatttagaacacagaaaatgaaaatatttagaataagttgtacatttgatgacaaataaatcactattaaaataatttaatactttttttttttaacaaaggtttgtttccagaagaacttttgatgtcagtaaatcttcacaatcccacctgtacattttaacattcatggacttgtaatggtgatgctttggctaacagcctagtagatgtattttatttcaattttatgatactacagtttcaaagtaattattcagaactctgaatataaaatagccctaaaccttaaaggacaaatcaaatttgaaataagaatttaaatctttggacaagctgttagggcttagtgactcctcttctactttgagcttttaaaatactgactattcataatgaaggaaaatagcaaccaactcttttagacacaataaacatggttagaagttctggcctatgacttgaaacaaataaccctgagcatacatttttgaaaaacattgtcagattcattgctgtaagtatgaagagttaataatctggaagggaattatggaattaagctgaacccatgcctgcatatttaaaaaacaaagcggcttattttaatagtatcaaactcttcagtatggtattgaatagtcagtcatatattctagctaggcatatgagtttcttatgataaaagctgaacttgttctctcaagtttaagtgaaaaaaattagttgagaaaaaataattatttaaaatataagccttcatattattgtacaatatttctcctttgagaagataggatatatgattttcccaaaaatcacaactttgaaggaagacttagttgctgacttcaattatatcctggaactggcaacttgtgcccttcctttgcttcaaaaaaagtgtaagaaagagtgataagatcaactttaatcattcttggatcttcagcaaattcaggatcaatgtagaaaaacactggcatatctacttcctcttggggattaagcctttgttcttcaaaacagaagcactggaaattatagaaagattttaataacatttctattctcgtattacataacagaaactatacagttcttttatcttagcattccagtacacttcgtgattttaataagcatactattaaatacacagttctgtgataaattaagagcatcttttcatctcaatgagttctgctttaaggatgaagaacaaattctaatcttaaaagcagatatccatttggtttggttctcaatctctgcatagcaggtatagatagtgaagaaaaatagcttgatgtttagaagaaattcgttttcagaaatcacaagatctactaaaacactaagtttcatactaaaccgtttcatgtatctttatcatattctgtaaagtttacactttgatgtacctgtattttattgaaatactgtccagcttcaaatggaacaatattgtatgtagaaattccaattactggtttgtcagtaggattcttagctctgtaaaacgccagtgcagtctctcctggcaccacctgttttaaagaatatatatattatcaatactttga

SEQ ID NO: 356499 - DNA, 3728 bp, Homo sapiens
agagcccgggaagcgctcgggcgaagaggaggagccaagggtaccgagcgggtggagtcgggagccggagagcggtggaggcggatttcctgggcccggccctctggcgctaccatggcgtttggcaagagtcaccgggatccctacgcgacctccgtgggccacctcatagaaaaggctacatttgctggagttcagactgaagattggggccagttcatgcacatctgtgacataattaacactacccaggatgggccaaaagatgcagtgaaagctttgaagcttattgacatgtgtgtgcagaactgtggtccaagtttccagtctctgattgtgaagaaggaatttgttaaagagaatttagttaagctactgaatcccagatacaacttgccattagacattcagaatagaatcttgaatttcattaagacttggtcacagggcttcccaggaggtgtggatgtaagcgaagtcaaagaagtatacctcgacctggttaagaaaggcgttcagtttcctccctcagaagcagaggctgaaacagcaagacaagagactgctcaaatctcatcaaatcctccaacatctgtccctactgcaccagctctttcttctgtaattgctccaaagaactcgactgttacattggtcccagaacagattggaaaactgcacagtgaattggatatggtgaaaatgaatgtgcgagtgatgtccgccatattgatggagaatactcctgggtctgaaaaccatgaagacatagagcttctgcagaaactctataaaacaggtcgggagatgcaggagaggatcatggacctgcttgtggtggtggagaacgaagatgtaactgttgagctaattcaggtgaatgaggatttgaataatgctatccttggatatgagaggtttactagaaaccaacaaaggattttggagcaaaataagaaccagaaggaagccaccaatactaccagtgagccttctgccccatctcaagatctcctcgacctaagtcccagtccccggatgcctagggccactctgggagaactcaacaccatgaataatcaactttcaggcttaaatttcagccttccaagttctgatgtaacaaacaacttaaaacccagtcttcatccacagatgaacttgctagccttggagaatacagagatacccccgtttgcccaaaggaccagccaaaacctcacctcaagccacgcatatgataattttctggaacattcaaattcagtgtttctacagccagttagtctacaaaccattgcagcagcaccatcaaaccagagtctgccacctttgcccagcaatcatccagcgatgacaaaaagtgatctccagccacctaattactacgaggtaatggagtttgatcccttagctcctgctgtcactacagaagctatttatgaagaaattgatgctcaccagcacaaaggagctcaaaatgatggtgactgagaagaaagtggatgatcagctcactaccacatcaaaggtgccaactctctaaaacgtagactctgtgcagctttgaagcctggaagacaatacctaccaacatgtcaaagccatggtggcacatttctgctataatgaagattaaatagaataacagttccaggataacactgattcctgacaacagcgtgagatttcaacagaacttgtttggaacaaatactcacttaaaacttcagcagaagaaaaattacttagtccttaggccaaccaatttaactgcagtgtcatgtttcacaggccttcctacatttagaaatcgtcacacagctgtgataagagtagattattttactatgaaataattctgaatagatgaaagcataaaatgtgagaaactgaatgtattattcaggaagaatactgagtgccttcatttaactaaagttgaatgtaaaagtcaatttgcacttctttataatcctctggtttagaattataaattgttaaaaccttgataattgtcatttaattatatttcaggtgtcctgaacaggtcactagactctacattgggcagcctttaaatatgattctttgtaatgctaaatagcctttttttctctttttactgcaacttaatatttctatttagaacacagaaaatgaaaatatttagaataagttgtacatttgatgacaaataaatcactattaaaataatttaatactttttttttttaacaaaggtttgtttccagaagaacttttgatgtcagtaaatcttcacaatcccacctgtacattttaacattcatggacttgtaatggtgatgctttggctaacagcctagtagatgtattttatttcaattttatgatactacagtttcaaagtaattattcagaactctgaatataaaatagccctaaaccttaaaggacaaatcaaatttgaaataagaatttaaatctttggacaagctgttagggcttagtgactcctcttctactttgagcttttaaaatactgactattcataatgaaggaaaatagcaaccaactcttttagacacaataaacatggttagaagttctggcctatgacttgaaacaaataaccctgagcatacatttttgaaaaacattgtcagattcattgctgtaagtatgaagagttaataatctggaagggaattatggaattaagctgaacccatgcctgcatatttaaaaaacaaagcggcttattttaatagtatcaaactcttcagtatggtattgaatagtcagtcatatattctagctaggcatatgagtttcttatgataaaagctgaacttgttctctcaagtttaagtgaaaaaaattagttgagaaaaaataattatttaaaatataagccttcatattattgtacaatatttctcctttgagaagataggatatatgattttcccaaaaatcacaactttgaaggaagacttagttgctgacttcaattatatcctggaactggcaacttgtgcccttcctttgcttcaaaaaaagtgtaagaaagagtgataagatcaactttaatcattcttggatcttcagcaaattcaggatcaatgtagaaaaacactggcatatctacttcctcttggggattaagcctttgttcttcaaaacagaagcactggaaattatagaaagattttaataacatttctattctcgtattacataacagaaactatacagttcttttatcttagcattccagtacacttcgtgattttaataagcatactattaaatacacagttctgtgataaattaagagcatcttttcatctcaatgagttctgctttaaggatgaagaacaaattctaatcttaaaagcagatatccatttggtttggttctcaatctctgcatagcaggtatagatagtgaagaaaaatagcttgatgtttagaagaaattcgttttcagaaatcacaagatctactaaaacactaagtttcatactaaaccgtttcatgtatctttatcatattctgtaaagtttacactttgatgtacctgtattttattgaaatactgtccagcttcaaatggaacaatattgtatgtagaaattccaattactggtttgtcagtaggattcttagctctgtaaaacgccagtgcagtctctcctggcaccacctgttttaaagaatatatatattatcaatactttga

SEQ ID NO: 356500 - DNA, 3629 bp, Homo sapiens
agagcccgggaagcgctcgggcgaagaggaggagccaagggtaccgagcgggtggagtcgggagccggagagcggtggaggcggatttcctgggcccggccctctggcgctaccatggcgtttggcaagagtcaccgggatccctacgcgacctccgtgggccacctcatagaaaaggctacatttgctggagttcagactgaagattggggccagttcatgcacatctgtgacataattaacactacccaggatgggccaaaagatgcagtgaaagctttgaagaaaaggatttccaaaaactacaatcataaagaaatccaacttaccttgtcaacttggtcacagggcttcccaggaggtgtggatgtaagcgaagtcaaagaagtatacctcgacctggttaagaaaggcgttcagtttcctccctcagaagcagaggctgaaacagcaagacaagagactgctcaaatctcatcaaatcctccaacatctgtccctactgcaccagctctttcttctgtaattgctccaaagaactcgactgttacattggtcccagaacagattggaaaactgcacagtgaattggatatggtgaaaatgaatgtgcgagtgatgtccgccatattgatggagaatactcctgggtctgaaaaccatgaagacatagagcttctgcagaaactctataaaacaggtcgggagatgcaggagaggatcatggacctgcttgtggtggtggagaacgaagatgtaactgttgagctaattcaggtgaatgaggatttgaataatgctatccttggatatgagaggtttactagaaaccaacaaaggattttggagcaaaataagaaccagaaggaagccaccaatactaccagtgagccttctgccccatctcaagatctcctcgacctaagtcccagtccccggatgcctagggccactctgggagaactcaacaccatgaataatcaactttcaggcttaaatttcagccttccaagttctgatgtaacaaacaacttaaaacccagtcttcatccacagatgaacttgctagccttggagaatacagagatacccccgtttgcccaaaggaccagccaaaacctcacctcaagccacgcatatgataattttctggaacattcaaattcagtgtttctacagccagttagtctacaaaccattgcagcagcaccatcaaaccagagtctgccacctttgcccagcaatcatccagcgatgacaaaaagtgatctccagccacctaattactacgaggtaatggagtttgatcccttagctcctgctgtcactacagaagctatttatgaagaaattgatgctcaccagcacaaaggagctcaaaatgatggtgactgagaagaaagtggatgatcagctcactaccacatcaaaggtgccaactctctaaaacgtagactctgtgcagctttgaagcctggaagacaatacctaccaacatgtcaaagccatggtggcacatttctgctataatgaagattaaatagaataacagttccaggataacactgattcctgacaacagcgtgagatttcaacagaacttgtttggaacaaatactcacttaaaacttcagcagaagaaaaattacttagtccttaggccaaccaatttaactgcagtgtcatgtttcacaggccttcctacatttagaaatcgtcacacagctgtgataagagtagattattttactatgaaataattctgaatagatgaaagcataaaatgtgagaaactgaatgtattattcaggaagaatactgagtgccttcatttaactaaagttgaatgtaaaagtcaatttgcacttctttataatcctctggtttagaattataaattgttaaaaccttgataattgtcatttaattatatttcaggtgtcctgaacaggtcactagactctacattgggcagcctttaaatatgattctttgtaatgctaaatagcctttttttctctttttactgcaacttaatatttctatttagaacacagaaaatgaaaatatttagaataagttgtacatttgatgacaaataaatcactattaaaataatttaatactttttttttttaacaaaggtttgtttccagaagaacttttgatgtcagtaaatcttcacaatcccacctgtacattttaacattcatggacttgtaatggtgatgctttggctaacagcctagtagatgtattttatttcaattttatgatactacagtttcaaagtaattattcagaactctgaatataaaatagccctaaaccttaaaggacaaatcaaatttgaaataagaatttaaatctttggacaagctgttagggcttagtgactcctcttctactttgagcttttaaaatactgactattcataatgaaggaaaatagcaaccaactcttttagacacaataaacatggttagaagttctggcctatgacttgaaacaaataaccctgagcatacatttttgaaaaacattgtcagattcattgctgtaagtatgaagagttaataatctggaagggaattatggaattaagctgaacccatgcctgcatatttaaaaaacaaagcggcttattttaatagtatcaaactcttcagtatggtattgaatagtcagtcatatattctagctaggcatatgagtttcttatgataaaagctgaacttgttctctcaagtttaagtgaaaaaaattagttgagaaaaaataattatttaaaatataagccttcatattattgtacaatatttctcctttgagaagataggatatatgattttcccaaaaatcacaactttgaaggaagacttagttgctgacttcaattatatcctggaactggcaacttgtgcccttcctttgcttcaaaaaaagtgtaagaaagagtgataagatcaactttaatcattcttggatcttcagcaaattcaggatcaatgtagaaaaacactggcatatctacttcctcttggggattaagcctttgttcttcaaaacagaagcactggaaattatagaaagattttaataacatttctattctcgtattacataacagaaactatacagttcttttatcttagcattccagtacacttcgtgattttaataagcatactattaaatacacagttctgtgataaattaagagcatcttttcatctcaatgagttctgctttaaggatgaagaacaaattctaatcttaaaagcagatatccatttggtttggttctcaatctctgcatagcaggtatagatagtgaagaaaaatagcttgatgtttagaagaaattcgttttcagaaatcacaagatctactaaaacactaagtttcatactaaaccgtttcatgtatctttatcatattctgtaaagtttacactttgatgtacctgtattttattgaaatactgtccagcttcaaatggaacaatattgtatgtagaaattccaattactggtttgtcagtaggattcttagctctgtaaaacgccagtgcagtctctcctggcaccacctgttttaaagaatatatatattatcaatactttga

SEQ ID NO: 356501 - DNA, 3674 bp, Homo sapiens
agagcccgggaagcgctcgggcgaagaggaggagccaagggtaccgagcgggtggagtcgggagccggagagcggtggaggcggatttcctgggcccggccctctggcgctaccatggcgtttggcaagagtcaccgggatccctacgcgacctccgtgggccacctcatagaaaaggctacatttgctggagttcagactgaagattggggccagttcatgcacatctgtgacataattaacactacccaggatgggccaaaagatgcagtgaaagctttgaagaaaaggatttccaaaaactacaatcataaagaaatccaacttaccttgtcacttattgacatgtgtgtgcagaactgtggtccaagtttccagtctctgattgtgaagaaggaatttgttaaagagaatttagttaagctactgaatcccagatacaacttgccattagacattcagaatagaatcttgaatttcattaagacttggtcacagggcttcccaggaggtgtggatgtaagcgaagtcaaagaagtatacctcgacctggttaagaaaggcgttcagtttcctccctcagaagcagaggctgaaacagcaagacaagagattggaaaactgcacagtgaattggatatggtgaaaatgaatgtgcgagtgatgtccgccatattgatggagaatactcctgggtctgaaaaccatgaagacatagagcttctgcagaaactctataaaacaggtcgggagatgcaggagaggatcatggacctgcttgtggtggtggagaacgaagatgtaactgttgagctaattcaggtgaatgaggatttgaataatgctatccttggatatgagaggtttactagaaaccaacaaaggattttggagcaaaataagaaccagaaggaagccaccaatactaccagtgagccttctgccccatctcaagatctcctcgacctaagtcccagtccccggatgcctagggccactctgggagaactcaacaccatgaataatcaactttcaggcttaaatttcagccttccaagttctgatgtaacaaacaacttaaaacccagtcttcatccacagatgaacttgctagccttggagaatacagagatacccccgtttgcccaaaggaccagccaaaacctcacctcaagccacgcatatgataattttctggaacattcaaattcagtgtttctacagccagttagtctacaaaccattgcagcagcaccatcaaaccagagtctgccacctttgcccagcaatcatccagcgatgacaaaaagtgatctccagccacctaattactacgaggtaatggagtttgatcccttagctcctgctgtcactacagaagctatttatgaagaaattgatgctcaccagcacaaaggagctcaaaatgatggtgactgagaagaaagtggatgatcagctcactaccacatcaaaggtgccaactctctaaaacgtagactctgtgcagctttgaagcctggaagacaatacctaccaacatgtcaaagccatggtggcacatttctgctataatgaagattaaatagaataacagttccaggataacactgattcctgacaacagcgtgagatttcaacagaacttgtttggaacaaatactcacttaaaacttcagcagaagaaaaattacttagtccttaggccaaccaatttaactgcagtgtcatgtttcacaggccttcctacatttagaaatcgtcacacagctgtgataagagtagattattttactatgaaataattctgaatagatgaaagcataaaatgtgagaaactgaatgtattattcaggaagaatactgagtgccttcatttaactaaagttgaatgtaaaagtcaatttgcacttctttataatcctctggtttagaattataaattgttaaaaccttgataattgtcatttaattatatttcaggtgtcctgaacaggtcactagactctacattgggcagcctttaaatatgattctttgtaatgctaaatagcctttttttctctttttactgcaacttaatatttctatttagaacacagaaaatgaaaatatttagaataagttgtacatttgatgacaaataaatcactattaaaataatttaatactttttttttttaacaaaggtttgtttccagaagaacttttgatgtcagtaaatcttcacaatcccacctgtacattttaacattcatggacttgtaatggtgatgctttggctaacagcctagtagatgtattttatttcaattttatgatactacagtttcaaagtaattattcagaactctgaatataaaatagccctaaaccttaaaggacaaatcaaatttgaaataagaatttaaatctttggacaagctgttagggcttagtgactcctcttctactttgagcttttaaaatactgactattcataatgaaggaaaatagcaaccaactcttttagacacaataaacatggttagaagttctggcctatgacttgaaacaaataaccctgagcatacatttttgaaaaacattgtcagattcattgctgtaagtatgaagagttaataatctggaagggaattatggaattaagctgaacccatgcctgcatatttaaaaaacaaagcggcttattttaatagtatcaaactcttcagtatggtattgaatagtcagtcatatattctagctaggcatatgagtttcttatgataaaagctgaacttgttctctcaagtttaagtgaaaaaaattagttgagaaaaaataattatttaaaatataagccttcatattattgtacaatatttctcctttgagaagataggatatatgattttcccaaaaatcacaactttgaaggaagacttagttgctgacttcaattatatcctggaactggcaacttgtgcccttcctttgcttcaaaaaaagtgtaagaaagagtgataagatcaactttaatcattcttggatcttcagcaaattcaggatcaatgtagaaaaacactggcatatctacttcctcttggggattaagcctttgttcttcaaaacagaagcactggaaattatagaaagattttaataacatttctattctcgtattacataacagaaactatacagttcttttatcttagcattccagtacacttcgtgattttaataagcatactattaaatacacagttctgtgataaattaagagcatcttttcatctcaatgagttctgctttaaggatgaagaacaaattctaatcttaaaagcagatatccatttggtttggttctcaatctctgcatagcaggtatagatagtgaagaaaaatagcttgatgtttagaagaaattcgttttcagaaatcacaagatctactaaaacactaagtttcatactaaaccgtttcatgtatctttatcatattctgtaaagtttacactttgatgtacctgtattttattgaaatactgtccagcttcaaatggaacaatattgtatgtagaaattccaattactggtttgtcagtaggattcttagctctgtaaaacgccagtgcagtctctcctggcaccacctgttttaaagaatatatatattatcaatactttga

SEQ ID NO: 356502 - DNA, 4470 bp, Homo sapiens
agagcccgggaagcgctcgggcgaagaggaggagccaagggtaccgagcgggtggagtcgggagccggagagcggtggaggcggatttcctgggcccggccctctggcgctaccatggcgtttggcaagagtcaccgggatccctacgcgacctccgtgggccacctcatagaaaaggctacatttgctggagttcagactgaagattggggccagttcatgcacatctgtgacataattaacactacccaggatgggccaaaagatgcagtgaaagctttgaagaaaaggatttccaaaaactacaatcataaagaaatccaacttaccttgtcacttattgacatgtgtgtgcagaactgtggtccaagtttccagtctctgattgtgaagaaggaatttgttaaagagaatttagttaagctactgaatcccagatacaacttgccattagacattcagaatagaatcttgaatttcattaagacttggtcacagggcttcccaggaggtgtggatgtaagcgaagtcaaagaagtatacctcgacctggttaagaaaggcgttcagtttcctccctcagaagcagaggctgaaacagcaagacaagagatctcaagatctcctcgacctaagtcccagtccccggatgcctagggccactctgggagaactcaacaccatgaataatcaactttcaggcttaagtaaataaacactcaggtcttttcagaccagcagaagagcttgatgttaaacagttctccttaattacgtgattaaataccacctaagaaggactgaagtcaggttgaatgtcagagcgctatgttaggagatgtgattacttcccggcaaatggttgagtcaaacccagtatagcaatgggatgtgtctgggcgaggaggtccttgaaactcatcctactcacttagaatctcatggaattcacctggcctgctttgtagaagttgttcagcccaatggccaatacttaaagtctactgtgaacctacacactattatcattgggtttttctgctatacctcagcatcaggtaagggagtatctctgatgcaagcggagaaattcagggattacaaggtatgaactgagtggttgtgaaatgtagaaggaaaaacacaggctttaaagtcagagaagtccaagttgaaatgccagttctgccacctctcagccacctaacttttgagagtctcactttataaaatgggaacaatgattgccttaaagggtggttgtcaaggttaacaaactaatgtttataaaatgcattgtagcaaagcttacaatgcattttataaacatttataaaagagttacctatcttacctgttatcttctgctgtccttattcccagcaagggtttggcaaattacaaaataaggatgatgaaaaatgctgaaatccagttttgtcaaattaaaagcagtttgtttttctcatatgtcatctgctgtttccggagtaaaaatattcagtatcactgaatttgtggttttcttagaactctactcagttctaaaatgttggctacttgtttatgtaggccagtgggatgtgtagagtcagttacattggagagttttcctgagtttttaattgagaattttcagagggggagggaattattccctttggggtatctcacttaagattatggcctggaggccaggcatagtggctcacacctataatcccagcactttgggaggccgagtcaggtggatcacctgaggtcaggagttcgagaccagcctggccaacatggcaaagccctgtctctactaaaaatacaaaaattagccgggagtggtggtgggcgcctataatcccagctactcaggaggctgaggcagaagaatcacttgaactcaggaggtggaggttgtggtgagccgagatcgtgccactgcactccagtctgggtgacaaagtgagactccatctcaaaaaaaaagaaaaaatgaagtgcaacattagaatttaaataaactagaatacacacttcagggcagagacttatttttactcatatgtagcctgaactccaaaaccagctcaatttttaattacagtgctggcagttaaaaaccaaaatagcactttgaaattgatacataacccttttgctgtgatggctttgtttcagagctatttatgaagaaattgatgctcaccagcacaaaggagctcaaaatgatggtgactgagaagaaagtggatgatcagctcactaccacatcaaaggtgccaactctctaaaacgtagactctgtgcagctttgaagcctggaagacaatacctaccaacatgtcaaagccatggtggcacatttctgctataatgaagattaaatagaataacagttccaggataacactgattcctgacaacagcgtgagatttcaacagaacttgtttggaacaaatactcacttaaaacttcagcagaagaaaaattacttagtccttaggccaaccaatttaactgcagtgtcatgtttcacaggccttcctacatttagaaatcgtcacacagctgtgataagagtagattattttactatgaaataattctgaatagatgaaagcataaaatgtgagaaactgaatgtattattcaggaagaatactgagtgccttcatttaactaaagttgaatgtaaaagtcaatttgcacttctttataatcctctggtttagaattataaattgttaaaaccttgataattgtcatttaattatatttcaggtgtcctgaacaggtcactagactctacattgggcagcctttaaatatgattctttgtaatgctaaatagcctttttttctctttttactgcaacttaatatttctatttagaacacagaaaatgaaaatatttagaataagttgtacatttgatgacaaataaatcactattaaaataatttaatactttttttttttaacaaaggtttgtttccagaagaacttttgatgtcagtaaatcttcacaatcccacctgtacattttaacattcatggacttgtaatggtgatgctttggctaacagcctagtagatgtattttatttcaattttatgatactacagtttcaaagtaattattcagaactctgaatataaaatagccctaaaccttaaaggacaaatcaaatttgaaataagaatttaaatctttggacaagctgttagggcttagtgactcctcttctactttgagcttttaaaatactgactattcataatgaaggaaaatagcaaccaactcttttagacacaataaacatggttagaagttctggcctatgacttgaaacaaataaccctgagcatacatttttgaaaaacattgtcagattcattgctgtaagtatgaagagttaataatctggaagggaattatggaattaagctgaacccatgcctgcatatttaaaaaacaaagcggcttattttaatagtatcaaactcttcagtatggtattgaatagtcagtcatatattctagctaggcatatgagtttcttatgataaaagctgaacttgttctctcaagtttaagtgaaaaaaattagttgagaaaaaataattatttaaaatataagccttcatattattgtacaatatttctcctttgagaagataggatatatgattttcccaaaaatcacaactttgaaggaagacttagttgctgacttcaattatatcctggaactggcaacttgtgcccttcctttgcttcaaaaaaagtgtaagaaagagtgataagatcaactttaatcattcttggatcttcagcaaattcaggatcaatgtagaaaaacactggcatatctacttcctcttggggattaagcctttgttcttcaaaacagaagcactggaaattatagaaagattttaataacatttctattctcgtattacataacagaaactatacagttcttttatcttagcattccagtacacttcgtgattttaataagcatactattaaatacacagttctgtgataaattaagagcatcttttcatctcaatgagttctgctttaaggatgaagaacaaattctaatcttaaaagcagatatccatttggtttggttctcaatctctgcatagcaggtatagatagtgaagaaaaatagcttgatgtttagaagaaattcgttttcagaaatcacaagatctactaaaacactaagtttcatactaaaccgtttcatgtatctttatcatattctgtaaagtttacactttgatgtacctgtattttattgaaatactgtccagcttcaaatggaacaatattgtatgtagaaattccaattactggtttgtcagtaggattcttagctctgtaaaacgccagtgcagtctctcctggcaccacctgttttaaagaatatatatattatcaatactttga

SEQ ID NO: 356503 - DNA, 3013 bp, Homo sapiens
gtagagctcagtatgtactgtaattttttacttttgtgctaggcagaacaagatgtaaaatcctttgcattctggatcagcttgggattttagaaaatccaatacaataatatttgttacccttacaacaacttcttctcatggcagggaaattctttctctctctacctaccataaatgatgctttttaatttctcttagagctaggaaatctcatgattttagggtgacagaaatatctaaattaatctcttttatttggtgggtttttcttttttttttctttttcttttttctttttttttgtttttactgtagaaaatccagcataactgactgacaaaatgttttaaagccaaacaagtccattttgtgttttagatttcagccttccaagttctgatgtaacaaacaacttaaaacccagtcttcatccacagatgaacttgctagccttggagaatacagagatacccccgtttgcccaaaggaccagccaaaacctcacctcaagccacgcatatgataattttctggaacattcaaattcagtgtttctacagccagttagtctacaaaccattgcagcagcaccatcaaaccagagtctgccacctttgcccagcaatcatccagcgatgacaaaaagtgatctccagccacctaattactacgaggtaatggagtttgatcccttagctcctgctgtcactacagaagctatttatgaagaaattgatgctcaccagcacaaaggagctcaaaatgatggtgactgagaagaaagtggatgatcagctcactaccacatcaaaggtgccaactctctaaaacgtagactctgtgcagctttgaagcctggaagacaatacctaccaacatgtcaaagccatggtggcacatttctgctataatgaagattaaatagaataacagttccaggataacactgattcctgacaacagcgtgagatttcaacagaacttgtttggaacaaatactcacttaaaacttcagcagaagaaaaattacttagtccttaggccaaccaatttaactgcagtgtcatgtttcacaggccttcctacatttagaaatcgtcacacagctgtgataagagtagattattttactatgaaataattctgaatagatgaaagcataaaatgtgagaaactgaatgtattattcaggaagaatactgagtgccttcatttaactaaagttgaatgtaaaagtcaatttgcacttctttataatcctctggtttagaattataaattgttaaaaccttgataattgtcatttaattatatttcaggtgtcctgaacaggtcactagactctacattgggcagcctttaaatatgattctttgtaatgctaaatagcctttttttctctttttactgcaacttaatatttctatttagaacacagaaaatgaaaatatttagaataagttgtacatttgatgacaaataaatcactattaaaataatttaatactttttttttttaacaaaggtttgtttccagaagaacttttgatgtcagtaaatcttcacaatcccacctgtacattttaacattcatggacttgtaatggtgatgctttggctaacagcctagtagatgtattttatttcaattttatgatactacagtttcaaagtaattattcagaactctgaatataaaatagccctaaaccttaaaggacaaatcaaatttgaaataagaatttaaatctttggacaagctgttagggcttagtgactcctcttctactttgagcttttaaaatactgactattcataatgaaggaaaatagcaaccaactcttttagacacaataaacatggttagaagttctggcctatgacttgaaacaaataaccctgagcatacatttttgaaaaacattgtcagattcattgctgtaagtatgaagagttaataatctggaagggaattatggaattaagctgaacccatgcctgcatatttaaaaaacaaagcggcttattttaatagtatcaaactcttcagtatggtattgaatagtcagtcatatattctagctaggcatatgagtttcttatgataaaagctgaacttgttctctcaagtttaagtgaaaaaaattagttgagaaaaaataattatttaaaatataagccttcatattattgtacaatatttctcctttgagaagataggatatatgattttcccaaaaatcacaactttgaaggaagacttagttgctgacttcaattatatcctggaactggcaacttgtgcccttcctttgcttcaaaaaaagtgtaagaaagagtgataagatcaactttaatcattcttggatcttcagcaaattcaggatcaatgtagaaaaacactggcatatctacttcctcttggggattaagcctttgttcttcaaaacagaagcactggaaattatagaaagattttaataacatttctattctcgtattacataacagaaactatacagttcttttatcttagcattccagtacacttcgtgattttaataagcatactattaaatacacagttctgtgataaattaagagcatcttttcatctcaatgagttctgctttaaggatgaagaacaaattctaatcttaaaagcagatatccatttggtttggttctcaatctctgcatagcaggtatagatagtgaagaaaaatagcttgatgtttagaagaaattcgttttcagaaatcacaagatctactaaaacactaagtttcatactaaaccgtttcatgtatctttatcatattctgtaaagtttacactttgatgtacctgtattttattgaaatactgtccagcttcaaatggaacaatattgtatgtagaaattccaattactggtttgtcagtaggattcttagctctgtaaaacgccagtgcagtctctcctggcaccacctgttttaaagaatatatatattatcaatactttga

SEQ ID NO: 356504 - DNA, 2835 bp, Homo sapiens
agagcccgggaagcgctcgggcgaagaggaggagccaagggtaccgagcgggtggagtcgggagccggagagcggtggaggcggatttcctgggcccggccctctggcgctaccatggcgtttggcaagagtcaccgggatccctacgcgacctccgtgggccacctcatagaaaaggctacatttgctggagttcagactgaagattggggccagttcatgcacatctgtgacataattaacactacccaggatgggccaaaagatgcagtgaaagctttgaagaaaaggatttccaaaaactacaatcataaagaaatccaacttaccttgtcacttattgacatgtgtgtgcagaactgtggtccaagtttccagtctctgattgtgaagaaggaatttgttaaagagaatttagttaagctactgaatcccagatacaacttgccattagacattcagaatagaatcttgaatttcattaagacttggtcacagggcttcccaggaggtgtggatgtaagcgaagtcaaagaagtatacctcgacctggttaagaaaggcgttcagtttcctccctcagaagcagaggctgaaacagcaagacaagagactgctcaaatctcatcaaatcctccaacatctgtccctactgcaccagctctttcttctgtaattgctccaaagaactcgactgttacattggtcccagaacagattggaaaactgcacagtgaattggatatggtgaaaatgaatgtgcgagtgatgtccgccatattgatggagaatactcctgggtctgaaaaccatgaagacatagagcttctgcagaaactctataaaacaggtcgggagatgcaggagaggatcatggacctgcttgtggtggtggagaacgaagatgtaactgttgagctaattcaggtgaatgaggatttgaataatgctatccttggatatgagaggtttactagaaaccaacaaaggattttggagcaaaataagaaccagaaggaagccaccaatactaccagtgagccttctgccccatctcaagatctcctcgacctaagtcccagtccccggatgcctagggccactctgggagaactcaacaccatgaataatcaactttcaggcttaagtaaataaacactcaggtcttttcagaccagcagaagagcttgatgttaaacagttctccttaattacgtgattaaataccacctaagaaggactgaagtcaggttgaatgtcagagcgctatgttaggagatgtgattacttcccggcaaatggttgagtcaaacccagtatagcaatgggatgtgtctgggcgaggaggtccttgaaactcatcctactcacttagaatctcatggaattcacctggcctgctttgtagaagttgttcagcccaatggccaatacttaaagtctactgtgaacctacacactattatcattgggtttttctgctatacctcagcatcaggtaagggagtatctctgatgcaagcggagaaattcagggattacaaggtatgaactgagtggttgtgaaatgtagaaggaaaaacacaggctttaaagtcagagaagtccaagttgaaatgccagttctgccacctctcagccacctaacttttgagagtctcactttataaaatgggaacaatgattgccttaaagggtggttgtcaaggttaacaaactaatgtttataaaatgcattgtagcaaagcttacaatgcattttataaacatttataaaagagttacctatcttacctgttatcttctgctgtccttattcccagcaagggtttggcaaattacaaaataaggatgatgaaaaatgctgaaatccagttttgtcaaattaaaagcagtttgtttttctcatatgtcatctgctgtttccggagtaaaaatattcagtatcactgaatttgtggttttcttagaactctactcagttctaaaatgttggctacttgtttatgtaggccagtgggatgtgtagagtcagttacattggagagttttcctgagtttttaattgagaattttcagagggggagggaattattccctttggggtatctcacttaagattatggcctggaggccaggcatagtggctcacacctataatcccagcactttgggaggccgagtcaggtggatcacctgaggtcaggagttcgagaccagcctggccaacatggcaaagccctgtctctactaaaaatacaaaaattagccgggagtggtggtgggcgcctataatcccagctactcaggaggctgaggcagaagaatcacttgaactcaggaggtggaggttgtggtgagccgagatcgtgccactgcactccagtctgggtgacaaagtgagactccatctcaaaaaaaaagaaaaaatgaagtgcaacattagaatttaaataaactagaatacacacttcagggcagagacttatttttactcatatgtagcctgaactccaaaaccagctcaatttttaattacagtgctggcagttaaaaaccaaaatagcactttgaaattgatacataacccttttgctgtgatggctttgtttcagagctatttatgaagaaattgatgctcaccagcacaaaggagctcaaaatgatggtgactgaggtaaagacttcaacttatacaacttaattccatattccatataatttcagtataattatcactttacatatttagtatttaaattttctaagggccatctgagtctgacactttgaaatatgagttcccctgaatcattcaaattgtgctgaaccatt

SEQ ID NO: 356505 - DNA, 573 bp, Homo sapiens
gagcccgggaagcgctcgggcgaagaggaggagccaagggtaccgagcgggtggagtcgggagccggagagcggtggaggcggatttcctgggcccggccctctggcgctaccatggcgtttggcaagagtcaccgggatccctacgcgacctccgtgggccacctcataggtaaggaggcgcggggagagacgcccaggcaggcaggggaccgtgggatcctttcctgcttgatccattctcggcctgcagaggacggagttagtccaacttgaaaaaattattcccctccccccgcaactttcccaaggcacccgcattccacccggccccctttcgtcgtttccttcttggccaactcactgtagaacctcagtcctcaaaaatgtaccttcctttcgatgccgcctggggagtggaaccaaacaggtgaaccgcgggagtcaggcatggagtgtttgggcctccacgaggagacaccagaaacttctcggtaggggaagttattcctaaaggcacattctccagggcacggtattgttatgcccgttttacagatcagaagaggaggct

SEQ ID NO: 356506 - DNA, 2231 bp, Homo sapiens
agagcccgggaagcgctcgggcgaagaggaggagccaagggtaccgagcgggtggagtcgggagccggagagcggtggaggcggatttcctgggcccggccctctggcgctaccatggcgtttggcaagagtcaccgggatccctacgcgacctccgtgggccacctcatagaaaaggctacatttgctggagttcagactgaagattggggccagttcatgcacatctgtgacataattaacactacccaggatgggccaaaagatgcagtgaaagctttgaagaaaaggatttccaaaaactacaatcataaagaaatccaacttaccttgtcacttattgacatgtgtgtgcagaactgtggtccaagtttccagtctctgattgtgaagaaggaatttgttaaagagaatttagttaagctactgaatcccagatacaacttgccattagacattcagaatagaatcttgaatttcattaagacttggtcacagggcttcccaggaggtgtggatgtaagcgaagtcaaagaagtatacctcgacctggttaagaaaggcgttcagtttcctccctcagaagcagaggctgaaacagcaagacaagagactgctcaaatctcatcaaatcctccaacatctgtccctactgcaccagctctttcttctgtaattgctccaaagaactcgactgttacattggtcccagaacagattggaaaactgcacagtgaattggatatggtgaaaatgaatgtgcgagtgatgtccgccatattgatggagaatactcctgggtctgaaaaccatgaagacatagagcttctgcagaaactctataaaacaggtcgggagatgcaggagaggatcatggacctgcttgtggtggtggagaacgaagatgtaactgttgagctaattcaggtgaatgaggatttgaataatgctatccttggatatgagaggtttactagaaaccaacaaaggattttggagcaaaataagaaccagaaggaagccaccaatactaccagtgagccttctgccccatctcaagatctcctcgacctaagtcccagtccccggatgcctagggccactctgggagaactcaacaccatgaataatcaactttcaggcttaaatttcagccttccaagttctgatgtaacaaacaacttaaaacccagtcttcatccacagatgaacttgctagccttggagaatacagagatacccccgtttgcccaaaggaccagccaaaacctcacctcaagccacgcatatgataatccagttagtctacaaaccattgcagcagcaccatcaaaccagagtctgccacctttgcccagcaatcatccagcgatgacaaaaagtgatctccagccacctaattactacgaggtaatggagtttgatcccttagctcctgctgtcactacagaagctatttatgaagaaattgatgctcaccagcacaaaggagctcaaaatgatggtgactgagaagaaagtggatgatcagctcactaccacatcaaaggtgccaactctctaaaacgtagactctgtgcagctttgaagcctggaagacaatacctaccaacatgtcaaagccatggtggcacatttctgctataatgaagattaaatagaataacagttccaggataacactgattcctgacaacagcgtgagatttcaacagaacttgtttggaacaaatactcacttaaaacttcagcagaagaaaaattacttagtccttaggccaaccaatttaactgcagtgtcatgtttcacaggccttcctacatttagaaatcgtcacacagctgtgataagagtagattattttactatgaaataattctgaatagatgaaagcataaaatgtgagaaactgaatgtattattcaggaagaatactgagtgccttcatttaactaaagttgaatgtaaaagtcaatttgcacttctttataatcctctggtttagaattataaattgttaaaaccttgataattgtcatttaattatatttcaggtgtcctgaacaggtcactagactctacattgggcagcctttaaatatgattctttgtaatgctaaatagcctttttttctctttttactgcaacttaatatttctatttagaacacagaaaatgaaaatatttagaataagttgtacatttgatgacaaataaatcactattaaa

SEQ ID NO: 356507 - DNA, 3779 bp, Homo sapiens
agagcccgggaagcgctcgggcgaagaggaggagccaagggtaccgagcgggtggagtcgggagccggagagcggtggaggcggatttcctgggcccggccctctggcgctaccatggcgtttggcaagagtcaccgggatccctacgcgacctccgtgggccacctcatagaaaaggctacatttgctggagttcagactgaagattggggccagttcatgcacatctgtgacataattaacactacccaggatgggccaaaagatgcagtgaaagctttgaagaaaaggatttccaaaaactacaatcataaagaaatccaacttaccttgtcacttattgacatgtgtgtgcagaactgtggtccaagtttccagtctctgattgtgaagaaggaatttgttaaagagaatttagttaagctactgaatcccagatacaacttgccattagacattcagaatagaatcttgaatttcattaagacttggtcacagggcttcccaggaggtgtggatgtaagcgaagtcaaagaagtatacctcgacctggttaagaaaggcgttcagtttcctccctcagaagcagaggctgaaacagcaagacaagagactgctcaaatctcatcaaatcctccaacatctgtccctactgcaccagctctttcttctgtaattgctccaaagaactcgactgttacattggtcccagaacagattggaaaactgcacagtgaattggatatggtgaaaatgaatgtgcgagtgatgtccgccatattgatggagaatactcctgggtctgaaaaccatgaagacatagagcttctgcagaaactctataaaacaggtcgggagatgcaggagaggatcatggacctgcttgtggtggtggagaacgaagatgtaactgttgagctaattcaggtgaatgaggatttgaataatgctatccttggatatgagaggtttactagaaaccaacaaaggattttggagcaaaataagaaccagaaggaagccaccaatactaccagtgagccttctgccccatctcaagatctcctcgacctaagtcccagtccccggatgcctagggccactctgggagaactcaacaccatgaataatcaactttcaggcttaaatttcagccttccaagttctgatgtaacaaacaacttaaaacccagtcttcatccacagatgaacttgctagccttggagaatacagagatacccccgtttgcccaaaggaccagccaaaacctcacctcaagccacgcatatgataattttctggaacattcaaattcagtgtttctacagccagttagtctacaaaccattgcagcagcaccatcaaaccagagtctgccacctttgcccagcaatcatccagcgatgacaaaaagtgatctccagccacctaattactacgaggtaatggagtttgatcccttagctcctgctgtcactacagaagctatttatgaagaaattgatgctcaccagcacaaaggagctcaaaatgatggtgactgagaagaaagtggatgatcagctcactaccacatcaaaggtgccaactctctaaaacgtagactctgtgcagctttgaagcctggaagacaatacctaccaacatgtcaaagccatggtggcacatttctgctataatgaagattaaatagaataacagttccaggataacactgattcctgacaacagcgtgagatttcaacagaacttgtttggaacaaatactcacttaaaacttcagcagaagaaaaattacttagtccttaggccaaccaatttaactgcagtgtcatgtttcacaggccttcctacatttagaaatcgtcacacagctgtgataagagtagattattttactatgaaataattctgaatagatgaaagcataaaatgtgagaaactgaatgtattattcaggaagaatactgagtgccttcatttaactaaagttgaatgtaaaagtcaatttgcacttctttataatcctctggtttagaattataaattgttaaaaccttgataattgtcatttaattatatttcaggtgtcctgaacaggtcactagactctacattgggcagcctttaaatatgattctttgtaatgctaaatagcctttttttctctttttactgcaacttaatatttctatttagaacacagaaaatgaaaatatttagaataagttgtacatttgatgacaaataaatcactattaaaataatttaatactttttttttttaacaaaggtttgtttccagaagaacttttgatgtcagtaaatcttcacaatcccacctgtacattttaacattcatggacttgtaatggtgatgctttggctaacagcctagtagatgtattttatttcaattttatgatactacagtttcaaagtaattattcagaactctgaatataaaatagccctaaaccttaaaggacaaatcaaatttgaaataagaatttaaatctttggacaagctgttagggcttagtgactcctcttctactttgagcttttaaaatactgactattcataatgaaggaaaatagcaaccaactcttttagacacaataaacatggttagaagttctggcctatgacttgaaacaaataaccctgagcatacatttttgaaaaacattgtcagattcattgctgtaagtatgaagagttaataatctggaagggaattatggaattaagctgaacccatgcctgcatatttaaaaaacaaagcggcttattttaatagtatcaaactcttcagtatggtattgaatagtcagtcatatattctagctaggcatatgagtttcttatgataaaagctgaacttgttctctcaagtttaagtgaaaaaaattagttgagaaaaaataattatttaaaatataagccttcatattattgtacaatatttctcctttgagaagataggatatatgattttcccaaaaatcacaactttgaaggaagacttagttgctgacttcaattatatcctggaactggcaacttgtgcccttcctttgcttcaaaaaaagtgtaagaaagagtgataagatcaactttaatcattcttggatcttcagcaaattcaggatcaatgtagaaaaacactggcatatctacttcctcttggggattaagcctttgttcttcaaaacagaagcactggaaattatagaaagattttaataacatttctattctcgtattacataacagaaactatacagttcttttatcttagcattccagtacacttcgtgattttaataagcatactattaaatacacagttctgtgataaattaagagcatcttttcatctcaatgagttctgctttaaggatgaagaacaaattctaatcttaaaagcagatatccatttggtttggttctcaatctctgcatagcaggtatagatagtgaagaaaaatagcttgatgtttagaagaaattcgttttcagaaatcacaagatctactaaaacactaagtttcatactaaaccgtttcatgtatctttatcatattctgtaaagtttacactttgatgtacctgtattttattgaaatactgtccagcttcaaatggaacaatattgtatgtagaaattccaattactggtttgtcagtaggattcttagctctgtaaaacgccagtgcagtctctcctggcaccacctgttttaaagaatatatatattatcaatactttga

SEQ ID NO: 356508 - DNA, 3352 bp, Homo sapiens
tcgtgaggatcttccaacttcgacggacgcttcagaatagaatcttgaatttcattaagacttggtcacagggcttcccaggaggtgtggatgtaagcgaagtcaaagaagtatacctcgacctggttaagaaaggcgttcagtttcctccctcagaagcagaggctgaaacagcaagacaagagactgctcaaatctcatcaaatcctccaacatctgtccctactgcaccagctctttcttctgtaattgctccaaagaactcgactgttacattggtcccagaacagattggaaaactgcacagtgaattggatatggtgaaaatgaatgtgcgagtgatgtccgccatattgatggagaatactcctgggtctgaaaaccatgaagacatagagcttctgcagaaactctataaaacaggtcgggagatgcaggagaggatcatggacctgcttgtggtggtggagaacgaagatgtaactgttgagctaattcaggtgaatgaggatttgaataatgctatccttggatatgagaggtttactagaaaccaacaaaggattttggagcaaaataagaaccagaaggaagccaccaatactaccagtgagccttctgccccatctcaagatctcctcgacctaagtcccagtccccggatgcctagggccactctgggagaactcaacaccatgaataatcaactttcaggcttaaatttcagccttccaagttctgatgtaacaaacaacttaaaacccagtcttcatccacagatgaacttgctagccttggagaatacagagatacccccgtttgcccaaaggaccagccaaaacctcacctcaagccacgcatatgataattttctggaacattcaaattcagtgtttctacagccagttagtctacaaaccattgcagcagcaccatcaaaccagagtctgccacctttgcccagcaatcatccagcgatgacaaaaagtgatctccagccacctaattactacgaggtaatggagtttgatcccttagctcctgctgtcactacagaagctatttatgaagaaattgatgctcaccagcacaaaggagctcaaaatgatggtgactgagaagaaagtggatgatcagctcactaccacatcaaaggtgccaactctctaaaacgtagactctgtgcagctttgaagcctggaagacaatacctaccaacatgtcaaagccatggtggcacatttctgctataatgaagattaaatagaataacagttccaggataacactgattcctgacaacagcgtgagatttcaacagaacttgtttggaacaaatactcacttaaaacttcagcagaagaaaaattacttagtccttaggccaaccaatttaactgcagtgtcatgtttcacaggccttcctacatttagaaatcgtcacacagctgtgataagagtagattattttactatgaaataattctgaatagatgaaagcataaaatgtgagaaactgaatgtattattcaggaagaatactgagtgccttcatttaactaaagttgaatgtaaaagtcaatttgcacttctttataatcctctggtttagaattataaattgttaaaaccttgataattgtcatttaattatatttcaggtgtcctgaacaggtcactagactctacattgggcagcctttaaatatgattctttgtaatgctaaatagcctttttttctctttttactgcaacttaatatttctatttagaacacagaaaatgaaaatatttagaataagttgtacatttgatgacaaataaatcactattaaaataatttaatactttttttttttaacaaaggtttgtttccagaagaacttttgatgtcagtaaatcttcacaatcccacctgtacattttaacattcatggacttgtaatggtgatgctttggctaacagcctagtagatgtattttatttcaattttatgatactacagtttcaaagtaattattcagaactctgaatataaaatagccctaaaccttaaaggacaaatcaaatttgaaataagaatttaaatctttggacaagctgttagggcttagtgactcctcttctactttgagcttttaaaatactgactattcataatgaaggaaaatagcaaccaactcttttagacacaataaacatggttagaagttctggcctatgacttgaaacaaataaccctgagcatacatttttgaaaaacattgtcagattcattgctgtaagtatgaagagttaataatctggaagggaattatggaattaagctgaacccatgcctgcatatttaaaaaacaaagcggcttattttaatagtatcaaactcttcagtatggtattgaatagtcagtcatatattctagctaggcatatgagtttcttatgataaaagctgaacttgttctctcaagtttaagtgaaaaaaattagttgagaaaaaataattatttaaaatataagccttcatattattgtacaatatttctcctttgagaagataggatatatgattttcccaaaaatcacaactttgaaggaagacttagttgctgacttcaattatatcctggaactggcaacttgtgcccttcctttgcttcaaaaaaagtgtaagaaagagtgataagatcaactttaatcattcttggatcttcagcaaattcaggatcaatgtagaaaaacactggcatatctacttcctcttggggattaagcctttgttcttcaaaacagaagcactggaaattatagaaagattttaataacatttctattctcgtattacataacagaaactatacagttcttttatcttagcattccagtacacttcgtgattttaataagcatactattaaatacacagttctgtgataaattaagagcatcttttcatctcaatgagttctgctttaaggatgaagaacaaattctaatcttaaaagcagatatccatttggtttggttctcaatctctgcatagcaggtatagatagtgaagaaaaatagcttgatgtttagaagaaattcgttttcagaaatcacaagatctactaaaacactaagtttcatactaaaccgtttcatgtatctttatcatattctgtaaagtttacactttgatgtacctgtattttattgaaatactgtccagcttcaaatggaacaatattgtatgtagaaattccaattactggtttgtcagtaggattcttagctctgtaaaacgccagtgcagtctctcctggcaccacctgttttaaagaatatatatattatcaatactttga

SEQ ID NO: 356509 - DNA, 4659 bp, Homo sapiens
agagcccgggaagcgctcgggcgaagaggaggagccaagggtaccgagcgggtggagtcgggagccggagagcggtggaggcggatttcctgggcccggccctctggcgctaccatggcgtttggcaagagtcaccgggatccctacgcgacctccgtgggccacctcatagaaaaggctacatttgctggagttcagactgaagattggggccagttcatgcacatctgtgacataattaacactacccaggatgggccaaaagatgcagtgaaagctttgaagaaaaggatttccaaaaactacaatcataaagaaatccaacttaccttgtcacttattgacatgtgtgtgcagaactgtggtccaagtttccagtctctgattgtgaagaaggaatttgttaaagagaatttagttaagctactgaatcccagatacaacttgccattagacattcagaatagaatcttgaatttcattaagacttggtcacagggcttcccaggaggtgtggatgtaagcgaagtcaaagaagtatacctcgacctggttaagaaaggcgttcagtttcctccctcagaagcagaggctgaaacagcaagacaagagactgctcaaatctcatcaaatcctccaacatctgtccctactgcaccagctctttcttctgtaattgctccaaagaactcgactgttacattggtcccagaacaggtttactagaaaccaacaaaggattttggagcaaaataagaaccagaaggaagccaccaatactaccagtgagccttctgccccatctcaagatctcctcgacctaagtcccagtccccggatgcctagggccactctgggagaactcaacaccatgaataatcaactttcaggcttaagtaaataaacactcaggtcttttcagaccagcagaagagcttgatgttaaacagttctccttaattacgtgattaaataccacctaagaaggactgaagtcaggttgaatgtcagagcgctatgttaggagatgtgattacttcccggcaaatggttgagtcaaacccagtatagcaatgggatgtgtctgggcgaggaggtccttgaaactcatcctactcacttagaatctcatggaattcacctggcctgctttgtagaagttgttcagcccaatggccaatacttaaagtctactgtgaacctacacactattatcattgggtttttctgctatacctcagcatcaggtaagggagtatctctgatgcaagcggagaaattcagggattacaaggtatgaactgagtggttgtgaaatgtagaaggaaaaacacaggctttaaagtcagagaagtccaagttgaaatgccagttctgccacctctcagccacctaacttttgagagtctcactttataaaatgggaacaatgattgccttaaagggtggttgtcaaggttaacaaactaatgtttataaaatgcattgtagcaaagcttacaatgcattttataaacatttataaaagagttacctatcttacctgttatcttctgctgtccttattcccagcaagggtttggcaaattacaaaataaggatgatgaaaaatgctgaaatccagttttgtcaaattaaaagcagtttgtttttctcatatgtcatctgctgtttccggagtaaaaatattcagtatcactgaatttgtggttttcttagaactctactcagttctaaaatgttggctacttgtttatgtaggccagtgggatgtgtagagtcagttacattggagagttttcctgagtttttaattgagaattttcagagggggagggaattattccctttggggtatctcacttaagattatggcctggaggccaggcatagtggctcacacctataatcccagcactttgggaggccgagtcaggtggatcacctgaggtcaggagttcgagaccagcctggccaacatggcaaagccctgtctctactaaaaatacaaaaattagccgggagtggtggtgggcgcctataatcccagctactcaggaggctgaggcagaagaatcacttgaactcaggaggtggaggttgtggtgagccgagatcgtgccactgcactccagtctgggtgacaaagtgagactccatctcaaaaaaaaagaaaaaatgaagtgcaacattagaatttaaataaactagaatacacacttcagggcagagacttatttttactcatatgtagcctgaactccaaaaccagctcaatttttaattacagtgctggcagttaaaaaccaaaatagcactttgaaattgatacataacccttttgctgtgatggctttgtttcagagctatttatgaagaaattgatgctcaccagcacaaaggagctcaaaatgatggtgactgagaagaaagtggatgatcagctcactaccacatcaaaggtgccaactctctaaaacgtagactctgtgcagctttgaagcctggaagacaatacctaccaacatgtcaaagccatggtggcacatttctgctataatgaagattaaatagaataacagttccaggataacactgattcctgacaacagcgtgagatttcaacagaacttgtttggaacaaatactcacttaaaacttcagcagaagaaaaattacttagtccttaggccaaccaatttaactgcagtgtcatgtttcacaggccttcctacatttagaaatcgtcacacagctgtgataagagtagattattttactatgaaataattctgaatagatgaaagcataaaatgtgagaaactgaatgtattattcaggaagaatactgagtgccttcatttaactaaagttgaatgtaaaagtcaatttgcacttctttataatcctctggtttagaattataaattgttaaaaccttgataattgtcatttaattatatttcaggtgtcctgaacaggtcactagactctacattgggcagcctttaaatatgattctttgtaatgctaaatagcctttttttctctttttactgcaacttaatatttctatttagaacacagaaaatgaaaatatttagaataagttgtacatttgatgacaaataaatcactattaaaataatttaatactttttttttttaacaaaggtttgtttccagaagaacttttgatgtcagtaaatcttcacaatcccacctgtacattttaacattcatggacttgtaatggtgatgctttggctaacagcctagtagatgtattttatttcaattttatgatactacagtttcaaagtaattattcagaactctgaatataaaatagccctaaaccttaaaggacaaatcaaatttgaaataagaatttaaatctttggacaagctgttagggcttagtgactcctcttctactttgagcttttaaaatactgactattcataatgaaggaaaatagcaaccaactcttttagacacaataaacatggttagaagttctggcctatgacttgaaacaaataaccctgagcatacatttttgaaaaacattgtcagattcattgctgtaagtatgaagagttaataatctggaagggaattatggaattaagctgaacccatgcctgcatatttaaaaaacaaagcggcttattttaatagtatcaaactcttcagtatggtattgaatagtcagtcatatattctagctaggcatatgagtttcttatgataaaagctgaacttgttctctcaagtttaagtgaaaaaaattagttgagaaaaaataattatttaaaatataagccttcatattattgtacaatatttctcctttgagaagataggatatatgattttcccaaaaatcacaactttgaaggaagacttagttgctgacttcaattatatcctggaactggcaacttgtgcccttcctttgcttcaaaaaaagtgtaagaaagagtgataagatcaactttaatcattcttggatcttcagcaaattcaggatcaatgtagaaaaacactggcatatctacttcctcttggggattaagcctttgttcttcaaaacagaagcactggaaattatagaaagattttaataacatttctattctcgtattacataacagaaactatacagttcttttatcttagcattccagtacacttcgtgattttaataagcatactattaaatacacagttctgtgataaattaagagcatcttttcatctcaatgagttctgctttaaggatgaagaacaaattctaatcttaaaagcagatatccatttggtttggttctcaatctctgcatagcaggtatagatagtgaagaaaaatagcttgatgtttagaagaaattcgttttcagaaatcacaagatctactaaaacactaagtttcatactaaaccgtttcatgtatctttatcatattctgtaaagtttacactttgatgtacctgtattttattgaaatactgtccagcttcaaatggaacaatattgtatgtagaaattccaattactggtttgtcagtaggattcttagctctgtaaaacgccagtgcagtctctcctggcaccacctgttttaaagaatatatatattatcaatactttga

SEQ ID NO: 356510 - DNA, 2538 bp, Homo sapiens
tgactcgagttcggtaccccagttacaacagctccagtacaacagctatgataattttctggaacattcaaattcagtgtttctacagccagttagtctacaaaccattgcagcagcaccatcaaaccagagtctgccacctttgcccagcaatcatccagcgatgacaaaaagtgatctccagccacctaattactacgaggtaatggagtttgatcccttagctcctgctgtcactacagaagctatttatgaagaaattgatgctcaccagcacaaaggagctcaaaatgatggtgactgagaagaaagtggatgatcagctcactaccacatcaaaggtgccaactctctaaaacgtagactctgtgcagctttgaagcctggaagacaatacctaccaacatgtcaaagccatggtggcacatttctgctataatgaagattaaatagaataacagttccaggataacactgattcctgacaacagcgtgagatttcaacagaacttgtttggaacaaatactcacttaaaacttcagcagaagaaaaattacttagtccttaggccaaccaatttaactgcagtgtcatgtttcacaggccttcctacatttagaaatcgtcacacagctgtgataagagtagattattttactatgaaataattctgaatagatgaaagcataaaatgtgagaaactgaatgtattattcaggaagaatactgagtgccttcatttaactaaagttgaatgtaaaagtcaatttgcacttctttataatcctctggtttagaattataaattgttaaaaccttgataattgtcatttaattatatttcaggtgtcctgaacaggtcactagactctacattgggcagcctttaaatatgattctttgtaatgctaaatagcctttttttctctttttactgcaacttaatatttctatttagaacacagaaaatgaaaatatttagaataagttgtacatttgatgacaaataaatcactattaaaataatttaatactttttttttttaacaaaggtttgtttccagaagaacttttgatgtcagtaaatcttcacaatcccacctgtacattttaacattcatggacttgtaatggtgatgctttggctaacagcctagtagatgtattttatttcaattttatgatactacagtttcaaagtaattattcagaactctgaatataaaatagccctaaaccttaaaggacaaatcaaatttgaaataagaatttaaatctttggacaagctgttagggcttagtgactcctcttctactttgagcttttaaaatactgactattcataatgaaggaaaatagcaaccaactcttttagacacaataaacatggttagaagttctggcctatgacttgaaacaaataaccctgagcatacatttttgaaaaacattgtcagattcattgctgtaagtatgaagagttaataatctggaagggaattatggaattaagctgaacccatgcctgcatatttaaaaaacaaagcggcttattttaatagtatcaaactcttcagtatggtattgaatagtcagtcatatattctagctaggcatatgagtttcttatgataaaagctgaacttgttctctcaagtttaagtgaaaaaaattagttgagaaaaaataattatttaaaatataagccttcatattattgtacaatatttctcctttgagaagataggatatatgattttcccaaaaatcacaactttgaaggaagacttagttgctgacttcaattatatcctggaactggcaacttgtgcccttcctttgcttcaaaaaaagtgtaagaaagagtgataagatcaactttaatcattcttggatcttcagcaaattcaggatcaatgtagaaaaacactggcatatctacttcctcttggggattaagcctttgttcttcaaaacagaagcactggaaattatagaaagattttaataacatttctattctcgtattacataacagaaactatacagttcttttatcttagcattccagtacacttcgtgattttaataagcatactattaaatacacagttctgtgataaattaagagcatcttttcatctcaatgagttctgctttaaggatgaagaacaaattctaatcttaaaagcagatatccatttggtttggttctcaatctctgcatagcaggtatagatagtgaagaaaaatagcttgatgtttagaagaaattcgttttcagaaatcacaagatctactaaaacactaagtttcatactaaaccgtttcatgtatctttatcatattctgtaaagtttacactttgatgtacctgtattttattgaaatactgtccagcttcaaatggaacaatattgtatgtagaaattccaattactggtttgtcagtaggattcttagctctgtaaaacgccagtgcagtctctcctggcaccacctgttttaaagaatatatatattatcaatactttga

SEQ ID NO: 356511 - DNA, 1679 bp, Homo sapiens
agagcccgggaagcgctcgggcgaagaggaggagccaagggtaccgagcgggtggagtcgggagccggagagcggtggaggcggatttcctgggcccggccctctggcgctaccatggcgtttggcaagagtcaccgggatccctacgcgacctccgtgggccacctcatagaaaaggctacatttgctggagttcagactgaagattggggccagttcatgcacatctgtgacataattaacactacccaggatgggccaaaagatgcagtgaaagctttgaagaaaaggatttccaaaaactacaatcataaagaaatccaacttaccttgtcacttattgacatgtgtgtgcagaactgtggtccaagtttccagtctctgattgtgaagaaggaatttgttaaagagaatttagttaagctactgaatcccagatacaacttgccattagacattcagaatagaatcttgaatttcattaagacttggtcacagggcttcccaggaggtgtggatgtaagcgaagtcaaagaagtatacctcgacctggttaagaaaggcgttcagtttcctccctcagaagcagaggctgaaacagcaagacaagagactgctcaaatctcatcaaatcctccaacatctgtccctactgcaccagctctttcttctgtaattgctccaaagaactcgactgttacattggtcccagaacagattggaaaactgcacagtgaattggatatggtgaaaatgaatgtgcgagtgatgtccgccatattgatggagaatactcctgggtctgaaaaccatgaagacatagagcttctgcagaaactctataaaacaggtcgggagatgcaggagaggatcatggacctgcttgtggtggtggagaacgaagatgtaactgttgagctaattcaggtgaatgaggatttgaataatgctatccttggatatgagaggtttactagaaaccaacaaaggattttggagcaaaataagaaccagaaggaagccaccaatactaccagtgagccttctgccccatctcaagatctcctcgacctaagtcccagtccccggatgcctagggccactctgggagaactcaacaccatgaataatcaactttcaggcttaaatttcagccttccaagttctgatgtaacaaacaacttaaaacccagtcttcatccacagatgaacttgctagccttggagaatacagagatacccccgtttgcccaaaggaccagccaaaacctcacctcaagccacgcatatgataattttctggaacattcaaattcagtgtttctacagccagttagtctacaaaccattgcagcagcaccatcaaaccagagtctgccacctttgcccagcaatcatccagcgatgacaaaaagtgatctccagccacctaattactacgaggtaatggagtttgatcccttagctcctgctgtcactacagagtatattttccagctacagacatatgtaagacgcatataaagaattgaatgggcctggcatggtggcttatgcctctaatcccaacattttgagaggctgaagtggaaggatcacttgaacctgggaggtcgaagctgcaatgggccatgattgcacccctgcactccagcctgggtgacagtgaccctgtctca

SEQ ID NO: 356512 - DNA, 954 bp, Homo sapiens
ccgtgttggccaggctggtcttgaactcctgacctcaggtgatccacccgccttggcctcccaaagtgctgggattacaggtgtgagcctctgcgcccggccaaaaatacagacttttaaatagatttttaaatagtgtcaagattttaaggtcaagatagcatgctttcccgctctaacttttcagatcattatatattaccctttttccccctacaggcatttggatggcaatactgagccagggcttacattaggaggctatttctgcccacagtgtcgggcaaagtactgtgagctacctgttgaatgtaaaatctgtggtcttactttggtgtctgctccccacttggcacggtcttaccatcatttgtttcctttggatgcttttcaagaaattcccctagaagaatataatggagaaaggtatttcagtttggactaatttatatctgttataagtggtaagctaatgtttgaatagattgttactaccttaaaaaataatctgattaacttggacaagagtacttctaatatggaagatgagataaagaatgccatagttatgattgaaatgactcgttgctaaatagatctgaatctccagaaaccaaataatttcactaaacccacctatgtataaataggggtgatgattgtactactaaatcagttttccagaaggaaaagaaaaaaagccctgattggtagtatttgctgatttccatggtttgaatactcccaccatggccaatttttagctacaattaacaaccagctttcttgaatacatatttaacaatatatccttttgatccagtacaatccagtcctagcacactactgaaaataagaggctcattcagcactttgggaggctgaggtgggaggatcacttgaggccaggagttgaagactagctggggcaacatagtgagacactgtctctta

SEQ ID NO: 356513 - DNA, 916 bp, Homo sapiens
  misc_feature (788)..(788): n is a, c, g, or t
  misc_feature (794)..(794): n is a, c, g, or t
  misc_feature (800)..(800): n is a, c, g, or t
  misc_feature (804)..(804): n is a, c, g, or t
  misc_feature (807)..(807): n is a, c, g, or t
ccacgcgtccgcggacgcgtgggtcgacccacgcgtccgcgtctagcggcgccggctggagtgcagtggcacaaccttggctcgctccagtgtctacctcccaggttcaagtgattctcctgcctcagcctcccgagtagctgggattacagattattgaataataaaatacagttttgaaaaaaatggatgaagaacctgaaagaactaagcgatgggaaggaggctatgaaagaacatgggagattcttaaagaagatgaatctggatcacttaaagctacaatagaagacattctattcaaggcaaagagaaaaagagtatttgagcaccatggacaagttcgacttggaatgatgcgccacctttatgtggtagtagatggatcaagaacaatggaagaccaagatttaaagcctaatagactgacgtgtactttaaagttgttggaatactttgtagaggaatattttgatcaaaatcctattagtcagattggaataattgtaactaagagtaaaagagctgaaaaattgactgaactttcaggaaacccaagaaaacatataacgtctttgaagaaagctgtggatatgacctgccatggagagccatctctttataattccctaagcatggctatgcagactctaaagttagtattatacattatgtataattgaattagaagttttttaaatgagttaagctgaagtgatgtgttaatatggggcccataaacccagctataacaaaattgttaagtacaagaattatgtagtgtatangagtangggggngganaanttattcttagagattgggaggttaaatattttaaggggaattgaaaggggaaattttcgggtttgggaaaaaaaaagcggggagaatcaatggggcaaaagatagatag

SEQ ID NO: 356514 - DNA, 483 bp, Homo sapiens
ccggacctgaccgcgagaacagacagttcgacttggaatgatgcgccacctttatgtggtagtagatggatcaagaacaatggaagaccaagatttaaagcctaatagactgacgtgtactttaaaggaaacccaagaaaacatataacgtctttgaagaaagctgtggatatgacctgccatggagagccatctctttataattccctaagcatggctatgcagactctaaaacacatgcctggacatacaagtcgagaagtactaatcatctttagcagccttacaacttgcgatccatctaatatttatgatctaatcaagaccctaaaggcagctaaaattagagtatctgttattggattgtctgcagaagttcgcgtttgcactgtacttgctcgtgaaactggtgcacgtaccatggcaacaacttcgtccactatgatctgtgtcaccaaggggtatgggtgttcggcgtgtgca

SEQ ID NO: 356515 - DNA, 583 bp, Homo sapiens
tttctacaaaacaaaacaagtacttgaaattggccctttctttttttccgatagatgcgccacctttatgtggtagtagatggatcaagaacaatggaagaccaagatttaaagcctaatagactgacgtgtactttaaaggtaaaatttaagtttatactaaatcatttaaatttgtaccaaaatcacttaaacttttactaaaaaagtggggaagaacactggattctaaaggatatttttaaagaatgcaatattttttattttttgccttgtatttttagttaatgctaatgatagctaagtagaagtactgccaggttatttagggaaattttaaaccaacatagctaattatttgtgtttttaatttctatcctcccaccccacatcaggatcttggtttatcagttatcccttttctttcttgaatcttcattctcctttgccttacttaactctgtctcctcagattacaaatatgttcgtattcctaatttatcaaaacctattctcaattctgctcgttctcccatctctcttcattggatcttttcctcattgaaatttcttctgacacatc

SEQ ID NO: 356516 - DNA, 662 bp, Homo sapiens
caggcaattagaaaaagagtatttgagcaccatggacaagttcgacttggaatagctggaaagcggcggagaggagtgtcgggcggagtttccggctgagagtccttctagcggcgccggctggagtgcagtggcacaaccttggctcgctccagtgtctacctcccaggttcaagtgattctcctgcctcagcctcccgagtagctgggattacagattattgaataataaaatacagttttgaaaaaaatggatgaagaacctgaaagaactaagcgatgggaaggaggctatgaaagaacatgggagattcttaaagaagatgaatctggatcacttaaagctacaatagaagacattctattcaaggcaaagagaaaaaggtatgtaaccttcctatgtatcttaaaaaggtaaaatatattcattttaagcctttctatctataaatactcctcagtacttcattttagctgtgtttcagggtaactgacctattgccttctgactatggggaaagaactagccacctacccttgccccagcaggaaatggtctttagagactgtctacaatacctataattgtgtgtattgtattccataagttaattatttactccactaaaaatgcacgttatgacattcttactcagaattag

SEQ ID NO: 356517 - DNA, 329 bp, Homo sapiens
gatgatacaacttttacagaattacatagaacgtacagttcgttatgtctatgaaggtgtttttttttcccttttcatcttgttaggcacgtaccatgttattttagatgaaagccattacaaagagttgctcacacatcatgttagtcctcctcctgctagctcaagttctgaatgctcacttattcgtatgggtaagtgtttttatgtttttaaaaaatacatatctaggctctccattttcatttgcacaagttattttaatatttaagaatttttaaagaaaaaatatgcttgttgaagcaattttggaaagtacagagaagtgg

SEQ ID NO: 356518 - DNA, 358 bp, Homo sapiens
aactattttaatgagtaaattctaagaaaaaacattgttaaacttttttttcagattttgttatggatgtcagggggaattgaaagaccaacatgtaagttctttggctttctaaatattaagtaatgtacaagaaatattgaaatcaatggtactataagttttcaacaggttgttaaagaccaggctcatatcagtttatttcttgtaaagataatgacaataggtgaaggtaaaataggaacaaaatagtttaaatagtagttttgttattctgcattctaatttttgctataaagtattttgtaattcatctttttaaaactttttattaaaaattttttaatttttttcctct

SEQ ID NO: 356519 - DNA, 195 bp, Homo sapiens
tgagttatactgttttcaaagtcattatacatactgcataatgactttgaaaacagtataactcaaaataatagaaaacaaaattaattgaatgaattatactgttttcaaagtcattatgcagtatgtataaacttataagaattaaattgatgtgataattttatgtttttataattaaatatagaatcttta

SEQ ID NO: 356520 - DNA, 1828 bp, Homo sapiens
caggcaattagaaaaagagtatttgagcaccatggacaagttcgacttggaatagctggaaagcggcggagaggagtgtcgggcggagtttccggctgagagtccttctagcggcgccggtgagtccgcgtgtggaagtctgtgaggcgcagaggtggggcaggccgtctggctagctaggcggctgggagcgttttcgtggcggggaacggaggttgaattgccctgcctgggctcatagggaaggaggatgtgaaggagcttgtgaaggcagaggaagattattgaataataaaatacagttttgaaaaaaatggatgaagaacctgaaagaactaagcgatgggaaggaggctatgaaagaacatgggagattcttaaagaagatgaatctggatcacttaaagctacaatagaagacattctattcaaggcaaagagaaaaagagtatttgagcaccatggacaagttcgacttggaatgatgcgccacctttatgtggtagtagatggatcaagaacaatggaagaccaagatttaaagcctaatagactgacgtgtactttaaagttgttggaatactttgtagaggaatattttgatcaaaatcctattagtcagattggaataattgtaactaagagtaaaagagctgaaaaattgactgaactttcaggaaacccaagaaaacatataacgtctttgaagaaagctgtggatatgacctgccatggagagccatctctttataattccctaagcatggctatgcagactctaaaacacatgcctggacatacaagtcgagaagtactaatcatctttagcagccttacaacttgcgatccatctaatatttatgatctaatcaagaccctaaaggcagctaaaattagagtatctgttattggattgtctgcagaagttcgcgtttgcactgtacttgctcgtgaaactggtggcacgtaccatgttattttagatgaaagccattacaaagagttgctcacacatcatgttagtcctcctcctgctagctcaagttctgaatgctcacttattcgtatgggatttcctcagcacaccattgcttctttatctgaccaggatgcaaaaccctctttcagcatggcgcatttggatggcaatactgagccagggcttacattaggaggctatttctgcccacagtgtcgggcaaagtactgtgagctacctgttgaatgtaaaatctgtggtcttactttggtgtctgctccccacttggcacggtcttaccatcatttgtttcctttggatgcttttcaagaaattcccctagaagaatataatggagaaagattttgttatggatgtcagggggaattgaaagaccaacatgtttatgtttgtgctgtgtgccaaaatgttttctgtgtggactgtgatgtttttgttcatgattctctacactgttgccctggctgtattcataagattccagctccttcaggtgtttgattccagcatgtagtatacattgtatgtgttaaaaagaaatttgcaactgtgaataaaaggacttctttagaagaagcttcatttaaaacatgaaaggataatctgacttaagaaactttttgctaagaaaaggtaatattttattaaattttaaatttgtgttgtcacagaaatacctgaaattcagtagtacttcattcaattaattttgttttctattattttgagttatactgttttcaaagtcattatgcagtatgtataaacttataagaattaaattgatgtgataattttatgtttttataattaaatatagaatcttta

SEQ ID NO: 356521 - DNA, 1926 bp, Homo sapiens
caggcaattagaaaaagagtatttgagcaccatggacaagttcgacttggaatagctggaaagcggcggagaggagtgtcgggcggagtttccggctgagagtccttctagcggcgccggtgagtccgcgtgtggaagtctgtgaggcgcagaggtggggcaggccgtctggctagctaggcggctgggagcgttttcgtggcggggaacggaggttgaattgccctgcctgggctcatagggaaggaggatgtgaaggagcttgtgaaggcagaggaaggctggagtgcagtggcacaaccttggctcgctccagtgtctacctcccaggttcaagtgattctcctgcctcagcctcccgagtagctgggattacagattattgaataataaaatacagttttgaaaaaaatggatgaagaacctgaaagaactaagcgatgggaaggaggctatgaaagaacatgggagattcttaaagaagatgaatctggatcacttaaagctacaatagaagacattctattcaaggcaaagagaaaaagagtatttgagcaccatggacaagttcgacttggaatgatgcgccacctttatgtggtagtagatggatcaagaacaatggaagaccaagatttaaagcctaatagactgacgtgtactttaaagttgttggaatactttgtagaggaatattttgatcaaaatcctattagtcagattggaataattgtaactaagagtaaaagagctgaaaaattgactgaactttcaggaaacccaagaaaacatataacgtctttgaagaaagctgtggatatgacctgccatggagagccatctctttataattccctaagcatggctatgcagactctaaaacacatgcctggacatacaagtcgagaagtactaatcatctttagcagccttacaacttgcgatccatctaatatttatgatctaatcaagaccctaaaggcagctaaaattagagtatctgttattggattgtctgcagaagttcgcgtttgcactgtacttgctcgtgaaactggtggcacgtaccatgttattttagatgaaagccattacaaagagttgctcacacatcatgttagtcctcctcctgctagctcaagttctgaatgctcacttattcgtatgggatttcctcagcacaccattgcttctttatctgaccaggatgcaaaaccctctttcagcatggcgcatttggatggcaatactgagccagggcttacattaggaggctatttctgcccacagtgtcgggcaaagtactgtgagctacctgttgaatgtaaaatctgtggtcttactttggtgtctgctccccacttggcacggtcttaccatcatttgtttcctttggatgcttttcaagaaattcccctagaagaatataatggagaaagattttgttatggatgtcagggggaattgaaagaccaacatgtttatgtttgtgctgtgtgccaaaatgttttctgtgtggactgtgatgtttttgttcatgattctctacactgttgccctggctgtattcataagattccagctccttcaggtgtttgattccagcatgtagtatacattgtatgtgttaaaaagaaatttgcaactgtgaataaaaggacttctttagaagaagcttcatttaaaacatgaaaggataatctgacttaagaaactttttgctaagaaaaggtaatattttattaaattttaaatttgtgttgtcacagaaatacctgaaattcagtagtacttcattcaattaattttgttttctattattttgagttatactgttttcaaagtcattatgcagtatgtataaacttataagaattaaattgatgtgataattttatgtttttataattaaatatagaatcttta

SEQ ID NO: 356522 - DNA, 1791 bp, Homo sapiens
caggcaattagaaaaagagtatttgagcaccatggacaagttcgacttggaatagctggaaagcggcggagaggagtgtcgggcggagtttccggctgagagtccttctagcggcgccggtgagtccgcgtgtggaagtctgtgaggcgcagaggtggggcaggccgtctggctagctaggcggctgggagcgttttcgtggcggggaacggaggttgaattgccctgcctgggctcatagggaaggaggatgtgaaggagcttgtgaaggcagaggaagattattgaataataaaatacagttttgaaaaaaatggatgaagaacctgaaagaactaagcgatgggaaggaggctatgaaagaacatgggagattcttaaagaagatgaatctggatcacttaaagctacaatagaagacattctattcaaggcaaagagaaaaagatgcgccacctttatgtggtagtagatggatcaagaacaatggaagaccaagatttaaagcctaatagactgacgtgtactttaaagttgttggaatactttgtagaggaatattttgatcaaaatcctattagtcagattggaataattgtaactaagagtaaaagagctgaaaaattgactgaactttcaggaaacccaagaaaacatataacgtctttgaagaaagctgtggatatgacctgccatggagagccatctctttataattccctaagcatggctatgcagactctaaaacacatgcctggacatacaagtcgagaagtactaatcatctttagcagccttacaacttgcgatccatctaatatttatgatctaatcaagaccctaaaggcagctaaaattagagtatctgttattggattgtctgcagaagttcgcgtttgcactgtacttgctcgtgaaactggtggcacgtaccatgttattttagatgaaagccattacaaagagttgctcacacatcatgttagtcctcctcctgctagctcaagttctgaatgctcacttattcgtatgggatttcctcagcacaccattgcttctttatctgaccaggatgcaaaaccctctttcagcatggcgcatttggatggcaatactgagccagggcttacattaggaggctatttctgcccacagtgtcgggcaaagtactgtgagctacctgttgaatgtaaaatctgtggtcttactttggtgtctgctccccacttggcacggtcttaccatcatttgtttcctttggatgcttttcaagaaattcccctagaagaatataatggagaaagattttgttatggatgtcagggggaattgaaagaccaacatgtttatgtttgtgctgtgtgccaaaatgttttctgtgtggactgtgatgtttttgttcatgattctctacactgttgccctggctgtattcataagattccagctccttcaggtgtttgattccagcatgtagtatacattgtatgtgttaaaaagaaatttgcaactgtgaataaaaggacttctttagaagaagcttcatttaaaacatgaaaggataatctgacttaagaaactttttgctaagaaaaggtaatattttattaaattttaaatttgtgttgtcacagaaatacctgaaattcagtagtacttcattcaattaattttgttttctattattttgagttatactgttttcaaagtcattatgcagtatgtataaacttataagaattaaattgatgtgataattttatgtttttataattaaatatagaatcttta

SEQ ID NO: 356523 - DNA, 1774 bp, Homo sapiens
caggcaattagaaaaagagtatttgagcaccatggacaagttcgacttggaatagctggaaagcggcggagaggagtgtcgggcggagtttccggctgagagtccttctagcggcgccggtgagtccgcgtgtggaagtctgtgaggcgcagaggtggggcaggccgtctggctagctaggcggctgggagcgttttcgtggcggggaacggaggttgaattgccctgcctgggctcatagggaaggaggatgtgaaggagcttgtgaaggcagaggaagattattgaataataaaatacagttttgaaaaaaatggatgaagaacctgaaagaactaagcgatgggaaggaggctatgaaagaacatgggagattcttaaagaagatgaatctggatcacttaaagctacaatagaagacattctattcaaggcaaagagaaaaagagtatttgagcaccatggacaagttcgacttggaatgatgcgccacctttatgtggtagtagatggatcaagaacaatggaagaccaagatttaaagcctaatagactgacgtgtactttaaagttgttggaatactttgtagaggaatattttgatcaaaatcctattagtcagattggaataattgtaactaagagtaaaagagctgaaaaattgactgaactttcaggaaacccaagaaaacatataacgtctttgaagaaagctgtggatatgacctgccatggagagccatctctttataattccctaagcatggctatgcagactctaaaacacatgcctggacatacaagtcgagaagtactaatcatctttagcagccttacaacttgcgatccatctaatatttatgatctaatcaagaccctaaaggcagctcttgctcgtgaaactggtggcacgtaccatgttattttagatgaaagccattacaaagagttgctcacacatcatgttagtcctcctcctgctagctcaagttctgaatgctcacttattcgtatgggatttcctcagcacaccattgcttctttatctgaccaggatgcaaaaccctctttcagcatggcgcatttggatggcaatactgagccagggcttacattaggaggctatttctgcccacagtgtcgggcaaagtactgtgagctacctgttgaatgtaaaatctgtggtcttactttggtgtctgctccccacttggcacggtcttaccatcatttgtttcctttggatgcttttcaagaaattcccctagaagaatataatggagaaagattttgttatggatgtcagggggaattgaaagaccaacatgtttatgtttgtgctgtgtgccaaaatgttttctgtgtggactgtgatgtttttgttcatgattctctacactgttgccctggctgtattcataagattccagctccttcaggtgtttgattccagcatgtagtatacattgtatgtgttaaaaagaaatttgcaactgtgaataaaaggacttctttagaagaagcttcatttaaaacatgaaaggataatctgacttaagaaactttttgctaagaaaaggtaatattttattaaattttaaatttgtgttgtcacagaaatacctgaaattcagtagtacttcattcaattaattttgttttctattattttgagttatactgttttcaaagtcattatgcagtatgtataaacttataagaattaaattgatgtgataattttatgtttttataattaaatatagaatcttta

SEQ ID NO: 356524 - DNA, 1597 bp, Homo sapiens
tatatatagggttcagtactatccttgatttcaggtatccactgggggtcttggaatgtatcctctgcagataagaggggactactatagtctttgagaaagaagtgtgtgttactgttttgaagccacatctctgcactttaaagctgatccatatgatattgccacattttagtttaaagtttatccatatattgttgtattttttattgtatactctagactttgtatgaaacaaacctactagaatgtaagcttaatgatgtcgggaacattgtcagtcttgtttatcactctacccccagaacttgagagtacttggtaaatattaaatgaatcaattaacaattttttgaagtgcatagctcattttagaaaaatttgcattaaagtgtttaaaatatactcacaacctttctttgcattgttgaaacaaatgagatattctatagtctaaatgtgtaatcctatgtttactgttctttctgggtaaattttttggtagtataatttgttgtacctaattggagtgtattttatctttcttttaagacacatgcctggacatacaagtcgagaagtactaatcatctttagcagccttacaacttgcgatccatctaatatttatgatctaatcaagaccctaaaggcagctaaaattagagtatctgttattggattgtctgcagaagttcgcgtttgcactgtacttgctcgtgaaactggtggcacgtaccatgttattttagatgaaagccattacaaagagttgctcacacatcatgttagtcctcctcctgctagctcaagttctgaatgctcacttattcgtatgggatttcctcagcacaccattgcttctttatctgaccaggatgcaaaaccctctttcagcatggcgcatttggatggcaatactgagccagggcttacattaggaggctatttctgcccacagtgtcgggcaaagtactgtgagctacctgttgaatgtaaaatctgtggtcttactttggtgtctgctccccacttggcacggtcttaccatcatttgtttcctttggatgcttttcaagaaattcccctagaagaatataatggagaaagattttgttatggatgtcagggggaattgaaagaccaacatgtttatgtttgtgctgtgtgccaaaatgttttctgtgtggactgtgatgtttttgttcatgattctctacactgttgccctggctgtattcataagattccagctccttcaggtgtttgattccagcatgtagtatacattgtatgtgttaaaaagaaatttgcaactgtgaataaaaggacttctttagaagaagcttcatttaaaacatgaaaggataatctgacttaagaaactttttgctaagaaaaggtaatattttattaaattttaaatttgtgttgtcacagaaatacctgaaattcagtagtacttcattcaattaattttgttttctattattttgagttatactgttttcaaagtcattatgcagtatgtataaacttataagaattaaattgatgtgataattttatgtttttataattaaatatagaatcttta

SEQ ID NO: 356525 - DNA, 1815 bp, Homo sapiens
tatatatagggttcagtactatccttgatttcaggtatccactgggggtcttggaatgtatcctctgcagataagaggggactactatagtctttgagaaagaagtgtgtgttactgttttgaagccacatctctgcactttaaagctgatccatatgatattgccacattttagtttaaagtttatccatatattgttgtattttttattgtatactctagactttgtatgaaacaaacctactagaatgtaagcttaatgatgtcgggaacattgtcagtcttgtttatcactctacccccagaacttgagagtacttggtaaatattaaatgaatcaattaacaattttttgaagtgcatagctcattttagaaaaatttgcattaaagtgtttaaaatatactcacaacctttctttgcattgttgaaacaaatgagatattctatagtctaaatgtgtaatcctatgtttactgttctttctgggtaaattttttggtagtataatttgttgtacctaattggagtgtattttatctttcttttaagacacatgcctggacatacaagtcgagaagtactaatcatctttagcagccttacaacttgcgatccatctaatatttatgatctaatcaaggtagaccaaaaaatcaaaaccaaagttataactgtaaagagaattctgtagcaaattgatttatatatatatgtatttttgtatgtgtgattcatctttgtggtagatgtattgaatttattactagttttcagagcattctttatttttcaaatacattaaatcttaaatgtttttcttctttcctaaaactatctatctacttggattttatgaagaccctaaaggcagctaaaattagagtatctgttattggattgtctgcagaagttcgcgtttgcactgtacttgctcgtgaaactggtggcacgtaccatgttattttagatgaaagccattacaaagagttgctcacacatcatgttagtcctcctcctgctagctcaagttctgaatgctcacttattcgtatgggatttcctcagcacaccattgcttctttatctgaccaggatgcaaaaccctctttcagcatggcgcatttggatggcaatactgagccagggcttacattaggaggctatttctgcccacagtgtcgggcaaagtactgtgagctacctgttgaatgtaaaatctgtggtcttactttggtgtctgctccccacttggcacggtcttaccatcatttgtttcctttggatgcttttcaagaaattcccctagaagaatataatggagaaagattttgttatggatgtcagggggaattgaaagaccaacatgtttatgtttgtgctgtgtgccaaaatgttttctgtgtggactgtgatgtttttgttcatgattctctacactgttgccctggctgtattcataagattccagctccttcaggtgtttgattccagcatgtagtatacattgtatgtgttaaaaagaaatttgcaactgtgaataaaaggacttctttagaagaagcttcatttaaaacatgaaaggataatctgacttaagaaactttttgctaagaaaaggtaatattttattaaattttaaatttgtgttgtcacagaaatacctgaaattcagtagtacttcattcaattaattttgttttctattattttgagttatactgttttcaaagtcattatgcagtatgtataaacttataagaattaaattgatgtgataattttatgtttttataattaaatatagaatcttta

SEQ ID NO: 356526 - DNA, 1034 bp, Homo sapiens
  misc_feature (13)..(13): n is a, c, g, or t
gctctagaggatnctcaactacacagctatgaaacccaagaaaacatataacgtctttgaagaaagctgtggatatgacctgccatggagagccatctctttataattccctaagcatggctatgcagactctaaaacacatgcctggacatacaagtcgagaagtactaatcatctttagcagccttacaacttgcgatccatctaatatttatgatctaatcaagaccctaaaggcagctaaaattagagtatctgttattggattgtctgcagaagttcgcgtttgcactgtacttgctcgtgaaactggtggcacgtaccatgttattttagatgaaagccattacaaagagttgctcacacatcatgttagtcctcctcctgctagctcaagttctgaatgctcacttattcgtatgggatttcctcagcacaccattgcttctttatctgaccaggatgcaaaaccctctttcagcatggctcatttgtttcctttggatgcttttcaagaaattcccctagaagaatataatggagaaagattttgttatggatgtcagggggaattgaaagaccaacatgtttatgtttgtgctgtgtgccaaaatgttttctgtgtggactgtgatgtttttgttcatgattctctacactgttgccctggctgtattcataagattccagctccttcaggtgtttgattccagcatgtagtatacattgtatgtgttaaaaagaaatttgcaactgtgaataaaaggacttctttagaagaagcttcatttaaaacatgaaaggataatctgacttaagaaactttttgctaagaaaaggtaatattttattaaattttaaatttgtgttgtcacagaaatacctgaaattcagtagtacttcattcaattaattttgttttctattattttgagttatactgttttcaaagtcattatgcagtatgtataaacttataagaattaaattgatgtgataattttatgtttttataattaaatatagaatcttta

SEQ ID NO: 356527 - DNA, 882 bp, Homo sapiens
gcggaatgacttccggggcgcccctaaagcggcggagaggagtgtcgggcggagtttccggctgagagtccttctagcggcgccgattattgaataataaaatacagttttgaaaaaaatggatgaagaacctgaaagaactaagcgatgggaaggaggctatgaaagaacatgggagattcttaaagaagatgaatctggatcacttaaagctacaatagaagacattctattcaaggcaaagagaaaaagagtatttgagcaccatggacaagttcgacttggaatgatgcgccacctttatgtggtagtagatggatcaagaacaatggaagaccaagatttaaagcctaatagactgacgtgtactttaaagttgttggaatactttgtagaggaatattttgatcaaaatcctattagtcagattggaataattgtaactaagagtaaaagagctgaaaaattgactgaactttcaggaaacccaagaaaacatataacgtctttgaagaaagctgtggatatgacctgccatggagagccatctctttataattccctaagcatggctatgcagactctaaagttagtattatacattatgtataattgaattagaagttttttaaatgagttaagctgaagtgatgtgttaatatggggcccataaacccagctataacaaaattgttaagtacaagaattatgtagtgttatttatgatgtttagtgtggtgttggttagtaatctttattttacattttagtaagatattgttaaaggttttataaaaatataatttaaaactgtcggcagtatcaatagtacaaaaaatatgttgatgaaaaaatattttattaaaatgagatttaatatag

SEQ ID NO: 356528 - DNA, 1691 bp, Homo sapiens
caggcaattagaaaaagagtatttgagcaccatggacaagttcgacttggaatagctggaaagcggcggagaggagtgtcgggcggagtttccggctgagagtccttctagcggcgccggtgagtccgcgtgtggaagtctgtgaggcgcagaggtggggcaggccgtctggctagctaggcggctgggagcgttttcgtggcggggaacggaggttgaattgccctgcctgggctcatagggaaggaggatgtgaaggagcttgtgaaggcagaggaagattattgaataataaaatacagttttgaaaaaaatggatgaagaacctgaaagaactaagcgatgggaaggaggctatgaaagaacatgggagattcttaaagaagatgaatctggatcacttaaagctacaatagaagacattctattcaaggcaaagagaaaaagagtatttgagcaccatggacaagttcgacttggaatgatgcgccacctttatgtggtagtagatggatcaagaacaatggaagaccaagatttaaagcctaatagactgacgtgtactttaaagttgttggaatactttgtagaggaatattttgatcaaaatcctattagtcagattggaataattgtaactaagagtaaaagagctgaaaaattgactgaactttcaggaaacccaagaaaacatataacgtctttgaagaaagctgtggatatgacctgccatggagagccatctctttataattccctaagcatggctatgcagactctaaaacacatgcctggacatacaagtcgagaagtactaatcatctttagcagccttacaacttgcgatccatctaatatttatgatctaatcaaggtagaccaaaaaatcaaaaccaaagttataactgtaaagagaattctgtagcaaattgatttatatatatatgtatttttgtatgtgtgattcatctttgtggtagatgtattgaatttattactagttttcagagcattctttatttttcaaatacattaaatcttaaatgtttttcttctttcctaaaactatctatctacttggattttatgaagaccctaaaggcagctaaaattagagtatctgttattggattgtctgcagaagttcgcgtttgcactgtacttgctcgtgaaactggtggtatatatataatttatttaatatttgcttataattactgtgtaggaaataatttattaattaaattaggatgttttaatctgttctgagctactaaacttaaagtagtctaaaatatgggcagtcatcttaaatatatcattgattccataagaaatcatctccaaatgcaaagagttttcagtacttatgtcagtatttagaggaggtattataactcttggaaagctggaaattttactgtatgtaattctttataaagattttataacttgtctttaattaaattgtaattacaggccaggcatgatagctcatgcctgtaatctcaacattttggtaggccaaggcaggagaatcacttgaggccagaagtttgagatcagtctggttaacatagtgagacctgtctctatttatatgttaaaataataataatagtaataataatcaattgtaattatagttattcctagagaagttgatttagatatattacttaaataaggtt

SEQ ID NO: 356529 - DNA, 2319 bp, Homo sapiens
aagtgctgggattacaggcgtgagtcactacacccggcctcatttgagtttttaagaataggtcattgtctgtgttgtttgaaatttatttattcattctttctttttttttttattcaaagccaaatacttctgagatttagtgatttttgaatctgtgtatgaagctgccctggaaattctatcccaaggagcaagtactcatatatgtaatgctgaaagaacaaatgtagttttttcctttctgcttgtcttatctgtgtcatttgacatatttttttaaaggtttacttgaaagggaaatatgtttgcaattgtgaggtcattccctaagaataattaaatcgatgttaaatttttatgcttctctttttaattgaatcaatcaggtggtcttgctaagcattcaaaagtagcgctggtttgaagctcatatgtctttcctaaaccttagaatgaaataattgagagcgaactgtaatagaatagactttaaagactcaaaaacaaaaccattccctcatttctaagggatagttttggggaaaaaattaattgccttagatttgagaatatagagtacattggaagtaataaagtaggtagtgggaaaaaattggtagagatataaaagagcaaagcacaccttgaatgtcatctagctgtgctgtaattaacttttggaaactagtttatcacttttcttcttttcactacaggtttatgtttgtgctgtgtgccaaaatgttttctgtgtggactgtgatgtttttgttcatgattctctacactgttgccctggctgtattcataagattccagctccttcaggtgtttgattccagcatgtagtatacattgtatgtgttaaaaagaaatttgcaactgtgaataaaaggacttctttagaagaagcttcatttaaaacatgaaaggataatctgacttaagaaactttttgctaagaaaaggtaatattttattaaattttaaatttgtgttgtcacagaaatacctgaaattcagtagtacttcattcaattaattttgttttctattattttgagttatactgttttcaaagtcattatgcagtatgtataaacttataagaattaaattgatgtgataattttatgtttttataattaaatatagaatctttatgatttatgttaattcattaatttagtgtaagaagaaagttaagtctgaatgtaaattcagtgtaagatgaaaatttatcaatacttatgaaattaggctgggcgctgtggctcacgcctgtaatcccaacactttgggaggctgaggtgggcagatcacttgaggtcaggagttcgagaccagcctggccagcatggtgaaaccccgtcactactaaaaatacaaagaataattagccgggcatggtggttcacgcctggagtcccagctacttgggaggctgaggcaggagaatcgcttgaacccaggaggcggaggttgcagggagccgagattgtgccactgcactccaccctagagtgagactccctctcaaaaaaaaaaaaagttatgaaattaatacatatgaaatgatgtactgctacatccaccagagaggtctttttaggtttaaccaaacatctggaatatgtttatcaagttagtacatctgaaattatttgtggctatgaccaacagaagtcactttacattaaacattcaaactcacaagactgccatggccatacttggtacccgcttactcagaaggatattaaacagaaacaacagcctgccagcacagcatcaagcagtcctcattagcagtggaagtccttgtagcagtccactagtacaatttgggtgcaaggagataagatcctccacaggcatcaaggaaccaatatctcttaacaattccataaacacagcttccaggtatccacaagggatgtgtcaatttcaagagtcactacactcaggaaagcctaaagcttgaagactccatttatttatagtgcatcccaatccagatacgtaacaattaacgagttatttttactataagcaaagttgcctaaaatcatagttgatactaaccatggttaacagagctctaaagtttgacagaaagtgagattcaaatcctttcactctcatatgctaaaccttttgccttactctgggtcatcagagaaatttaggtgagaatgtatgatgaagtctgtgttttagattcaatgcagatatatcattgtgggcagaactctttctggttatatccagttaagagtaaatcaggctttcagccgggcgcggtggctcacgcct

SEQ ID NO: 356530 - DNA, 1736 bp, Homo sapiens
cccccccccggggggcacggtttcccccaataattgctcccttggaatgctttcccaaaaattccccccccagaagaatataatggagaaagatttggtaatgaatgtccggggggaattgaaaagacccaaccatgtttatgtttgtgctgtgtgccaaaatgttttctgtgtggactgtgatgtttttgttcatgattctctacactgttgccctggctgtattcataagattccagctccttcaggtgtttgattccagcatgtagtatacattgtatgtgttaaaaagaaatttgcaactgtgaataaaaggacttctttagaagaagcttcatttaaaacatgaaaggataatctgacttaagaaactttttgctaagaaaaggtaatattttattaaattttaaatttgtgttgtcacagaaatacctgaaattcagtagtacttcattcaattaattttgttttctattattttgagttatactgttttcaaagtcattatgcagtatgtataaacttataagaattaaattgatgtgataattttatgtttttataattaaatatagaatctttatgatttatgttaattcattaatttagtgtaagaagaaagttaagtctgaatgtaaattcagtgtaagatgaaaatttatcaatacttatgaaattaggctgggcgctgtggctcacgcctgtaatcccaacactttgggaggctgaggtgggcagatcacttgaggtcaggagttcgagaccagcctggccagcatggtgaaaccccgtcactactaaaaatacaaagaataattagccgggcatggtggttcacgcctggagtcccagctacttgggaggctgaggcaggagaatcgcttgaacccaggaggcggaggttgcagggagccgagattgtgccactgcactccaccctagagtgagactccctctcaaaaaaaaaaaaagttatgaaattaatacatatgaaatgatgtactgctacatccaccagagaggtctttttaggtttaaccaaacatctggaatatgtttatcaagttagtacatctgaaattatttgtggctatgaccaacagaagtcactttacattaaacattcaaactcacaagactgccatggccatacttggtacccgcttactcagaaggatattaaacagaaacaacagcctgccagcacagcatcaagcagtcctcattagcagtggaagtccttgtagcagtccactagtacaatttgggtgcaaggagataagatcctccacaggcatcaaggaaccaatatctcttaacaattccataaacacagcttccaggtatccacaagggatgtgtcaatttcaagagtcactacactcaggaaagcctaaagcttgaagactccatttatttatagtgcatcccaatccagatacgtaacaattaacgagttatttttactataagcaaagttgcctaaaatcatagttgatactaaccatggttaacagagctctaaagtttgacagaaagtgagattcaaatcctttcactctcatatgctaaaccttttgccttactctgggtcatcagagaaatttaggtgagaatgtatgatgaagtctgtgttttagattcaatgcagatatatcattgtgggcagaactctttctggttatatccagttaagagtaaatcaggctttcagccgggcgcggtggctcacgcct

SEQ ID NO: 356531 - DNA, 1180 bp, Homo sapiens
caggcaattagaaaaagagtatttgagcaccatggacaagttcgacttggaatagctggaaagcggcggagaggagtgtcgggcggagtttccggctgagagtccttctagcggcgccggctggagtgcagtggcacaaccttggctcgctccagtgtctacctcccaggttcaagtgattctcctgcctcagcctcccgagtagctgggattacagattattgaataataaaatacagttttgaaaaaaatggatgaagaacctgaaagaactaagcgatgggaaggaggctatgaaagaacatgggagattcttaaagaagatgaatctggatcacttaaagctacaatagaagacattctattcaaggcaaagagaaaaagagtatttgagcaccatggacaagttcgacttggaatgatgcgccacctttatgtggtagtagatggatcaagaacaatggaagaccaagatttaaagcctaatagactgacgtgtactttaaagttgttggaatactttgtagaggaatattttgatcaaaatcctattagtcagattggaataattgtaactaagagtaaaagagctgaaaaattgactgaactttcaggaaacccaagaaaacatataacgtctttgaagaaagctgtggatatgacctgccatggagagccatctctttataattccctaagcatggctatgcagactctaaagttagtattatacattatgtataattgaattagaagttttttaaatgagttaagctgaagtgatgtgttaatatggggcccataaacccagctataacaaaattgttaagtacaagaattatgtagtgttatttatgatgtttagtgtggtgttggttagtaatctttattttacattttagtaagatattgttaaaggttttataaaaatataatttaaaactgtcggcagtatcaatagtacaaaaaatatgttgatgaaaaaatattttattaaaatgagatttaatatagtataataattgtaagttggttgtacctttattaacatttattaatttattttgaaagtaatggccaaaaccacagttccttttgcaccaatgtcatatatctgtaaattaatagatatggcaagttcagctatatggaatagagctaagaccccaaaggaaatact

SEQ ID NO: 356532 - DNA, 465 bp, Homo sapiens
tctacagtttgtcatgtgacacatctataaagcatttttgttcttttacaaatcgtaaaaagacgcttatttttattggtaccaagtttgtgtataagttcatattatttcttggaaatgagaaatggagttctatgaagatttttaagacaattattgagtaaaatacaaagaataagatgacctggcattccatttttttttacttcatatatgtgtctaattttcaaatttaattggatgaattttgtaacaaacatctttagataacttacattctaatggtttttacagattattgaataataaaatacagttttgaaaaaaatggatgaagaacctgaaagaactaagcgatgggaaggaggctatgaaagaacatggtaaggagagctttattgccctgtcttttcttttagacaatgtctttttttttctttacaactttattaaagtatattttac

SEQ ID NO: 356533 - DNA, 2981 bp, Homo sapiens
caggcaattagaaaaagagtatttgagcaccatggacaagttcgacttggaatagctggaaagcggcggagaggagtgtcgggcggagtttccggctgagagtccttctagcggcgccggtgagtccgcgtgtggaagtctgtgaggcgcagaggtggggcaggccgtctggctagctaggcggctgggagcgttttcgtggcggggaacggaggttgaattgccctgcctgggctcatagggaaggaggatgtgaaggagcttgtgaaggcagaggaagattattgaataataaaatacagttttgaaaaaaatggatgaagaacctgaaagaactaagcgatgggaaggaggctatgaaagaacatgggagattcttaaagaagatgaatctggatcacttaaagctacaatagaagacattctattcaaggcaaagagaaaaagagtatttgagcaccatggacaagttcgacttggaatgatgcgccacctttatgtggtagtagatggatcaagaacaatggaagaccaagatttaaagcctaatagactgacgtgtactttaaagttgttggaatactttgtagaggaatattttgatcaaaatcctattagtcagattggaataattgtaactaagagtaaaagagctgaaaaattgactgaactttcaggaaacccaagaaaacatataacgtctttgaagaaagctgtggatatgacctgccatggagagccatctctttataattccctaagcatggctatgcagactctaaaacacatgcctggacatacaagtcgagaagtactaatcatctttagcagccttacaacttgcgatccatctaatatttatgatctaatcaagaccctaaaggcagctaaaattagagtatctgttattggattgtctgcagaagttcgcgtttgcactgtacttgctcgtgaaactggtggcacgtaccatgttattttagatgaaagccattacaaagagttgctcacacatcatgttagtcctcctcctgctagctcaagttctgaatgctcacttattcgtatgggatttcctcagcacaccattgcttctttatctgaccaggatgcaaaaccctctttcagcatggcgcatttggatggcaatactgagccagggcttacattaggaggctatttctgcccacagtgtcgggcaaagtactgtgagctacctgttgaatgtaaaatctgtggtcttactttggtgtctgctccccacttggcacggtcttaccatcatttgtttcctttggatgcttttcaagaaattcccctagaagaatataatggagaaagattttgttatggatgtcagggggaattgaaagaccaacatgtttatgtttgtgctgtgtgccaaaatgttttctgtgtggactgtgatgtttttgttcatgattctctacactgttgccctggctgtattcataagattccagctccttcaggtgtttgattccagcatgtagtatacattgtatgtgttaaaaagaaatttgcaactgtgaataaaaggacttctttagaagaagcttcatttaaaacatgaaaggataatctgacttaagaaactttttgctaagaaaaggtaatattttattaaattttaaatttgtgttgtcacagaaatacctgaaattcagtagtacttcattcaattaattttgttttctattattttgagttatactgttttcaaagtcattatgcagtatgtataaacttataagaattaaattgatgtgataattttatgtttttataattaaatatagaatctttatgatttatgttaattcattaatttagtgtaagaagaaagttaagtctgaatgtaaattcagtgtaagatgaaaatttatcaatacttatgaaattaggctgggcgctgtggctcacgcctgtaatcccaacactttgggaggctgaggtgggcagatcacttgaggtcaggagttcgagaccagcctggccagcatggtgaaaccccgtcactactaaaaatacaaagaataattagccgggcatggtggttcacgcctggagtcccagctacttgggaggctgaggcaggagaatcgcttgaacccaggaggcggaggttgcagggagccgagattgtgccactgcactccaccctagagtgagactccctctcaaaaaaaaaaaaagttatgaaattaatacatatgaaatgatgtactgctacatccaccagagaggtctttttaggtttaaccaaacatctggaatatgtttatcaagttagtacatctgaaattatttgtggctatgaccaacagaagtcactttacattaaacattcaaactcacaagactgccatggccatacttggtacccgcttactcagaaggatattaaacagaaacaacagcctgccagcacagcatcaagcagtcctcattagcagtggaagtccttgtagcagtccactagtacaatttgggtgcaaggagataagatcctccacaggcatcaaggaaccaatatctcttaacaattccataaacacagcttccaggtatccacaagggatgtgtcaatttcaagagtcactacactcaggaaagcctaaagcttgaagactccatttatttatagtgcatcccaatccagatacgtaacaattaacgagttatttttactataagcaaagttgcctaaaatcatagttgatactaaccatggttaacagagctctaaagtttgacagaaagtgagattcaaatcctttcactctcatatgctaaaccttttgccttactctgggtcatcagagaaatttaggtgagaatgtatgatgaagtctgtgttttagattcaatgcagatatatcattgtgggcagaactctttctggttatatccagttaagagtaaatcaggctttcagccgggcgcggtggctcacgcct

SEQ ID NO: 356534 - DNA, 1633 bp, Homo sapiens
gcggaatgacttccggggcgcccctaaagcggcggagaggagtgtcgggcggagtttccggctgagagtccttctagcggcgccgattattgaataataaaatacagttttgaaaaaaatggatgaagaacctgaaagaactaagcgatgggaaggaggctatgaaagaacatgggagattcttaaagaagatgaatctggatcacttaaagctacaatagaagacattctattcaaggcaaagagaaaaagagtatttgagcaccatggacaagttcgacttggaatgatgcgccacctttatgtggtagtagatggatcaagaacaatggaagaccaagatttaaagcctaatagactgacgtgtactttaaagttgttggaatactttgtagaggaatattttgatcaaaatcctattagtcagattggaataattgtaactaagagtaaaagagctgaaaaattgactgaactttcaggaaacccaagaaaacatataacgtctttgaagaaagctgtggatatgacctgccatggagagccatctctttataattccctaagcatggctatgcagactctaaaacacatgcctggacatacaagtcgagaagtactaatcatctttagcagccttacaacttgcgatccatctaatatttatgatctaatcaagaccctaaaggcagctaaaattagagtatctgttattggattgtctgcagaagttcgcgtttgcactgtacttgctcgtgaaactggtggcacgtaccatgttattttagatgaaagccattacaaagagttgctcacacatcatgttagtcctcctcctgctagctcaagttctgaatgctcacttattcgtatgggatttcctcagcacaccattgcttctttatctgaccaggatgcaaaaccctctttcagcatggcgcatttggatggcaatactgagccagggcttacattaggaggctatttctgcccacagtgtcgggcaaagtactgtgagctacctgttgaatgtaaaatctgtggtcttactttggtgtctgctccccacttggcacggtcttaccatcatttgtttcctttggatgcttttcaagaaattcccctagaagaatataatggagaaagattttgttatggatgtcagggggaattgaaagaccaacatgtttatgtttgtgctgtgtgccaaaatgttttctgtgtggactgtgatgtttttgttcatgattctctacactgttgccctggctgtattcataagattccagctccttcaggtgtttgattccagcatgtagtatacattgtatgtgttaaaaagaaatttgcaactgtgaataaaaggacttctttagaagaagcttcatttaaaacatgaaaggataatctgacttaagaaactttttgctaagaaaaggtaatattttattaaattttaaatttgtgttgtcacagaaatacctgaaattcagtagtacttcattcaattaattttgttttctattattttgagttatactgttttcaaagtcattatgcagtatgtataaacttataagaattaaattgatgtgataattttatgtttttataattaaatatagaatcttta

SEQ ID NO: 356535 - DNA, 2046 bp, Homo sapiens
caggcaattagaaaaagagtatttgagcaccatggacaagttcgacttggaatagctggaaagcggcggagaggagtgtcgggcggagtttccggctgagagtccttctagcggcgccggtgagtccgcgtgtggaagtctgtgaggcgcagaggtggggcaggccgtctggctagctaggcggctgggagcgttttcgtggcggggaacggaggttgaattgccctgcctgggctcatagggaaggaggatgtgaaggagcttgtgaaggcagaggaagattattgaataataaaatacagttttgaaaaaaatggatgaagaacctgaaagaactaagcgatgggaaggaggctatgaaagaacatgggagattcttaaagaagatgaatctggatcacttaaagctacaatagaagacattctattcaaggcaaagagaaaaagagtatttgagcaccatggacaagttcgacttggaatgatgcgccacctttatgtggtagtagatggatcaagaacaatggaagaccaagatttaaagcctaatagactgacgtgtactttaaagttgttggaatactttgtagaggaatattttgatcaaaatcctattagtcagattggaataattgtaactaagagtaaaagagctgaaaaattgactgaactttcaggaaacccaagaaaacatataacgtctttgaagaaagctgtggatatgacctgccatggagagccatctctttataattccctaagcatggctatgcagactctaaaacacatgcctggacatacaagtcgagaagtactaatcatctttagcagccttacaacttgcgatccatctaatatttatgatctaatcaaggtagaccaaaaaatcaaaaccaaagttataactgtaaagagaattctgtagcaaattgatttatatatatatgtatttttgtatgtgtgattcatctttgtggtagatgtattgaatttattactagttttcagagcattctttatttttcaaatacattaaatcttaaatgtttttcttctttcctaaaactatctatctacttggattttatgaagaccctaaaggcagctaaaattagagtatctgttattggattgtctgcagaagttcgcgtttgcactgtacttgctcgtgaaactggtggcacgtaccatgttattttagatgaaagccattacaaagagttgctcacacatcatgttagtcctcctcctgctagctcaagttctgaatgctcacttattcgtatgggatttcctcagcacaccattgcttctttatctgaccaggatgcaaaaccctctttcagcatggcgcatttggatggcaatactgagccagggcttacattaggaggctatttctgcccacagtgtcgggcaaagtactgtgagctacctgttgaatgtaaaatctgtggtcttactttggtgtctgctccccacttggcacggtcttaccatcatttgtttcctttggatgcttttcaagaaattcccctagaagaatataatggagaaagattttgttatggatgtcagggggaattgaaagaccaacatgtttatgtttgtgctgtgtgccaaaatgttttctgtgtggactgtgatgtttttgttcatgattctctacactgttgccctggctgtattcataagattccagctccttcaggtgtttgattccagcatgtagtatacattgtatgtgttaaaaagaaatttgcaactgtgaataaaaggacttctttagaagaagcttcatttaaaacatgaaaggataatctgacttaagaaactttttgctaagaaaaggtaatattttattaaattttaaatttgtgttgtcacagaaatacctgaaattcagtagtacttcattcaattaattttgttttctattattttgagttatactgttttcaaagtcattatgcagtatgtataaacttataagaattaaattgatgtgataattttatgtttttataattaaatatagaatcttta

SEQ ID NO: 356536 - DNA, 1681 bp, Homo sapiens
caggcaattagaaaaagagtatttgagcaccatggacaagttcgacttggaatagctggaaagcggcggagaggagtgtcgggcggagtttccggctgagagtccttctagcggcgccggtgagtccgcgtgtggaagtctgtgaggcgcagaggtggggcaggccgtctggctagctaggcggctgggagcgttttcgtggcggggaacggaggttgaattgccctgcctgggctcatagggaaggaggatgtgaaggagcttgtgaaggcagaggaagattattgaataataaaatacagttttgaaaaaaatggatgaagaacctgaaagaactaagcgatgggaaggaggctatgaaagaacatgggagattcttaaagaagatgaatctggatcacttaaagctacaatagaagacattctattcaaggcaaagagaaaaagagtatttgagcaccatggacaagttcgacttggaatgatgcgccacctttatgtggtagtagatggatcaagaacaatggaagaccaagatttaaagcctaatagactgacgtgtactttaaagttgttggaatactttgtagaggaatattttgatcaaaatcctattagtcagattggaataattgtaactaagagtaaaagagctgaaaaattgactgaactttcaggaaacccaagaaaacatataacgtctttgaagaaagctgtggatatgacctgccatggagagccatctctttataattccctaagcatggctatgcagactctaaaacacatgcctggacatacaagtcgagaagtactaatcatctttagcagccttacaacttgcgatccatctaatatttatgatctaatcaagaccctaaaggcagctaaaattagagtatctgttattggattgtctgcagaagttcgcgtttgcactgtacttgctcgtgaaactggtggcacgtaccatgttattttagatgaaagccattacaaagagttgctcacacatcatgttagtcctcctcctgctagctcaagttctgaatgctcacttattcgtatgggatttcctcagcacaccattgcttctttatctgaccaggatgcaaaaccctctttcagcatggctcatttgtttcctttggatgcttttcaagaaattcccctagaagaatataatggagaaagattttgttatggatgtcagggggaattgaaagaccaacatgtttatgtttgtgctgtgtgccaaaatgttttctgtgtggactgtgatgtttttgttcatgattctctacactgttgccctggctgtattcataagattccagctccttcaggtgtttgattccagcatgtagtatacattgtatgtgttaaaaagaaatttgcaactgtgaataaaaggacttctttagaagaagcttcatttaaaacatgaaaggataatctgacttaagaaactttttgctaagaaaaggtaatattttattaaattttaaatttgtgttgtcacagaaatacctgaaattcagtagtacttcattcaattaattttgttttctattattttgagttatactgttttcaaagtcattatgcagtatgtataaacttataagaattaaattgatgtgataattttatgtttttataattaaatatagaatcttta

SEQ ID NO: 356537 - DNA, 1869 bp, Homo sapiens
caggcaattagaaaaagagtatttgagcaccatggacaagttcgacttggaatagctggaaagcggcggagaggagtgtcgggcggagtttccggctgagagtccttctagcggcgccggtgagtccgcgtgtggaagtctgtgaggcgcagaggtggggcaggccgtctggctagctaggcggctgggagcgttttcgtggcggggaacggaggttgaattgccctgcctgggctcatagggaaggaggatgtgaaggagcttgtgaaggcagaggaagattattgaataataaaatacagttttgaaaaaaatggatgaagaacctgaaagaactaagcgatgggaaggaggctatgaaagaacatgggagattcttaaagaagatgaatctggatcacttaaagctacaatagaagacattctattcaaggcaaagagaaaaagagtatttgagcaccatggacaagttcgacttggaatgatgcgccacctttatgtggtagtagatggatcaagaacaatggaagaccaagatttaaagcctaatagactgacgtgtactttaaagttgttggaatactttgtagaggaatattttgatcaaaatcctattagtcagattggaataattgtaactaagagtaaaagagctgaaaaattgactgaactttcaggaaacccaagaaaacatataacgtctttgaagaaagctgtggatatgacctgccatggagagccatctctttataattccctaagcatggctatgcagactctaaaacacatgcctggacatacaagtcgagaagtactaatcatctttagcagccttacaacttgcgatccatctaatatttatgatctaatcaagaccctaaaggcagctaaaattagagtatctgttattggattgtctgcagaagttcgcgtttgcactgtacttgctcgtgaaactggtggcacgtaccatgttattttagatgaaagccattacaaagagttgctcacacatcatgttagtcctcctcctgctagctcaagttctgaatgctcacttattcgtatgggatttcctcagcacaccattgcttctttatctgaccaggatgcaaaaccctctttcagcatggcgcatttggatggcaatactgagccagggcttacattaggaggctatttctgcccacagtgtcgggcaaagtactgtgagctacctgttgaatgtaaaatctgtggtcttactttggtgtctgctccccacttggcacggtcttaccatcatttgtttcctttggatgcttttcaagaaattcccctagaagaatataatggagaaaggtatttcagtttggactaatttatatctgttataagtggtaagctaatgtttgaatagattgttactaccttaaaaaataatctgattaacttggacaagagtacttctaatatggaagatgagataaagaatgccatagttatgattgaaatgactcgttgctaaatagatctgaatctccagaaaccaaataatttcactaaacccacctatgtataaataggggtgatgattgtactactaaatcagttttccagaaggaaaagaaaaaaagccctgattggtagtatttgctgatttccatggtttgaatactcccaccatggccaatttttagctacaattaacaaccagctttcttgaatacatatttaacaatatatccttttgatccagtacaatccagtcctagcacactactgaaaataagaggctcattcagcactttgggaggctgaggtgggaggatcacttgaggccaggagttgaagactagctggggcaacatagtgagacactgtctctta

SEQ ID NO: 356538 - DNA, 1243 bp, Homo sapiens
caggcaattagaaaaagagtatttgagcaccatggacaagttcgacttggaatagctggaaagcggcggagaggagtgtcgggcggagtttccggctgagagtccttctagcggcgccggtgagtccgcgtgtggaagtctgtgaggcgcagaggtggggcaggccgtctggctagctaggcggctgggagcgttttcgtggcggggaacggaggttgaattgccctgcctgggctcatagggaaggaggatgtgaaggagcttgtgaaggcagaggaagattattgaataataaaatacagttttgaaaaaaatggatgaagaacctgaaagaactaagcgatgggaaggaggctatgaaagaacatgggagattcttaaagaagatgaatctggatcacttaaagctacaatagaagacattctattcaaggcaaagagaaaaagagtatttgagcaccatggacaagttcgacttggaatgatgcgccacctttatgtggtagtagatggatcaagaacaatggaagaccaagatttaaagcctaatagactgacgtgtactttaaagttgttggaatactttgtagaggaatattttgatcaaaatcctattagtcagattggaataattgtaactaagagtaaaagagctgaaaaattgactgaactttcaggaaacccaagaaaacatataacgtctttgaagaaagctgtggatatgacctgccatggagagccatctctttataattccctaagcatggctatgcagactctaaagttagtattatacattatgtataattgaattagaagttttttaaatgagttaagctgaagtgatgtgttaatatggggcccataaacccagctataacaaaattgttaagtacaagaattatgtagtgttatttatgatgtttagtgtggtgttggttagtaatctttattttacattttagtaagatattgttaaaggttttataaaaatataatttaaaactgtcggcagtatcaatagtacaaaaaatatgttgatgaaaaaatattttattaaaatgagatttaatatagtataataattgtaagttggttgtacctttattaacatttattaatttattttgaaagtaatggccaaaaccacagttccttttgcaccaatgtcatatatctgtaaattaatagatatggcaagttcagctatatggaatagagctaagaccccaaaggaaatact

SEQ ID NO: 356539 - DNA, 1013 bp, Homo sapiens
caggcaattagaaaaagagtatttgagcaccatggacaagttcgacttggaatagctggaaagcggcggagaggagtgtcgggcggagtttccggctgagagtccttctagcggcgccggtgagtccgcgtgtggaagtctgtgaggcgcagaggtggggcaggccgtctggctagctaggcggctgggagcgttttcgtggcggggaacggaggttgaattgccctgcctgggctcatagggaaggaggatgtgaaggagcttgtgaaggcagaggaagattattgaataataaaatacagttttgaaaaaaatggatgaagaacctgaaagaactaagcgatgggaaggaggctatgaaagaacatgggagattcttaaagaagatgaatctggatcacttaaagctacaatagaagacattctattcaaggcaaagagaaaaagagtatttgagcaccatggacaagttcgacttggaatgatgcgccacctttatgtggtagtagatggatcaagaacaatggaagaccaagatttaaagcctaatagactgacgtgtactttaaaggtaaaatttaagtttatactaaatcatttaaatttgtaccaaaatcacttaaacttttactaaaaaagtggggaagaacactggattctaaaggatatttttaaagaatgcaatattttttattttttgccttgtatttttagttaatgctaatgatagctaagtagaagtactgccaggttatttagggaaattttaaaccaacatagctaattatttgtgtttttaatttctatcctcccaccccacatcaggatcttggtttatcagttatcccttttctttcttgaatcttcattctcctttgccttacttaactctgtctcctcagattacaaatatgttcgtattcctaatttatcaaaacctattctcaattctgctcgttctcccatctctcttcattggatcttttcctcattgaaatttcttctgacacatc

SEQ ID NO: 356540 - DNA, 734 bp, Homo sapiens
tctctctgtttcagacttttattacgttgccatggatttcggaggtcatgggctctcgtcccattacagcccaggtgtcccatattacctccagacttttgtgagtgagatccgaagagttgtggcaggtaagaaacagagtgtgtattttcggcggtgtggggggtgctctagggcaccccctcttatcactggaggcggggtaggatccaggaagcagcgctggcctgagagtggggcctgggctctggccccaggtctgccagcaattcacgggagatcttgggaaagttgaagagttcgcttcctccagtgggtcccccaagctagtgtcctgggtggacaccccagatgctgggaagggatttcctgagcctggggactagaagcaagatcgtgggctgagcctgtgcccagccggaccttctggctccttgcatttccagccttgaaatggaatcgattctccattctgggccacagcttcggtgagtacagtggccaggagctgaccgggcccggagtagggctgggagggaaggataggagctgctgccccacccctttcccctgcacttatgagatctgcaaagagagatgagagggtcagtcagaggttgaccactgtaccctctgacctcaggcaactgccgcaagggacacagggatgagggaaatgtggtcttttgagtggtcaggtctgatgaaggggacatcatggcccagatgctgag

SEQ ID NO: 356541 - DNA, 885 bp, Homo sapiens
agcggctcctgagtgggggcggggactgctggagttgcggggcctgcctggggtagggcggggcaggacagcttggagatagggcccggaattgcgggcgtcactctgctcctgcgacctagccaggcgtgagggagtgacagcagcgcattcgcgggacgagagcgatgagtgagaacgccgcaccagcttctcctgcaaagaggaaccacgaaggtggccacaggtctggttctgaacagagaccagaggctcgcctgggcagagaacagcattgacttcatcagcagggagctgtgtgcgcattccatcaggaagctgcaggcccatgtcctgttgatcaaagcagtccacggatattttgattcaagacagaattactctgagaaggagtccctgtcgttcatgatagacacgatgaaatccaccctcaaagagcagttccagtttgtggaagtcccaggcaatcactgtgtccacatgagcgaaccccagcacgtggccagtatcatcagctccttcttacagtgcacacacatgctcccagcccagctgtagctctgggcctggaactatgaagacctagtgctcccagactcaacactgggactctgagttcctgagccccacaacaaggccagggatggtggggacaggcctcactagtcttgaggcccagcctaggatggtagtcaggggaaggagcgagattccaacttcaacatctgtgacctcaagggggagacagagtctgggttccagggctgctttctcctggctaataataaatatccagccagctggaggaaggaagggcaggctgggcccacctagcctttccctgctgcccaactggatggaaaataaaaggttcttgtattctca

SEQ ID NO: 356542 - DNA, 745 bp, Homo sapiens
tttcttgcaaaggaacatttcacaattttcgtatcacgcttgcacaggggccacgctaatcatctctttgttgttccaatttagcagtatatgtgctgctgaagcaaagcacctaccttctatttatttatttatttagagaccaagtcttactctgtcatccagggtggagtgcggtggcccgagtttggctgcctgcaacttctgccttgtgacgagaattcaccatgtttttgtctctgcaggcagagaacagcattgacttcatcagcagggagctgtgtgcgcattccatcaggaagctgcaggcccatgtcctgttgatcaagtaagtctggacccatccccttcagccacccgccaaggagacatgggcgccaggaatctccgggagggggccctggcatgaggctccaagttctctgcgtgtcgaccacatcgctaaggctcaagatcttttttgggaagcccccctggcagcagggtcatggaaggaggaaggtcagaggaggggagggctcgggcagcaggggatgggccggggctgtcccatgcctttccacaggtgtcagcggggggcatgcccaggtaaggctccataaccagtgagcccagtctcggctgactgcaacctctgtctcctggattcaaacgattctcctgcctcagcctcccgagtagctgggactacaggcgcccgccaccaggcctggcttatttttgtatttttagtagagacgaggtt

SEQ ID NO: 356543 - DNA, 1223 bp, Homo sapiens
ctacaggcgcccgccaccacgcctggcttatttttgtatttttagtagagacgaggtttcgccatgttggccaggctgctctccatctcctgacctcatgatccgcctgcctcggcctcccagtgttgggattacaggcgagagccaccgtgcgtggcccaccatagacgatttttaagccataaaaagaaacgaagcactgacatgggctccagcatggatgagccttgaaaacatcgcactaagtggatgaagtcagacacaaccgtctacgtgttgtatggctgcattcacgttcaagtccaaataggacacacggcagagacaaagccaggtcatggttgctcaggaccggaagcctgttgggggtgggggggtggggtgtgtgtgtgtgtgtgtaagctcagaggtttgcgatttctttgggggcgatgaaaatgtcctgtaattgtgacgatggtctcacaactcaatgtattaaaaaccacagaattgtagactatcaacgggaggattgtgaagacataaattctctctcagagcaagtatgggctccagcgcctgttcagatcccagctctgcttttcagggctgactgtgaccaagtcctgaactccctgtgccccagaaaggctgtgccttcagcattcacttgtgcctggcttgtgccagctgagcatgagctgagattaactgagcctcaaatccaacccagggtcaagggacccagctgtgggagttggggtagcccaggctttggtttctcctcagaggcctgaacccagggcaggatgggggcaccgctgggaggcggttctaagatgaaccccaacaacccccaactcctcactttccagagcagtccacggatattttgattcaagacagaattactctgagaaggagtccctgtcgttcatgatagacacgatgaaatccaccctcaaagaggtaagacggggctcaggcagctggtgtccagccactgtcgcccactctggtcccacctcacccatctcttctcatgcactgggaagaccctgggtctgcccccaggcccaacaagtgaccaccaggatctatcaggcctcatgctccactgtggtcagtccctagaggcctagggacacatgtaatcagaattaaggaaacagagacctttggtggggaacccctgccaggttcaagctactctcgtgcctcagcctcctgagtagctggga

SEQ ID NO: 356544 - DNA, 1223 bp, Homo sapiens
atgagacacaggagcgacacaaacgaaagatgttttttcctcgaccccaaacaccttataacaaaagggggggtggggtgtgtgtgtgtgtgtgtaagctcagaggtttgcgatttctttgggggtgatgaaaatgtaattgtgacgatggtctcacaactcaatgtattaaaaaccacgggattgtagacttttttttttttttttttgagatggagtctggctctgtcgcccaggctggagtgtagtggtgcaatctcagctcactgcaaggtccgcctcccgggttcacgccattctcctgcctcagcctccggagtagctgggactacaggcacccaccaccaagcccggctaatttttgtatttttagtacagacagggtttcaccatgttagccaggatggtctcatctcctgacctcgtgatccacccgcctcagcctcccaaagtgctgggattacaggcgtgagccaccatacccggccaggattgtagactttcaatgggaggattgtgaagacataaattctctctcagagcaagtgtgggctccagcgcctgttcagatcccagctctgctgttcagggctgactgtgaccaagtcctgaactccctgcgccccagcaaggctgtgccttcagcacttgcttgcgcctggcttgtgccagctgagcgtgagctgagattaactgagcctcaaatccaacccagggtcaagggacccagctgtgggagttggggtagcccaggctttggtttctcctcagaggcctgaacccagggcaggatgggggcaccgctgggaggcggttctaagatgaaccccaacaacccccaactcctcactttccagagcagtccacggatattttgattcaagacagaattactctgagaaggagtccctgtcgttcatgatagacacgatgaaatccaccctcaaagaggtaagacggggctcaggcagctggtgtccagccactgtcgcccactctggtcccacctcacccatctcttctcatgcactgggaagaccctgggtctgcccccaggcccaacaagtgaccaccaggatctatcaggcctcatgctccactgtggtcagtccctagaggcctagggacacatgtaatcagaattaaggaaacagagacctttggtggggaacccctgccaggttcaagctactctcgtgcctcagcctcctgagtagctggga

SEQ ID NO: 356545 - DNA, 1165 bp, Homo sapiens
aaaagaacattctggcacgtgggtggagaacagaagcaggggcaagaggagaaggagggcaaccgagtaggagggcctataacagcccaggtctgatctcagagctgaagctggctgtgccctggggccacatcgcagccaaagcctggggctccctgcagggccctccagttctctgcctgcacggctggctggacaatgccagctccttcgacagactcatccctcttctcccgcaagacttttattacgttgccatggatttcggaggtcatgggctctcgtcccattacagcccaggtgtcccatattacctccagacttttgtgagtgagatccgaagagttgtggcagccttgaaatggaatcgattctccattctgggccacagcttcggtggcgtcgtgggcggaatgtttttctgtaccttccccgagatggtggataaacttatcttgctggacacgccgctctttctcctggaatcagatgaaatggagaacttgctgacctacaagcggagagccatagagcacgtgctgcaggtagaggcctcccaggagccctcgcacgtgttcagcctgaagcagctgctgcagaggttactgaagagcaatagccacttgagtgaggagtgcggggagcttctcctgcaaagaggaaccacgaaggtggccacaggtctggttctgaacagagaccagaggctcgcctgggcagagaacagcattgacttcatcagcagggagctgtgtgcgcattccatcaggaagctgcaggcccatgtcctgttgatcaaagcagtccacggatattttgattcaagacagaattactctgagaaggagtccctgtcgttcatgatagacacgatgaaatccaccctcaaagaggtaagacggggctcaggcagctggtgtccagccactgtcgcccactctggtcccacctcacccatctcttctcatgcactgggaagaccctgggtctgcccccaggcccaacaagtgaccaccaggatctatcaggcctcatgctccactgtggtcagtccctagaggcctagggacacatgtaatcagaattaaggaaacagagacctttggtggggaacccctgccaggttcaagctactctcgtgcctcagcctcctgagtagctggga

SEQ ID NO: 356546 - DNA, 132 bp, Homo sapiens
acttttattacgttgccatggatttcggaggtcatgggctctcgtcccattacagcccaggtgtcccatattacctccagacttttgtgagtgagatccgaagagttgtggcaggtaagaaacagagtgtgt

SEQ ID NO: 356547 - DNA, 1439 bp, Homo sapiens
agcggctcctgagtgggggcggggactgctggagttgcggggcctgcctggggtagggcggggcaggacagcttggagatagggcccggaattgcgggcgtcactctgctcctgcgacctagccaggcgtgagggagtgacagcagcgcattcgcgggacgagagcgatgagtgagaacgccgcaccaggtctgatctcagagctgaagctggctgtgccctggggccacatcgcagccaaagcctggggctccctgcagggccctccagttctctgcctgcacggctggctggacaatgccagctccttcgacagactcatccctcttctcccgcaagacttttattacgttgccatggatttcggaggtcatgggctctcgtcccattacagcccaggtgtcccatattacctccagacttttgtgagtgagatccgaagagttgtggcagccttgaaatggaatcgattctccattctgggccacagcttcggtggcgtcgtgggcggaatgtttttctgtaccttccccgagatggtggataaacttatcttgctggacacgccgctctttctcctggaatcagatgaaatggagaacttgctgacctacaagcggagagccatagagcacgtgctgcaggtagaggcctcccaggagccctcgcacgtgttcagcctgaagcagctgctgcagaggttactgaagagcaatagccacttgagtgaggagtgcggggagcttctcctgcaaagaggaaccacgaaggtggccacaggtctggttctgaacagagaccagaggctcgcctgggcagagaacagcattgacttcatcagcagggagctgtgtgcgcattccatcaggaagctgcaggcccatgtcctgttgatcaaagcagtccacggatattttgattcaagacagaattactctgagaaggagtccctgtcgttcatgatagacacgatgaaatccaccctcaaagagcagttccagtttgtggaagtcccaggcaatcactgtgtccacatgagcgaaccccagcacgtggccagtatcatcagctccttcttacagtgcacacacatgctcccagcccagctgtagctctgggcctggaactatgaagacctagtgctcccagactcaacactgggactctgagttcctgagccccacaacaaggccagggatggtggggacaggcctcactagtcttgaggcccagcctaggatggtagtcaggggaaggagcgagattccaacttcaacatctgtgacctcaagggggagacagagtctgggttccagggctgctttctcctggctaataataaatatccagccagctggaggaaggaagggcaggctgggcccacctagcctttccctgctgcccaactggatggaaaataaaaggttcttgtattctca

SEQ ID NO: 356548 - DNA, 1280 bp, Homo sapiens
agcggctcctgagtgggggcggggactgctggagttgcggggcctgcctggggtagggcggggcaggacagcttggagatagggcccggaattgcgggcgtcactctgctcctgcgacctagccaggcgtgagggagtgacagcagcgcattcgcgggacgagagcgatgagtgagaacgccgcaccaggtctgatctcagagctgaagctggctgtgccctggggccacatcgcagccaaagcctggggctccctgcagggccctccagttctctgcctgcacggctggctggacaatgccagctccttcgacagactcatccctcttctcccgcaagacttttattacgttgccatggatttcggaggtcatgggctctcgtcccattacagcccaggtgtcccatattacctccagacttttgtgagtgagatccgaagagttgtggcagccttgaaatggaatcgattctccattctgggccacagcttcggtggcgtcgtgggcggaatgtttttctgtaccttccccgagatggtggataaacttatcttgctggacacgccgctctttctcctggaatcagatgaaatggagaacttgctgacctacaagcggagagccatagagcacgtgctgcaggtagaggcctcccaggagccctcgcacgtgttcagcctgaagcagctgctgcagaggttactgaagagcaatagccacttgagtgaggagtgcggggagcttctcctgcaaagaggaaccacgaaggtggccacaggcagagaacagcattgacttcatcagcagggagctgtgtgcgcattccatcaggaagctgcaggcccatgtcctgttgatcaagtaagtctggacccatccccttcagccacccgccaaggagacatgggcgccaggaatctccgggagggggccctggcatgaggctccaagttctctgcgtgtcgaccacatcgctaaggctcaagatcttttttgggaagcccccctggcagcagggtcatggaaggaggaaggtcagaggaggggagggctcgggcagcaggggatgggccggggctgtcccatgcctttccacaggtgtcagcggggggcatgcccaggtaaggctccataaccagtgagcccagtctcggctgactgcaacctctgtctcctggattcaaacgattctcctgcctcagcctcccgagtagctgggactacaggcgcccgccaccaggcctggcttatttttgtatttttagtagagacgaggtt

SEQ ID NO: 356549 - DNA, 1957 bp, Homo sapiens
tctctctgtttcagacttttattacgttgccatggatttcggaggtcatgggctctcgtcccattacagcccaggtgtcccatattacctccagacttttgtgagtgagatccgaagagttgtggcaggtaagaaacagagtgtgtattttcggcggtgtggggggtgctctagggcaccccctcttatcactggaggcggggtaggatccaggaagcagcgctggcctgagagtggggcctgggctctggccccaggtctgccagcaattcacgggagatcttgggaaagttgaagagttcgcttcctccagtgggtcccccaagctagtgtcctgggtggacaccccagatgctgggaagggatttcctgagcctggggactagaagcaagatcgtgggctgagcctgtgcccagccggaccttctggctccttgcatttccagccttgaaatggaatcgattctccattctgggccacagcttcggtgagtacagtggccaggagctgaccgggcccggagtagggctgggagggaaggataggagctgctgccccacccctttcccctgcacttatgagatctgcaaagagagatgagagggtcagtctgatgaaggggacatcatggcccagatgctgagcccccagccacccatatggtgccccccccccccaactggtgggaagaagctttagggtatgcagctggggagggagtgagggaatgtcacccacagctcttttgtcccccaggtggcgtcgtgggcggaatggtgagtagatggctttgtctggccaactggggctcccttgggtggagtggggaggggagcacaaaggaggaaggagaaggtacctgggacagaaagtgcctcctcctgtcacagtgacagtccttataccaggaagttggtgtaaacggtggagactcctggtagagttcatgtttccacgcccccatacccggtcccaccgcaccctggagtccagccatcaccaaggtctggagctcagtgctgggtgcagacttaggggtggtgggggaaggcacaccatagatagaagattctcctctggcctcttggtcagcaccctccccccagcctaaaagatgtttcggggaactccagggtccccagggaaaggcgggagtgtcctttccttcttccccctattcattctccccttttggcatcctcacatgtttttctgtaccttccccgagatggtggataaacttatcttgctggacacgccgctctttctcctggaatcagatgaaatggagaacttgctgacctacaagcggagagccatagagcacgtgctgcaggtagaggcctcccaggagccctcgcacgtgttcagcctgaagcagctgctgcagaggttactgaagagcaatagccacttgagtgaggagtgcggggagcttctcctgcaaagaggaaccacgaaggtggccacaggtctggttctgaacagagaccagaggctcgcctgggcagagaacagcattgacttcatcagcagggagctgtgtgcgcattccatcaggaagctgcaggcccatgtcctgttgatcaaagcagtccacggatattttgattcaagacagaattactctgagaaggagtccctgtcgttcatgatagacacgatgaaatccaccctcaaagaggtaagacggggctcaggcagctggtgtccagccactgtcgcccactctggtcccacctcacccatctcttctcatgcactgggaagaccctgggtctgcccccaggcccaacaagtgaccaccaggatctatcaggcctcatgctccactgtggtcagtccctagaggcctagggacacatgtaatcagaattaaggaaacagagacctttggtggggaacccctgccaggttcaagctactctcgtgcctcagcctcctgagtagctggga

SEQ ID NO: 356550 - DNA, 1192 bp, Homo sapiens
  misc_feature (1)..(1): n is a, c, g, or t
  misc_feature (50)..(50): n is a, c, g, or t
ngaatcttgagaacattttgttgaatgaaataagccaataataaaaagcnaaatactgtatgatttcatttaaatgaggtatttagagtagtctaaatcatagagacagatagtagaatggtagttgctagacgctggggggaggggaaaagaggagtaattgtataatgggtatagagtttcttttttatgttttgagatggagtctcactctgtcgcccaggttcccaggttagagggcgacgctgcatcctccacctcctgggttcaagcgattctcctgcctcagcctcccgagtagctgggattacagacatgtgccaccacgcccagctaattttgtatttttagtagagacggggtttctccatgttggtcaggctggtctcgaattcccgacctcaggtaatccacctgccttggccccccaattataggtgtgagccacagcacccagccaaaaaagtaattttttttagagtaataatgctataatgttggtgtgattccaacctccagctccccccacccgctgcctgcggttttgtttctgttaaaacgtcacctgatgaaatagaatgaatcctgaaatgcacctctgggatcgggaatggtctgtgtgttatcagctgcgactggttcactgcgtctggacaagcctcatggggactggggattctggccagtgtaatttctgtcaaccacggacgtttgccttcatgtgtagaatttactgttgttatgcaaattatattttcaattataaatgaaacaagtttgcagatattttagaaatcagagaagggaaacatcacccacagtccctctgctggaacagccacagttggccttgtcctacttacgtccttcagtggatgcttctgggtgctggggttctccattcaggacactgcactctcggaggtgggaggagactgggttgcgtctgtgccgacctgggatgcagtttcaggtcagaatcagaagatgtgcaagttacgcatgacacagctttttaaagtgcttttcccctgcactaatcaagagggaggtcagccctcaggtgtgctggacccgggagggactgtgagctgtaagaagtaacgagccccttgaacttcacaagctggccagggagccatatcccgaatgccactgccacttcctcgtggtgcaaggcttgttgggacct

SEQ ID NO: 356551 - DNA, 879 bp, Homo sapiens
gcatctattaggcagaggtggggctttgttcttacccacaattggaagttctctatggagtaaaggcggtatgtgtgccacctgattcctttccccatgtgtatctggttagggtcggccacgtgagatccgcaagcattttagaaggtgggaggggaggtgggagctggctacaggccaggcgttggcgtggttccgtgagtgtgctccagccaggcccaaagcttctcctgcccagagggaccgtttcctccagcgtgggtcgggtgcttctgcgcccggaaagagcgccagctcctccttcgggtgacccagggagcggggctgcaggcaaaggcgcaggcggccaaaaaggtgccaaccgggtcctgtggctttcagttgtctctgcccacccaattcacaccatctttccccctcagccgcctgtcctgggacttcaggctcagcaccaaacgcagcaaaagtaggtgcacagagagcggggtcagctcacgcagcccgagcagaatggctgtgctgccgccccaggcccgcggccaccgctgtgtgtgtggcaggagtcagccccccagcgtggggccccgaagcccgcggtccttccacggggagggccaggcccgcagggcgcagacgatgggggacaggctgcgccagcgctcgcctgaggccccgcacacaaacctcaggcccatgggtccgctccgcggggcaggcgtcgtgggcccaaggaggccaggccaggagtctcggcctcggggttacgcggcggcgggcagctcttccgctccgctcagggtgctgctaacccacagccgagcagcgacccgcaggaccggcagacctcggccgattcacacccagccctacctagccttt

SEQ ID NO: 356552 - DNA, 2658 bp, Homo sapiens
gcatctattaggcagaggtggggctttgttcttacccacaattggaagttctctatggagtaaaggcggtatgtgtgccacctgattcctttccccatgtgtatctggttagggtcggccacgtgagatccgcaagcattttagaaggtgggaggggaggtgggagctggctacaggccaggcgttggcgtggttccgtgagtgtgctccagccaggcccaaagcttctcctgcccagagggaccgtttcctccagcgtgggtcgggtgcttctgcgcccggaaagagcgccagctcctccttcgggtgacccagggagcggggctgcaggcaaaggcgcaggcggccaaaaaggtgccaaccgggtcctgtggctttcagttgtctctgcccacccaattcacaccatctttccccctcagccgcctgtcctgggacttcaggctcagcaccaaacgcagcaaaagtaggtgcacagagagcggggtcagctcacgcagcccgagcagaatggctgtgctgccgccccaggcccgcggccaccgctgtgtgtgtggcaggagtcagccccccagcgtggggccccgaagcccgcggtccttccacggggagggccaggcccgcagggcgcagacgatgggggacaggctgcgccagcgctcgcctgaggccccgcacacaaacctcaggcccatgggtccgctccgcggggcaggcgtcgtgggcccaaggaggccaggccaggagtctcggcctcggggttacgcggcggcgggcagctcttccgctccgctcagggtgctgctaacccacagccgagcagcgacccgcaggaccggcgagaaccccgccactgcctccggccggaagagaacgtgcagagatgtacgtcacttccggggcgtggcgtggcgggcgtggcgtcccgcccctggcggcgtgcctggtgccctgttccgcgtctgtgcgaccgtccgtcccgagcgcgcagccgcggcaggccaggtcagagcagcccaccatgggatggggagggggtggaggctgcaccccgcgcccacccatccaccagcagccgccggagcgccgcgtggtcaccgttgtctttctcggcctcctgctggacctcctggccttcacgctgctgctgcccctgctgcccgggctgttggagagccacggccgtgcccacgaccccctctatggctcctggcagggcggggtggactggtttgccaccgccatcgggatgccagtggagaagaggtacaacagtgtcctgttcggaggtctcattggctcggcattctctgtcctgcagtttctgtgtgcgccactcactggggccacctctgactgcttggggaggcgcccggtgatgctgctgtgcctgatgggtgtggccacctcatatgcagtctgggccacctctcggagctttgcggccttcctggcctccaggctgattgggggcatcagcaaagggaacgtcagcctctccacggccatcgttgctgacctgggctcgcctctggcccgcagtcaaggcatggcggtcattggggtggccttctcactgggcttcaccctgggccctatgctcggagcctccctgcccctggaaatggcaccctggtttgccctgctcttcgcagcctccgacctgctgttcatcttctgcttcctgccagagacgctgcccctggagaaacgggcgccctctatcgccctggggttccgtgatgcggctgatctgctcagccccctggccctgctgcgcttctcggctgtcgctcgtggccaggacccaccctctggagacaggctcagcagcctgcgccgcctgggcctagtctacttcctctacctcttcctgttctcgggcctggagtacacgctgagcttcctcacacaccagcgcttccagttcagtagcctacagcaggggaagatgtttttcctcatcggcctcaccatggccaccatccagggtgcctatgcccggcggatccaccctggcggggaagttgctgccgtgaagcgggccctcctgctgctggtgcccgccttcctcctcatcggctggggacgttctctgcccgtgctgggcctggggctgctgctctactcctttgccgccgccgttgtggtgccctgcctgtcctccgtggtcgctggctatggctcaccagggcagaagggcacggtcatgggtacactgcgcagcctaggtgctctggccagggccgcggggcccctggtggccgcttcagtgtactggctggccggggcccaggcctgcttcaccacgtggtccgggctctttttgctccccttcttcctcctgcagaagctgagttacccggcacagacgctcaaggctgagtagctgagccactgtgcccaggctgtgggcaccaggcagagtgggagcctaggtcaggcccctgcccactgcctgacccccaccccccgccagtccagggagaccctgtgggtgggggccggcccctaagcaggaagctcaggcagctcctccagacttacttactccttcagtgactccgagctgcagcactccaaggctgtcagggcttctgtttgttttttaaactatgtaaccgtttgctgatataagacccgctatgcttcaccctc

SEQ ID NO: 356553 - DNA, 2557 bp, Homo sapiens
gcatctattaggcagaggtggggctttgttcttacccacaattggaagttctctatggagtaaaggcggtatgtgtgccacctgattcctttccccatgtgtatctggttagggtcggccacgtgagatccgcaagcattttagaaggtgggaggggaggtgggagctggctacaggccaggcgttggcgtggttccgtgagtgtgctccagccaggcccaaagcttctcctgcccagagggaccgtttcctccagcgtgggtcgggtgcttctgcgcccggaaagagcgccagctcctccttcgggtgacccagggagcggggctgcaggcaaaggcgcaggcggccaaaaaggtgccaaccgggtcctgtggctttcagttgtctctgcccacccaattcacaccatctttccccctcagccgcctgtcctgggacttcaggctcagcaccaaacgcagcaaaagtaggtgcacagagagcggggtcagctcacgcagcccgagcagaatggctgtgctgccgccccaggcccgcggccaccgctgtgtgtgtggcaggagtcagccccccagcgtggggccccgaagcccgcggtccttccacggggagggccaggcccgcagggcgcagacgatgggggacaggctgcgccagcgctcgcctgaggccccgcacacaaacctcaggcccatgggtccgctccgcggggcaggcgtcgtgggcccaaggaggccaggccaggagtctcggcctcggggttacgcggcggcgggcagctcttccgctccgctcagggtgctgctaacccacagccgagcagcgacccgcaggaccggcgagaaccccgccactgcctccggccggaagagaacgtgcagagatgtacgtcacttccggggcgtggcgtggcgggcgtggcgtcccgcccctggcggcgtgcctggtgccctgttccgcgtctgtgcgaccgtccgtcccgagcgcgcagccgcggcaggccaggtcagagcagcccaccatgggatggggagggggtggaggctgcaccccgcgcccacccatccaccagcagccgccggagcgccgcgtggtcaccgttgtctttctcggcctcctgctggacctcctggccttcacgctgctgctgcccctgctgcccgggctgttggagagccacggccgtgcccacgaccccctctatggctcctggcagggcggggtggactggtttgccaccgccatcgggatgccagtggagaagaggtacaacagtgtcctgttcggaggtctcattggctcggcattctctgtcctgcagtttctgtgtgcgccactcactggggccacctctgactgcttggggaggcgcccggtgatgctgctgtgcctgatgggtgtggccacctcatatgcagtctgggccacctctcggagctttgcggccttcctggcctccaggctgattgggggcatcagcaaagggaacgtcagcctctccacggccatcgttgctgacctgggctcgcctctggcccgcagtcaaggcatggcggtcattggggtggccttctcactgggcttcaccctgggccctatgctcggagcctccctgcccctggaaatggcaccctggtttgccctgctcttcgcagcctccgacctgctgttcatcttctgcttcctgccagagacgctgcccctggagaaacgggcgccctctatcgccctggggttccgtgatgcggctgatctgctcagccccctggccctgctgcgcttctcggctgtcgctcgtggccaggacccaccctctggagacaggctcagcagcctgcgccgcctgggcctagtctacttcctctacctcttcctgttctcgggcctggagtacacgctgagcttcctcacacaccagcgcttccagttcagtaggccctcctgctgctggtgcccgccttcctcctcatcggctggggacgttctctgcccgtgctgggcctggggctgctgctctactcctttgccgccgccgttgtggtgccctgcctgtcctccgtggtcgctggctatggctcaccagggcagaagggcacggtcatgggtacactgcgcagcctaggtgctctggccagggccgcggggcccctggtggccgcttcagtgtactggctggccggggcccaggcctgcttcaccacgtggtccgggctctttttgctccccttcttcctcctgcagaagctgagttacccggcacagacgctcaaggctgagtagctgagccactgtgcccaggctgtgggcaccaggcagagtgggagcctaggtcaggcccctgcccactgcctgacccccaccccccgccagtccagggagaccctgtgggtgggggccggcccctaagcaggaagctcaggcagctcctccagacttacttactccttcagtgactccgagctgcagcactccaaggctgtcagggcttctgtttgttttttaaactatgcaccaggtttctgatgatgaaataaagcacctgtttgttttataccaa

SEQ ID NO: 356554 - DNA, 2589 bp, Homo sapiens
gcatctattaggcagaggtggggctttgttcttacccacaattggaagttctctatggagtaaaggcggtatgtgtgccacctgattcctttccccatgtgtatctggttagggtcggccacgtgagatccgcaagcattttagaaggtgggaggggaggtgggagctggctacaggccaggcgttggcgtggttccgtgagtgtgctccagccaggcccaaagcttctcctgcccagagggaccgtttcctccagcgtgggtcgggtgcttctgcgcccggaaagagcgccagctcctccttcgggtgacccagggagcggggctgcaggcaaaggcgcaggcggccaaaaaggtgccaaccgggtcctgtggctttcagttgtctctgcccacccaattcacaccatctttccccctcagccgcctgtcctgggacttcaggctcagcaccaaacgcagcaaaagtaggtgcacagagagcggggtcagctcacgcagcccgagcagaatggctgtgctgccgccccaggcccgcggccaccgctgtgtgtgtggcaggagtcagccccccagcgtggggccccgaagcccgcggtccttccacggggagggccaggcccgcagggcgcagacgatgggggacaggctgcgccagcgctcgcctgaggccccgcacacaaacctcaggcccatgggtccgctccgcggggcaggcgtcgtgggcccaaggaggccaggccaggagtctcggcctcggggttacgcggcggcgggcagctcttccgctccgctcagggtgctgctaacccacagccgagcagcgacccgcaggaccggcgagaaccccgccactgcctccggccggaagagaacgtgcagagatgtacgtcacttccggggcgtggcgtggcgggcgtggcgtcccgcccctggcggcgtgcctggtgccctgttccgcgtctgtgcgaccgtccgtcccgagcgcgcagccgcggcaggccaggtcagagcagcccaccatgggatggggagggggtggaggctgcaccccgcgcccacccatccaccagcagccgccggagcgccgcgtggtcaccgttgtctttctcggcctcctgctggacctcctggccttcacgctgctgctgcccctgctgcccgggctgttggagagccacggccgtgcccacgaccccctctatggctcctggcagggcggggtggactggtttgccaccgccatcgggatgccagtggagaagaggtacaacagtgtcctgttcggaggtctcattggctcggcattctctgtcctgcagtttctgtgtgcgccactcactggggccacctctgactgcttggggaggcgcccggtgatgctgctgtgcctgatgggtgtggccacctcatatgcagtctgggccacctctcggagctttgcggccttcctggcctccaggctgattgggggcatcagcaaagggaacgtcagcctctccacggccatcgttgctgacctgggctcgcctctggcccgcagtcaaggcatggcggtcattggggtggccttctcactgggcttcaccctgggccctatgctcggagcctccctgcccctggaaatggcaccctggtttgccctgctcttcgcagcctccgacctgctgttcatcttctgcttcctgccagagacgctgcccctggagaaacgggcgccctctatcgccctggggttccgtgatgcggctgatctgctcagccccctggccctgctgcgcttctcggctgtcgctcgtggccaggacccaccctctggagacaggctcagcagcctgcgccgcctgggcctagtctacttcctctacctcttcctgttctcgggcctggagtacacgctgagcttcctcacacaccagcgcttccagttcagtagcctacagcaggggaagatgtttttcctcatcggcctcaccatggccaccatccagggtgcctatgcccggcggatccaccctggcggggaagttgctgccgtgaagcgggccctcctgctgctggtgcccgccttcctcctcatcggctggggacgttctctgcccgtgctgggcctggggctgctgctctactcctttgccgccgccgttgtggtgccctgcctgtcctccgtggtcgctggctatggctcaccagggcagaagggcacggtcatgggtacactgcgcagcctaggtgctctggccagggccgcggggcccctggtggccgcttcagaagctgagttacccggcacagacgctcaaggctgagtagctgagccactgtgcccaggctgtgggcaccaggcagagtgggagcctaggtcaggcccctgcccactgcctgacccccaccccccgccagtccagggagaccctgtgggtgggggccggcccctaagcaggaagctcaggcagctcctccagacttacttactccttcagtgactccgagctgcagcactccaaggctgtcagggcttctgtttgttttttaaactatgcaccaggtttctgatgatgaaataaagcacctgtttgttttataccaa

SEQ ID NO: 356555 - DNA, 4010 bp, Homo sapiens
  misc_feature (11)..(11): n is a, c, g, or t
  misc_feature (13)..(13): n is a, c, g, or t
  misc_feature (21)..(21): n is a, c, g, or t
  misc_feature (42)..(42): n is a, c, g, or t
  misc_feature (49)..(49): n is a, c, g, or t
tccaggttaancntacccccnccggggttatgtagcgaggcngggtggngccgtgtcttagggtagcgcgcgcctgtctctcttcgggtctcgggcccttgggcgcagcggggcgcgcgccatggcgaaggcgaagaaggtcggggcgcgaaggaaggcctccggggcgccggcgggagcgcgagggggcccggcgaaggccaactccaatccgttcgaggtgaaagttaacaggcagaagttccagatcctgggccggaagacgcgccacgacgtgggactgcccggggtgtctcgcgcacgggccctcaggaagcgtacacagactttactaaaagagtacaaagaaagggataaatccaatgtattcagagataaacgcttcggagaatacaacagcaacatgagccccgaggagaagatgatgaagaggtttgctctggaacagcagcgacatcatgagaaaaaaagcatctacaatctaaatgaagatgaagaattgactcattatggccagtctttggcagacatcgagaagcataatgacattgtggacagtgacagcgatgctgaggatcgaggaacgttgtctgctgagctgactgctgcccactttggaggaggcggtgggctccttcacaagaagactcaacaggaaggcgaggagcgggagaaaccgaagtcccggaaagagctgattgaagagctcattgccaagtcaaaacaagagaagagggagagacaagctcaacgagaagatgccctcgagctcacggagaagctagaccaagactggaaagaaattcagactctcctgtcccacaaaactcccaagtcagagaacagagacaaaaaggaaaaacccaagcccgatgcatatgacatgatggttcgcgagcttggctttgaaatgaaggcgcagccctctaacaggatgaagacggaggcagaattggcaaaggaagagcaggagcacctcaggaagctggaggctgagagacttcgaagaatgcttggaaaggatgaggatgaaaatgttaagaaaccaaaacatatgtcagcagatgatctgaatgatggcttcgtgctagataaagatgacaggcgtttgctttcctacaaagatggaaagatgaatgtcgaggaagatgtccaggaagagcaaagcaaggaagccagtgaccctgagagcaacgaggaagaaggtgacagttcaggcggggaggacacagaggagagcgacagcccagatagccacttggacctggaatccaacgtggagagtgaggaagaaaacgagaagccagcaaaagagcagaggcagactcctgggaaagggttgataagcggcaaggaaagagctggaaaagctaccagagacgagctgccctacacgttcgcagcccctgaatcctatgaggaactgagatctctgttgttaggaagatcgatggaagagcagcttttggtggtggagagaattcagaagtgcaaccacccgagtctcgcagaaggaaacaaagcaaaattagaaaaactgtttggctttcttttggaatacgttggcgatttggctacagatgacccaccagacctcacagtcattgataagttggttgtgcacttatatcatctttgccagatgtttcctgaatctgcaagtgacgctatcaaatttgttctccgagatgcgatgcatgagatggaagaaatgattgagaccaaaggccgggcggcattgccagggttggatgtgctcatttatttgaaaatcactgggctgctatttccaacttccgacttctggcacccagtggtgacccctgccctcgtgtgcctcagtcagctgctcaccaagtgccccatcctgtccctccaggacgtggtgaagggcctgttcgtgtgctgcctgttcctggagtatgtggctttgtcccagaggtttatacctgagcttattaattttcttcttgggattctttacatagcaactccaaacaaagcaagccaaggttccactctggtgcaccctttcagagcgcttgggaagaactcggaactgctcgtggtgtctgctagagaggatgtggccacgtggcagcagagcagcctctccctccgctgggcgagtagactgagggccccaacttcgacagaggccaatcacatccgactgtcctgcctggctgtgggcctggccctgctgaagcgctgcgtgctcatgtacgggtccctgccatccttccacgccatcatggggcctctccgagccctcctcacggatcacctggcggactgcagccacccgcaggagctccaggagctgtgtcagagcacactgaccgaaatggaaagccagaagcagctctgccggccgctgacctgtgagaagagcaagcctgtcccactgaagcttttcacaccccggctggtcaaagtcctcgagtttggaagaaaacaaggcagtagtaaggaggaacaggaaaggaagaggctgatccacaaacacaagcgtgaatttaaaggggccgttcgagaaatccgcaaggacaatcagttcctggcgaggatgcaactctcagaaatcatggaacgggatgcggaaagaaagcggaaagtaaagcagctttttaacagcctggctacacaggaaggcgaatggaaggctctgaagaggaaaaagttcaaaaaataaattacattttataaataaggcaaggaactggacattacctcacatctgcaattccaaccctctgggaggccaaggcaggaagattgcttcagcccaggagttcgagaccagcctgggcaacacaggaagaccccgtctctaccaaaaaaacataaaaattagccaagtgtggtggcacgcacctgtagtcccaactactcgggaggctgaagcaggaggactgcttgagctgagtccaaggttacagtgagccgtgattgagccactgcactccagcctcggccacagtgcaagactgtgtcgcttaaaaaaaaatttttttttttgagacggagttttgctcttgttgcccaggctggagtgcaatggcacaacctccacctcctgggttcaagcgattctcctgcctcagcctcccgagtagctgggattacagacatgtgccaccacgcccagctaattttgtatttttagtagagacggggtttctccatgttggtcaggctggtctcgaattcccgacctcaggtaatccacctgccttggccccccaattataggtgtgagccacagcacccagccaaaaaagtaattttttttagagtaataatgctataatgttggtgtgattccaacctccagctccccccacccgctgcctgcggttttgtttctgttaaaacgtcacctgatgaaatagaatgaatcctgaaatgcacctctgggatcgggaatggtctgtgtgttatcagctgcgactggttcactgcgtctggacaagcctcatggggactggggattctggccagtgtaatttctgtcaaccacggacgtttgccttcatgtgtagaatttactgttgttatgcaaattatattttcaattataaatgaaacaagtttgcagatattttagaaatcagagaagggaaacatcacccacagtccctctgctggaacagccacagttggccttgtcctacttacgtccttcagtggatgcttctgggtgctggggttctccattcaggacactgcactctcggaggtgggaggagactgggttgcgtctgtgccgacctgggatgcagtttcaggtcagaatcagaagatgtgcaagttacgcatgacacagctttttaaagtgcttttcccctgcactaatcaagagggaggtcagccctcaggtgtgctggacccgggagggactgtgagctgtaagaagtaacgagccccttgaacttcacaagctggccagggagccatatcccgaatgccactgccacttcctcgtggtgcaaggcttgttgggacct

SEQ ID NO: 356556 - DNA, 3384 bp, Homo sapiens
tccccccctcccccattccgctaggtacgaggctgggtggtgcacgtgtcttagggtagcgcgcgcctgtctctcttcgggtctcgggcccttgggcgcagcggggcgcgcgccatggcgaaggcgaagaaggtcggggcgcgaaggaaggcctccggggcgccggcgggagcgcgagggggcccggcgaaggccaactccaatccgttcgaggtgaaagttaacaggcagaagttccagatcctgggccggaagacgcgccacgacgtgggactgcccggggtgtctcgcgcacgggccctcaggaagcgtacacagactttactaaaagagtacaaagaaagggataaatccaatgtattcagagataaacgcttcggagaatacaacagcaacatgagccccgaggagaagatgatgaagaggtttgctctggaacagcagcgacatcatgagaaaaaaagcatctacaatctaaatgaagatgaagaattgactcattatggccagtctttggcagacatcgagaagcataatgacattgtggacagtgacagcgatgctgaggatcgaggaacgttgtctgctgagctgactgctgcccactttggaggaggcggtgggctccttcacaagaagactcaacaggaaggcgaggagcgggagaaaccgaagtcccggaaagagctgattgaagagctcattgccaagtcaaaacaagagaagagggagagacaagctcaacgagaagatgccctcgagctcacggagaagctagaccaagactggaaagaaattcagactctcctgtcccacaaaactcccaagtcagagaacagagacaaaaaggaaaaacccaagcccgatgcatatgacatgatggttcgcgagcttggctttgaaatgaaggcgcagccctctaacaggatgaagacggaggcagaattggcaaaggaagagcaggagcacctcaggaagctggaggctgagagacttcgaagaatgcttggaaaggatgaggatgaaaatgttaagaaaccaaaacatatgtcagcagatgatctgaatgatggcttcgtgctagataaagatgacaggcgtttgctttcctacaaagatggaaagatgaatgtcgaggaagatgtccaggaagagcaaagcaaggaagccagtgaccctgagagcaacgaggaagaaggtgacagttcaggcggggaggacacagaggagagcgacagcccagatagccacttggacctggaatccaacgtggagagtgaggaagaaaacgagaagccagcaaaagagcagaggcagactcctgggaaagggttgataagcggcaaggaaagagctggaaaagctaccagagacgagctgccctacacgttcgcagcccctgaatcctatgaggaactgagatctctgttgttaggaagatcgatggaagagcagcttttggtggtggagagaattcagaagtgcaaccacccgagtctcgcagaaggaaacaaagcaaaattagaaaaactgtttggctttcttttggaatacgttggcgatttggctacagatgacccaccagacctcacagtcattgataagttggttgtgcacttatatcatctttgccagatgtttcctgaatctgcaagtgacgctatcaaatttgttctccgagatgcgatgcatgagatggaagaaatgattgagaccaaaggccgggcggcattgccagggttggatgtgctcatttatttgaaaatcactgggctgctatttccaacttccgacttctggcacccagtggtgacccctgccctcgtgtgcctcagtcagctgctcaccaagtgccccatcctgtccctccaggacgtggtgaagggcctgttcgtgtgctgcctgttcctggagtatgtggctttgtcccagaggtttatacctgagcttattaattttcttcttgggattctttacatagcaactccaaacaaagcaagccaaggttccactctggtgcaccctttcagagcgcttgggaagaactcggaactgctcgtggtgtctgctagagaggatgtggccacgtggcagcagagcagcctctccctccgctgggcgagtagactgagggccccaacttcgacagaggccaatcacatccgactgtcctgcctggctgtgggcctggccctgctgaagcgctgcgtgctcatgtacgggtccctgccatccttccacgccatcatggggcctctccgagccctcctcacggatcacctggcggactgcagccacccgcaggagctccaggagctgtgtcagagcacactgaccgaaatggaaagccagaagcagctctgccggccgctgacctgtgagaagagcaagcctgtcccactgaagcttttcacaccccggctggtcaaagtcctcgagtttggaagaaaacaaggcagtagtaaggaggaacaggaaaggaagaggctgatccacaaacacaagcgtgaatttaaaggggccgttcgagaaatccgcaaggacaatcagttcctggcgaggatgcaactctcagaaatcatggaacgggatgcggaaagaaagcggaaagtaaagcagctttttaacagcctggctacacaggaaggcgaatggaaggctctgaagaggaaaaagttcaaaaaataaattacattttataaataaggcaactccccccacccgctgcctgcggttttgtttctgttaaaacgtcacctgatgaaatagaatgaatcctgaaatgcacctctgggatcgggaatggtctgtgtgttatcagctgcgactggttcactgcgtctggacaagcctcatggggactggggattctggccagtgtaatttctgtcaaccacggacgtttgccttcatgtgtagaatttactgttgttatgcaaattatattttcaattataaatgaaacaagtttgcagatattttagaaatcagagaagggaaacatcacccacagtccctctgctggaacagccacagttggccttgtcctacttacgtccttcagtggatgcttctgggtgctggggttctccattcaggacactgcactctcggaggtgggaggagactgggttgcgtctgtgccgacctgggatgcagtttcaggtcagaatcagaagatgtgcaagttacgcatgacacagctttttaaagtgcttttcccctgcactaatcaagagggaggtcagccctcaggtgtgctggacccgggagggactgtgagctgtaagaagtaacgagccccttgaacttcacaagctggccagggagccatatcccgaatgccactgccacttcctcgtggtgcaaggcttgttgggacct

SEQ ID NO: 356557 - DNA, 3523 bp, Homo sapiens
tccccccctcccccattccgctaggtacgaggctgggtggtgcacgtgtcttagggtagcgcgcgcctgtctctcttcgggtctcgggcccttgggcgcagcggggcgcgcgccatggcgaaggcgaagaaggtcggggcgcgaaggaaggcctccggggcgccggcgggagcgcgagggggcccggcgaaggccaactccaatccgttcgaggtgaaagttaacaggcagaagttccagatcctgggccggaagacgcgccacgacgtgggactgcccggggtgtctcgcgcacgggccctcaggaagcgtacacagactttactaaaagagtacaaagaaagggataaatccaatgtattcagagataaacgcttcggagaatacaacagcaacatgagccccgaggagaagatgatgaagaggtttgctctggaacagcagcgacatcatgagaaaaaaagcatctacaatctaaatgaagatgaagaattgactcattatggccagtctttggcagacatcgagaagcataatgacattgtggacagtgacagcgatgctgaggatcgaggaacgttgtctgctgagctgactgctgcccactttggaggaggcggtgggctccttcacaagaagactcaacaggaaggcgaggagcgggagaaaccgaagtcccggaaagagctgattgaagagctcattgccaagtcaaaacaagagaagagggagagacaagctcaacgagaagatgccctcgagctcacggagaagctagaccaagactggaaagaaattcagactctcctgtcccacaaaactcccaagtcagagaacagagacaaaaaggaaaaacccaagcccgatgcatatgacatgatggttcgcgagcttggctttgaaatgaaggcgcagccctctaacaggatgaagacggaggcagaattggcaaaggaagagcaggagcacctcaggaagctggaggctgagagacttcgaagaatgcttggaaaggatgaggatgaaaatgttaagaaaccaaaacatatgtcagcagatgatctgaatgatggcttcgtgctagataaagatgacaggcgtttgctttcctacaaagatggaaagatgaatgtcgaggaagatgtccaggaagagcaaagcaaggaagccagtgaccctgagagcaacgaggaagaaggtgacagttcaggcggggaggacacagaggagagcgacagcccagatagccacttggacctggaatccaacgtggagagtgaggaagaaaacgagaagccagcaaaagagcagaggcagactcctgggaaagggttgataagcggcaaggaaagagctggaaaagctaccagagacgagctgccctacacgttcgcagcccctgaatcctatgaggaactgagatctctgttgttaggaagatcgatggaagagcagcttttggtggtggagagaattcagaagtgcaaccacccgagtctcgcagaaggaaacaaagcaaaattagaaaaactgtttggctttcttttggaatacgttggcgatttggctacagatgacccaccagacctcacagtcattgataagttggttgtgcacttatatcatctttgccagatgtttcctgaatctgcaagtgacgctatcaaatttgttctccgagatgcgatgcatgagatggaagaaatgattgagaccaaaggccgggcggcattgccagggttggatgtgctcatttatttgaaaatcactgggctgctatttccaacttccgacttctggcacccagtggtgacccctgccctcgtgtgcctcagtcagctgctcaccaagtgccccatcctgtccctccaggacgtggtgaagggcctgttcgtgtgctgcctgttcctggagtatgtggctttgtcccagaggtttatacctgagcttattaattttcttcttgggattctttacatagcaactccaaacaaagcaagccaaggttccactctggtgcaccctttcagagcgcttgggaagaactcggaactgctcgtggtgtctgctagagaggatgtggccacgtggcagcagagcagcctctccctccgctgggcgagtagactgagggccccaacttcgacagaggccaatcacatccgactgtcctgcctggctgtgggcctggccctgctgaagcgctgcgtgctcatgtacgggtccctgccatccttccacgccatcatggggcctctccgagccctcctcacggatcacctggcggactgcagccacccgcaggagctccaggagctgtgtcagagcacactgaccgaaatggaaagccagaagcagctctgccggccgctgacctgtgagaagagcaagcctgtcccactgaagcttttcacaccccggctggtcaaagtcctcgagtttggaagaaaacaaggcagtagtaaggaggaacaggaaaggaagaggctgatccacaaacacaagcgtgaatttaaaggggccgttcgagaaatccgcaaggacaatcagttcctggcgaggatgcaactctcagaaatcatggaacgggatgcggaaagaaagcggaaagtaaagcagctttttaacagcctggctacacaggaaggcgaatggaaggctctgaagaggaaaaagttcaaaaaataaattacattttataaataaggcaagctggtctcgaattcccgacctcaggtaatccacctgccttggccccccaattataggtgtgagccacagcacccagccaaaaaagtaattttttttagagtaataatgctataatgttggtgtgattccaacctccagctccccccacccgctgcctgcggttttgtttctgttaaaacgtcacctgatgaaatagaatgaatcctgaaatgcacctctgggatcgggaatggtctgtgtgttatcagctgcgactggttcactgcgtctggacaagcctcatggggactggggattctggccagtgtaatttctgtcaaccacggacgtttgccttcatgtgtagaatttactgttgttatgcaaattatattttcaattataaatgaaacaagtttgcagatattttagaaatcagagaagggaaacatcacccacagtccctctgctggaacagccacagttggccttgtcctacttacgtccttcagtggatgcttctgggtgctggggttctccattcaggacactgcactctcggaggtgggaggagactgggttgcgtctgtgccgacctgggatgcagtttcaggtcagaatcagaagatgtgcaagttacgcatgacacagctttttaaagtgcttttcccctgcactaatcaagagggaggtcagccctcaggtgtgctggacccgggagggactgtgagctgtaagaagtaacgagccccttgaacttcacaagctggccagggagccatatcccgaatgccactgccacttcctcgtggtgcaaggcttgttgggacct

SEQ ID NO: 356558 - DNA, 3561 bp, Homo sapiens
tccccccctcccccattccgctaggtacgaggctgggtggtgcacgtgtcttagggtagcgcgcgcctgtctctcttcgggtctcgggcccttgggcgcagcggggcgcgcgccatggcgaaggcgaagaaggtcggggcgcgaaggaaggcctccggggcgccggcgggagcgcgagggggcccggcgaaggccaactccaatccgttcgaggtgaaagttaacaggcagaagttccagatcctgggccggaagacgcgccacgacgtgggactgcccggggtgtctcgcgcacgggccctcaggaagcgtacacagactttactaaaagagtacaaagaaagggataaatccaatgtattcagagataaacgcttcggagaatacaacagcaacatgagccccgaggagaagatgatgaagaggtttgctctggaacagcagcgacatcatgagaaaaaaagcatctacaatctaaatgaagatgaagaattgactcattatggccagtctttggcagacatcgagaagcataatgacattgtggacagtgacagcgatgctgaggatcgaggaacgttgtctgctgagctgactgctgcccactttggaggaggcggtgggctccttcacaagaagactcaacaggaaggcgaggagcgggagaaaccgaagtcccggaaagagctgattgaagagctcattgccaagtcaaaacaagagaagagggagagacaagctcaacgagaagatgccctcgagctcacggagaagctagaccaagactggaaagaaattcagactctcctgtcccacaaaactcccaagtcagagaacagagacaaaaaggaaaaacccaagcccgatgcatatgacatgatggttcgcgagcttggctttgaaatgaaggcgcagccctctaacaggatgaagacggaggcagaattggcaaaggaagagcaggagcacctcaggaagctggaggctgagagacttcgaagaatgcttggaaaggatgaggatgaaaatgttaagaaaccaaaacatatgtcagcagatgatctgaatgatggcttcgtgctagataaagatgacaggcgtttgctttcctacaaagatggaaagatgaatgtcgaggaagatgtccaggaagagcaaagcaaggaagccagtgaccctgagagcaacgaggaagaaggtgacagttcaggcggggaggacacagaggagagcgacagcccagatagccacttggacctggaatccaacgtggagagtgaggaagaaaacgagaagccagcaaaagagcagaggcagactcctgggaaagggttgataagcggcaaggaaagagctggaaaagctaccagagacgagctgccctacacgttcgcagcccctgaatcctatgaggaactgagatctctgttgttaggaagatcgatggaagagcagcttttggtggtggagagaattcagaagtgcaaccacccgagtctcgcagaaggaaacaaagcaaaattagaaaaactgtttggctttcttttggaatacgttggcgatttggctacagatgacccaccagacctcacagtcattgataagttggttgtgcacttatatcatctttgccagatgtttcctgaatctgcaagtgacgctatcaaatttgttctccgagatgcgatgcatgagatggaagaaatgattgagaccaaaggccgggcggcattgccagggttggatgtgctcatttatttgaaaatcactgggctgctatttccaacttccgacttctggcacccagtggtgacccctgccctcgtgtgcctcagtcagctgctcaccaagtgccccatcctgtccctccaggacgtggtgaagggcctgttcgtgtgctgcctgttcctggagtatgtggctttgtcccagaggtttatacctgagcttattaattttcttcttgggattctttacatagcaactccaaacaaagcaagccaaggttccactctggtgcaccctttcagagcgcttgggaagaactcggaactgctcgtggtgtctgctagagaggatgtggccacgtggcagcagagcagcctctccctccgctgggcgagtagactgagggccccaacttcgacagaggccaatcacatccgactgtcctgcctggctgtgggcctggccctgctgaagcgctgcgtgctcatgtacgggtccctgccatccttccacgccatcatggggcctctccgagccctcctcacggatcacctggcggactgcagccacccgcaggagctccaggagctgtgtcagagcacactgaccgaaatggaaagccagaagcagctctgccggccgctgacctgtgagaagagcaagcctgtcccactgaagcttttcacaccccggctggtcaaagtcctcgagtttggaagaaaacaaggcagtagtaaggaggaacaggaaaggaagaggctgatccacaaacacaagcgtgaatttaaaggggccgttcgagaaatccgcaaggacaatcagttcctggcgaggatgcaactctcagaaatcatggaacgggatgcggaaagaaagcggaaagtaaagcagctttttaacagcctggctacacaggaaggcgaatggaaggctctgaagaggaaaaagttcaaaaaataaattacattttataaataaggcaaggaactggacattacctcacatctgcaattccaaccctgctggtctcgaattcccgacctcaggtaatccacctgccttggccccccaattataggtgtgagccacagcacccagccaaaaaagtaattttttttagagtaataatgctataatgttggtgtgattccaacctccagctccccccacccgctgcctgcggttttgtttctgttaaaacgtcacctgatgaaatagaatgaatcctgaaatgcacctctgggatcgggaatggtctgtgtgttatcagctgcgactggttcactgcgtctggacaagcctcatggggactggggattctggccagtgtaatttctgtcaaccacggacgtttgccttcatgtgtagaatttactgttgttatgcaaattatattttcaattataaatgaaacaagtttgcagatattttagaaatcagagaagggaaacatcacccacagtccctctgctggaacagccacagttggccttgtcctacttacgtccttcagtggatgcttctgggtgctggggttctccattcaggacactgcactctcggaggtgggaggagactgggttgcgtctgtgccgacctgggatgcagtttcaggtcagaatcagaagatgtgcaagttacgcatgacacagctttttaaagtgcttttcccctgcactaatcaagagggaggtcagccctcaggtgtgctggacccgggagggactgtgagctgtaagaagtaacgagccccttgaacttcacaagctggccagggagccatatcccgaatgccactgccacttcctcgtggtgcaaggcttgttgggacct

SEQ ID NO: 356559 - DNA, 2863 bp, Homo sapiens
gcatctattaggcagaggtggggctttgttcttacccacaattggaagttctctatggagtaaaggcggtatgtgtgccacctgattcctttccccatgtgtatctggttagggtcggccacgtgagatccgcaagcattttagaaggtgggaggggaggtgggagctggctacaggccaggcgttggcgtggttccgtgagtgtgctccagccaggcccaaagcttctcctgcccagagggaccgtttcctccagcgtgggtcgggtgcttctgcgcccggaaagagcgccagctcctccttcgggtgacccagggagcggggctgcaggcaaaggcgcaggcggccaaaaaggtgccaaccgggtcctgtggctttcagttgtctctgcccacccaattcacaccatctttccccctcagccgcctgtcctgggacttcaggctcagcaccaaacgcagcaaaagtaggtgcacagagagcggggtcagctcacgcagcccgagcagaatggctgtgctgccgccccaggcccgcggccaccgctgtgtgtgtggcaggagtcagccccccagcgtggggccccgaagcccgcggtccttccacggggagggccaggcccgcagggcgcagacgatgggggacaggctgcgccagcgctcgcctgaggccccgcacacaaacctcaggcccatgggtccgctccgcggggcaggcgtcgtgggcccaaggaggccaggccaggagtctcggcctcggggttacgcggcggcgggcagctcttccgctccgctcagggtgctgctaacccacagccgagcagcgacccgcaggaccggcgagaaccccgccactgcctccggccggaagagaacgtgcagagatgtacgtcacttccggggcgtggcgtggcgggcgtggcgtcccgcccctggcggcgtgcctggtgccctgttccgcgtctgtgcgaccgtccgtcccgagcgcgcagccgcggcaggccaggtcagagcagcccaccatgggatggggagggggtggaggctgcaccccgcgcccacccatccaccagcagccgccggagcgccgcgtggtcaccgttgtctttctcggcctcctgctggacctcctggccttcacgctgctgctgcccctgctgcccgggctgttggagagccacggccgtgcccacgaccccctctatggctcctggcagggcggggtggactggtttgccaccgccatcgggatgccagtggagaagaggtacaacagtgtcctgttcggaggtctcattggctcggcattctctgtcctgcagtttctgtgtgcgccactcactggggccacctctgactgcttggggaggcgcccggtgatgctgctgtgcctgatgggtgtggccacctcatatgcagtctgggccacctctcggagctttgcggccttcctggcctccaggctgattgggggcatcagcaaagggaacgtcagcctctccacggccatcgttgctgacctgggctcgcctctggcccgcagtcaaggcatggcggtcattggggtggccttctcactgggcttcaccctgggccctatgctcggagcctccctgcccctggaaatggcaccctggtttgccctgctcttcgcagcctccgacctgctgttcatcttctgcttcctgccagagacgctgcccctggagaaacgggtagggctgtggtctgggacccacaggcctaggggctggaggcttgattccatagcgatgtaaagtgcccctgtgtgccagccccagatgccagggaggctgggccgctctcttggtgttgggacccttgaggccacagtccgtgggttgccaggccagcagccgctcctgcaggctctccaatgccatccccacaggcgccctctatcgccctggggttccgtgatgcggctgatctgctcagccccctggccctgctgcgcttctcggctgtcgctcgtggccaggacccaccctctggagacaggctcagcagcctgcgccgcctgggcctagtctacttcctctacctcttcctgttctcgggcctggagtacacgctgagcttcctcacacaccagcgcttccagttcagtagcctacagcaggggaagatgtttttcctcatcggcctcaccatggccaccatccagggtgcctatgcccggcggatccaccctggcggggaagttgctgccgtgaagcgggccctcctgctgctggtgcccgccttcctcctcatcggctggggacgttctctgcccgtgctgggcctggggctgctgctctactcctttgccgccgccgttgtggtgccctgcctgtcctccgtggtcgctggctatggctcaccagggcagaagggcacggtcatgggtacactgcgcagcctaggtgctctggccagggccgcggggcccctggtggccgcttcagtgtactggctggccggggcccaggcctgcttcaccacgtggtccgggctctttttgctccccttcttcctcctgcagaagctgagttacccggcacagacgctcaaggctgagtagctgagccactgtgcccaggctgtgggcaccaggcagagtgggagcctaggtcaggcccctgcccactgcctgacccccaccccccgccagtccagggagaccctgtgggtgggggccggcccctaagcaggaagctcaggcagctcctccagacttacttactccttcagtgactccgagctgcagcactccaaggctgtcagggcttctgtttgttttttaaactatgcaccaggtttctgatgatgaaataaagcacctgtttgttttataccaa

SEQ ID NO: 356560 - DNA, 2703 bp, Homo sapiens
gcatctattaggcagaggtggggctttgttcttacccacaattggaagttctctatggagtaaaggcggtatgtgtgccacctgattcctttccccatgtgtatctggttagggtcggccacgtgagatccgcaagcattttagaaggtgggaggggaggtgggagctggctacaggccaggcgttggcgtggttccgtgagtgtgctccagccaggcccaaagcttctcctgcccagagggaccgtttcctccagcgtgggtcgggtgcttctgcgcccggaaagagcgccagctcctccttcgggtgacccagggagcggggctgcaggcaaaggcgcaggcggccaaaaaggtgccaaccgggtcctgtggctttcagttgtctctgcccacccaattcacaccatctttccccctcagccgcctgtcctgggacttcaggctcagcaccaaacgcagcaaaagtaggtgcacagagagcggggtcagctcacgcagcccgagcagaatggctgtgctgccgccccaggcccgcggccaccgctgtgtgtgtggcaggagtcagccccccagcgtggggccccgaagcccgcggtccttccacggggagggccaggcccgcagggcgcagacgatgggggacaggctgcgccagcgctcgcctgaggccccgcacacaaacctcaggcccatgggtccgctccgcggggcaggcgtcgtgggcccaaggaggccaggccaggagtctcggcctcggggttacgcggcggcgggcagctcttccgctccgctcagggtgctgctaacccacagccgagcagcgacccgcaggaccggcgagaaccccgccactgcctccggccggaagagaacgtgcagagatgtacgtcacttccggggcgtggcgtggcgggcgtggcgtcccgcccctggcggcgtgcctggtgccctgttccgcgtctgtgcgaccgtccgtcccgagcgcgcagccgcggcaggccaggtcagagcagcccaccatgggatggggagggggtggaggctgcaccccgcgcccacccatccaccagcagccgccggagcgccgcgtggtcaccgttgtctttctcggcctcctgctggacctcctggccttcacgctgctgctgcccctgctgcccgggctgttggagagccacggccgtgcccacgaccccctctatggctcctggcagggcggggtggactggtttgccaccgccatcgggatgccagtggagaagaggtacaacagtgtcctgttcggaggtctcattggctcggcattctctgtcctgcagtttctgtgtgcgccactcactggggccacctctgactgcttggggaggcgcccggtgatgctgctgtgcctgcgaccgcccctgcctcttggcccctgcccctgggcagatgggtgtggccacctcatatgcagtctgggccacctctcggagctttgcggccttcctggcctccaggctgattgggggcatcagcaaagggaacgtcagcctctccacggccatcgttgctgacctgggctcgcctctggcccgcagtcaaggcatggcggtcattggggtggccttctcactgggcttcaccctgggccctatgctcggagcctccctgcccctggaaatggcaccctggtttgccctgctcttcgcagcctccgacctgctgttcatcttctgcttcctgccagagacgctgcccctggagaaacgggcgccctctatcgccctggggttccgtgatgcggctgatctgctcagccccctggccctgctgcgcttctcggctgtcgctcgtggccaggacccaccctctggagacaggctcagcagcctgcgccgcctgggcctagtctacttcctctacctcttcctgttctcgggcctggagtacacgctgagcttcctcacacaccagcgcttccagttcagtagcctacagcaggggaagatgtttttcctcatcggcctcaccatggccaccatccagggtgcctatgcccggcggatccaccctggcggggaagttgctgccgtgaagcgggccctcctgctgctggtgcccgccttcctcctcatcggctggggacgttctctgcccgtgctgggcctggggctgctgctctactcctttgccgccgccgttgtggtgccctgcctgtcctccgtggtcgctggctatggctcaccagggcagaagggcacggtcatgggtacactgcgcagcctaggtgctctggccagggccgcggggcccctggtggccgcttcagtgtactggctggccggggcccaggcctgcttcaccacgtggtccgggctctttttgctccccttcttcctcctgcagaagctgagttacccggcacagacgctcaaggctgagtagctgagccactgtgcccaggctgtgggcaccaggcagagtgggagcctaggtcaggcccctgcccactgcctgacccccaccccccgccagtccagggagaccctgtgggtgggggccggcccctaagcaggaagctcaggcagctcctccagacttacttactccttcagtgactccgagctgcagcactccaaggctgtcagggcttctgtttgttttttaaactatgcaccaggtttctgatgatgaaataaagcacctgtttgttttataccaa

SEQ ID NO: 356561 - DNA, 3300 bp, Homo sapiens
tgtgtctgttattttttccccagagggagagacaagctcaacgagaagatgccctcgagctcacggagaagctagaccaagactggaaagaaattcagactctcctgtcccacaaaactcccaagtcagagaacagagacaaaaaggaaaaacccaagcccgatgcatatgacatgatggttcgcgagcttggctttgaaatgaaggcgcagccctctaacaggatgaagacggaggcagaattggcaaaggaagagcaggagcacctcaggaagctggaggctgagagacttcgaagaatgcttggaaaggatgaggatgaaaatgttaagaaaccaaaacatatgtcagcagatgatctgaatgatggcttcgtgctagataaagatgacaggcgtttgctttcctacaaagatggaaagatgaatgtcgaggaagatgtccaggaagagcaaagcaaggaagccagtgaccctgagagcaacgaggaagaaggtgacagttcaggcggggaggacacagaggagagcgacagcccagatagccacttggacctggaatccaacgtggagagtgaggaagaaaacgagaagccagcaaaagagcagaggcagactcctgggaaagggttgataagcggcaaggaaagagctggaaaagctaccagagacgagctgccctacacgttcgcagcccctgaatcctatgaggaactgagatctctgttgttaggaagatcgatggaagagcagcttttggtggtggagagaattcagaagtgcaaccacccgagtctcgcagaaggaaacaaagcaaaattagaaaaactgtttggctttcttttggaatacgttggcgatttggctacagatgacccaccagacctcacagtcattgataagttggttgtgcacttatatcatctttgccagatgtttcctgaatctgcaagtgacgctatcaaatttgttctccgagatgcgatgcatgagatggaagaaatgattgagaccaaaggccgggcggcattgccagggttggatgtgctcatttatttgaaaatcactgggctgctatttccaacttccgacttctggcacccagtggtgacccctgccctcgtgtgcctcagtcagctgctcaccaagtgccccatcctgtccctccaggacgtggtgaagggcctgttcgtgtgctgcctgttcctggagtatgtggctttgtcccagaggtttatacctgagcttattaattttcttcttgggattctttacatagcaactccaaacaaagcaagccaaggttccactctggtgcaccctttcagagcgcttgggaagaactcggaactgctcgtggtgtctgctagagaggatgtggccacgtggcagcagagcagcctctccctccgctgggcgagtagactgagggccccaacttcgacagaggccaatcacatccgactgtcctgcctggctgtgggcctggccctgctgaagcgctgcgtgctcatgtacgggtccctgccatccttccacgccatcatggggcctctccgagccctcctcacggatcacctggcggactgcagccacccgcaggagctccaggagctgtgtcagagcacactgaccgaaatggaaagccagaagcagctctgccggccgctgacctgtgagaagagcaagcctgtcccactgaagcttttcacaccccggctggtcaaagtcctcgagtttggaagaaaacaaggcagtagtaaggaggaacaggaaaggaagaggctgatccacaaacacaagcgtgaatttaaaggggccgttcgagaaatccgcaaggacaatcagttcctggcgaggatgcaactctcagaaatcatggaacgggatgcggaaagaaagcggaaagtaaagcagctttttaacagcctggctacacaggaaggcgaatggaaggctctgaagaggaaaaagttcaaaaaataaattacattttataaataaggcaaggaactggacattacctcacatctgcaattccaaccctctgggaggccaaggcaggaagattgcttcagcccaggagttcgagaccagcctgggcaacacaggaagaccccgtctctaccaaaaaaacataaaaattagccaagtgtggtggcacgcacctgtagtcccaactactcgggaggctgaagcaggaggactgcttgagctgagtccaaggttacagtgagccgtgattgagccactgcactccagcctcggccacagtgcaagactgtgtcgcttaaaaaaaaatttttttttttgagacggagttttgctcttgttgcccaggctggagtgcaatggcacaacctccacctcctgggttcaagcgattctcctgcctcagcctcccgagtagctgggattacagacatgtgccaccacgcccagctaattttgtatttttagtagagacggggtttctccatgttggtcaggctggtctcgaattcccgacctcaggtaatccacctgccttggccccccaattataggtgtgagccacagcacccagccaaaaaagtaattttttttagagtaataatgctataatgttggtgtgattccaacctccagctccccccacccgctgcctgcggttttgtttctgttaaaacgtcacctgatgaaatagaatgaatcctgaaatgcacctctgggatcgggaatggtctgtgtgttatcagctgcgactggttcactgcgtctggacaagcctcatggggactggggattctggccagtgtaatttctgtcaaccacggacgtttgccttcatgtgtagaatttactgttgttatgcaaattatattttcaattataaatgaaacaagtttgcagatattttagaaatcagagaagggaaacatcacccacagtccctctgctggaacagccacagttggccttgtcctacttacgtccttcagtggatgcttctgggtgctggggttctccattcaggacactgcactctcggaggtgggaggagactgggttgcgtctgtgccgacctgggatgcagtttcaggtcagaatcagaagatgtgcaagttacgcatgacacagctttttaaagtgcttttcccctgcactaatcaagagggaggtcagccctcaggtgtgctggacccgggagggactgtgagctgtaagaagtaacgagccccttgaacttcacaagctggccagggagccatatcccgaatgccactgccacttcctcgtggtgcaaggcttgttgggacct

SEQ ID NO: 356562 - DNA, 2598 bp, Homo sapiens
gcatctattaggcagaggtggggctttgttcttacccacaattggaagttctctatggagtaaaggcggtatgtgtgccacctgattcctttccccatgtgtatctggttagggtcggccacgtgagatccgcaagcattttagaaggtgggaggggaggtgggagctggctacaggccaggcgttggcgtggttccgtgagtgtgctccagccaggcccaaagcttctcctgcccagagggaccgtttcctccagcgtgggtcgggtgcttctgcgcccggaaagagcgccagctcctccttcgggtgacccagggagcggggctgcaggcaaaggcgcaggcggccaaaaaggtgccaaccgggtcctgtggctttcagttgtctctgcccacccaattcacaccatctttccccctcagccgcctgtcctgggacttcaggctcagcaccaaacgcagcaaaagtaggtgcacagagagcggggtcagctcacgcagcccgagcagaatggctgtgctgccgccccaggcccgcggccaccgctgtgtgtgtggcaggagtcagccccccagcgtggggccccgaagcccgcggtccttccacggggagggccaggcccgcagggcgcagacgatgggggacaggctgcgccagcgctcgcctgaggccccgcacacaaacctcaggcccatgggtccgctccgcggggcaggcgtcgtgggcccaaggaggccaggccaggagtctcggcctcggggttacgcggcggcgggcagctcttccgctccgctcagggtgctgctaacccacagccgagcagcgacccgcaggaccggcgagaaccccgccactgcctccggccggaagagaacgtgcagagatgtacgtcacttccggggcgtggcgtggcgggcgtggcgtcccgcccctggcggcgtgcctggtgccctgttccgcgtctgtgcgaccgtccgtcccgagcgcgcagccgcggcaggccaggtcagagcagcccaccatgggatggggagggggtggaggctgcaccccgcgcccacccatccaccagcagccgccggagcgccgcgtggtcaccgttgtctttctcggcctcctgctggacctcctggccttcacgctgctgctgcccctgctgcccgggctgttggagagccacggccgtgcccacgaccccctctatggctcctggcagggcggggtggactggtttgccaccgccatcgggatgccagtggagaagaggtacaacagtgtcctgttcggaggtctcattggctcggcattctctgtcctgcagtttctgtgtgcgccactcactggggccacctctgactgcttggggaggcgcccggtgatgctgctgtgcctggctgattgggggcatcagcaaagggaacgtcagcctctccacggccatcgttgctgacctgggctcgcctctggcccgcagtcaaggcatggcggtcattggggtggccttctcactgggcttcaccctgggccctatgctcggagcctccctgcccctggaaatggcaccctggtttgccctgctcttcgcagcctccgacctgctgttcatcttctgcttcctgccagagacgctgcccctggagaaacgggcgccctctatcgccctggggttccgtgatgcggctgatctgctcagccccctggccctgctgcgcttctcggctgtcgctcgtggccaggacccaccctctggagacaggctcagcagcctgcgccgcctgggcctagtctacttcctctacctcttcctgttctcgggcctggagtacacgctgagcttcctcacacaccagcgcttccagttcagtagcctacagcaggggaagatgtttttcctcatcggcctcaccatggccaccatccagggtgcctatgcccggcggatccaccctggcggggaagttgctgccgtgaagcgggccctcctgctgctggtgcccgccttcctcctcatcggctggggacgttctctgcccgtgctgggcctggggctgctgctctactcctttgccgccgccgttgtggtgccctgcctgtcctccgtggtcgctggctatggctcaccagggcagaagggcacggtcatgggtacactgcgcagcctaggtgctctggccagggccgcggggcccctggtggccgcttcagtgtactggctggccggggcccaggcctgcttcaccacgtggtccgggctctttttgctccccttcttcctcctgcagaagctgagttacccggcacagacgctcaaggctgagtagctgagccactgtgcccaggctgtgggcaccaggcagagtgggagcctaggtcaggcccctgcccactgcctgacccccaccccccgccagtccagggagaccctgtgggtgggggccggcccctaagcaggaagctcaggcagctcctccagacttacttactccttcagtgactccgagctgcagcactccaaggctgtcagggcttctgtttgttttttaaactatgcaccaggtttctgatgatgaaataaagcacctgtttgttttataccaa

SEQ ID NO: 356563 - DNA, 3964 bp, Homo sapiens
tccccccctcccccattccgctaggtacgaggctgggtggtgcacgtgtcttagggtagcgcgcgcctgtctctcttcgggtctcgggcccttgggcgcagcggggcgcgcgccatggcgaaggcgaagaaggtcggggcgcgaaggaaggcctccggggcgccggcgggagcgcgagggggcccggcgaaggccaactccaatccgttcgaggtgaaagttaacaggcagaagttccagatcctgggccggaagacgcgccacgacgtgggactgcccggggtgtctcgcgcacgggccctcaggaagcgtacacagactttactaaaagagtacaaagaaagggataaatccaatgtattcagagataaacgcttcggagaatacaacagcaacatgagccccgaggagaagatgatgaagaggtttgctctggaacagcagcgacatcatgagaaaaaaagcatctacaatctaaatgaagatgaagaattgactcattatggccagtctttggcagacatcgagaagcataatgacattgtggacagtgacagcgatgctgaggatcgaggaacgttgtctgctgagctgactgctgcccactttggaggaggcggtgggctccttcacaagaagactcaacaggaaggcgaggagcgggagaaaccgaagtcccggaaagagctgattgaagagctcattgccaagtcaaaacaagagaagagggagagacaagctcaacgagaagatgccctcgagctcacggagaagctagaccaagactggaaagaaattcagactctcctgtcccacaaaactcccaagtcagagaacagagacaaaaaggaaaaacccaagcccgatgcatatgacatgatggttcgcgagcttggctttgaaatgaaggcgcagccctctaacaggatgaagacggaggcagaattggcaaaggaagagcaggagcacctcaggaagctggaggctgagagacttcgaagaatgcttggaaaggatgaggatgaaaatgttaagaaaccaaaacatatgtcagcagatgatctgaatgatggcttcgtgctagataaagatgacaggcgtttgctttcctacaaagatggaaagatgaatgtcgaggaagatgtccaggaagagcaaagcaaggaagccagtgaccctgagagcaacgaggaagaaggtgacagttcaggcggggaggacacagaggagagcgacagcccagatagccacttggacctggaatccaacgtggagagtgaggaagaaaacgagaagccagcaaaagagcagaggcagactcctgggaaagggttgataagcggcaaggaaagagctggaaaagctaccagagacgagctgccctacacgttcgcaggaagatcgatggaagagcagcttttggtggtggagagaattcagaagtgcaaccacccgagtctcgcagaaggaaacaaagcaaaattagaaaaactgtttggctttcttttggaatacgttggcgatttggctacagatgacccaccagacctcacagtcattgataagttggttgtgcacttatatcatctttgccagatgtttcctgaatctgcaagtgacgctatcaaatttgttctccgagatgcgatgcatgagatggaagaaatgattgagaccaaaggccgggcggcattgccagggttggatgtgctcatttatttgaaaatcactgggctgctatttccaacttccgacttctggcacccagtggtgacccctgccctcgtgtgcctcagtcagctgctcaccaagtgccccatcctgtccctccaggacgtggtgaagggcctgttcgtgtgctgcctgttcctggagtatgtggctttgtcccagaggtttatacctgagcttattaattttcttcttgggattctttacatagcaactccaaacaaagcaagccaaggttccactctggtgcaccctttcagagcgcttgggaagaactcggaactgctcgtggtgtctgctagagaggatgtggccacgtggcagcagagcagcctctccctccgctgggcgagtagactgagggccccaacttcgacagaggccaatcacatccgactgtcctgcctggctgtgggcctggccctgctgaagcgctgcgtgctcatgtacgggtccctgccatccttccacgccatcatggggcctctccgagccctcctcacggatcacctggcggactgcagccacccgcaggagctccaggagctgtgtcagagcacactgaccgaaatggaaagccagaagcagctctgccggccgctgacctgtgagaagagcaagcctgtcccactgaagcttttcacaccccggctggtcaaagtcctcgagtttggaagaaaacaaggcagtagtaaggaggaacaggaaaggaagaggctgatccacaaacacaagcgtgaatttaaaggggccgttcgagaaatccgcaaggacaatcagttcctggcgaggatgcaactctcagaaatcatggaacgggatgcggaaagaaagcggaaagtaaagcagctttttaacagcctggctacacaggaaggcgaatggaaggctctgaagaggaaaaagttcaaaaaataaattacattttataaataaggcaaggaactggacattacctcacatctgcaattccaaccctctgggaggccaaggcaggaagattgcttcagcccaggagttcgagaccagcctgggcaacacaggaagaccccgtctctaccaaaaaaacataaaaattagccaagtgtggtggcacgcacctgtagtcccaactactcgggaggctgaagcaggaggactgcttgagctgagtccaaggttacagtgagccgtgattgagccactgcactccagcctcggccacagtgcaagactgtgtcgcttaaaaaaaaatttttttttttgagacggagttttgctcttgttgcccaggctggagtgcaatggcacaacctccacctcctgggttcaagcgattctcctgcctcagcctcccgagtagctgggattacagacatgtgccaccacgcccagctaattttgtatttttagtagagacggggtttctccatgttggtcaggctggtctcgaattcccgacctcaggtaatccacctgccttggccccccaattataggtgtgagccacagcacccagccaaaaaagtaattttttttagagtaataatgctataatgttggtgtgattccaacctccagctccccccacccgctgcctgcggttttgtttctgttaaaacgtcacctgatgaaatagaatgaatcctgaaatgcacctctgggatcgggaatggtctgtgtgttatcagctgcgactggttcactgcgtctggacaagcctcatggggactggggattctggccagtgtaatttctgtcaaccacggacgtttgccttcatgtgtagaatttactgttgttatgcaaattatattttcaattataaatgaaacaagtttgcagatattttagaaatcagagaagggaaacatcacccacagtccctctgctggaacagccacagttggccttgtcctacttacgtccttcagtggatgcttctgggtgctggggttctccattcaggacactgcactctcggaggtgggaggagactgggttgcgtctgtgccgacctgggatgcagtttcaggtcagaatcagaagatgtgcaagttacgcatgacacagctttttaaagtgcttttcccctgcactaatcaagagggaggtcagccctcaggtgtgctggacccgggagggactgtgagctgtaagaagtaacgagccccttgaacttcacaagctggccagggagccatatcccgaatgccactgccacttcctcgtggtgcaaggcttgttgggacct

SEQ ID NO: 356564 - DNA, 3244 bp, Homo sapiens
tccccccctcccccattccgctaggtacgaggctgggtggtgcacgtgtcttagggtagcgcgcgcctgtctctcttcgggtctcgggcccttgggcgcagcggggcgcgcgccatggcgaaggcgaagaaggtcggggcgcgaaggaaggcctccggggcgccggcgggagcgcgagggggcccggcgaaggccaactccaatccgttcgaggtgaaagttaacaggcagaagttccagatcctgggccggaagacgcgccacgacgtgggactgcccggggtgtctcgcgcacgggccctcaggaagcgtacacagactttactaaaagagtacaaagaaagggataaatccaatgtattcagagataaacgcttcggagaatacaacagcaacatgagccccgaggagaagatgatgaagaggtttgctctggaacagcagcgacatcatgagaaaaaaagcatctacaatctaaatgaagatgaagaattgactcattatggccagtctttggcagacatcgagaagcataatgacattgtggacagtgacagcgatgctgaggatcgaggaacgttgtctgctgagctgactgctgcccactttggaggaggcggtgggctccttcacaagaagactcaacaggaaggcgaggagcgggagaaaccgaagtcccggaaagagctgattgaagagctcattgccaagtcaaaacaagagaagagggagagacaagctcaacgagaagatgccctcgagctcacggagaagctagaccaagactggaaagaaattcagactctcctgtcccacaaaactcccaagtcagagaacagagacaaaaaggaaaaacccaagcccgatgcatatgacatgatggttcgcgagcttggctttgaaatgaaggcgcagccctctaacaggatgaagacggaggcagaattggcaaaggaagagcaggagcacctcaggaagctggaggctgagagacttcgaagaatgcttggaaaggatgaggatgaaaatgttaagaaaccaaaacatatgtcagcagatgatctgaatgatggcttcgtgctagataaagatgacaggcgtttgctttcctacaaagatggaaagatgaatgtcgaggaagatgtccaggaagagcaaagcaaggaagccagtgaccctgagagcaacgaggaagaaggtgacagttcaggcggggaggacacagaggagagcgacagcccagatagccacttggacctggaatccaacgtggagagtgaggaagaaaacgagaagccagcaaaagagcagaggcagactcctgggaaagggttgataagcggcaaggaaagagctggaaaagctaccagagacgagctgccctacacgttcgcagcccctgaatcctatgaggaactgagatctctgttgttaggaagatcgatggaagagcagcttttggtggtggagagaattcagaagtgcaaccacccgagtctcgcagaaggaaacaaagcaaaattagaaaaactgtttggctttcttttggaatacgttggcgatttggctacagatgacccaccagacctcacagtcattgataagttggttgtgcacttatatcatctttgccagatgtttcctgaatctgcaagtgacgctatcaaatttgttctccgagatgcgatgcatgagatggaagaaatgattgagaccaaaggccgggcggcattgccagggttggatgtgctcatttatttgaaaatcactgggctgctatttccaacttccgacttctggcacccagtggtgacccctgccctcgtgtgcctcagtcagctgctcaccaagtgccccatcctgtccctccaggacgtggtgaagggcctgttcgtgtgctgcctgttcctggagtatgtggctttgtcccagaggtttatacctgagcttattaattttcttcttgggattctttacatagcaactccaaacaaagcaagccaaggttccactctggtgcaccctttcagagcgcttgggaagaactcggaactgctcgtggtgtctgctagagaggatgtggccacgtggcagcagagcagcctctccctccgctgggcgagtagactgagggccccaacttcgacagaggccaatcacatccgactgtcctgcctggctgtgggcctggccctgctgaagcgctgcgtgctcatgtacgggtccctgccatccttccacgccatcatggggcctctccgagccctcctcacggatcacctggcggactgcagccacccgcaggagctccaggagctgtgtcagagcacactgaccgaaatggaaagccagaagcagctctgccggccgctgacctgtgagaagagcaagcctgtcccactgaagcttttcacaccccggctggtcaaagtgctggtctcgaattcccgacctcaggtaatccacctgccttggccccccaattataggtgtgagccacagcacccagccaaaaaagtaattttttttagagtaataatgctataatgttggtgtgattccaacctccagctccccccacccgctgcctgcggttttgtttctgttaaaacgtcacctgatgaaatagaatgaatcctgaaatgcacctctgggatcgggaatggtctgtgtgttatcagctgcgactggttcactgcgtctggacaagcctcatggggactggggattctggccagtgtaatttctgtcaaccacggacgtttgccttcatgtgtagaatttactgttgttatgcaaattatattttcaattataaatgaaacaagtttgcagatattttagaaatcagagaagggaaacatcacccacagtccctctgctggaacagccacagttggccttgtcctacttacgtccttcagtggatgcttctgggtgctggggttctccattcaggacactgcactctcggaggtgggaggagactgggttgcgtctgtgccgacctgggatgcagtttcaggtcagaatcagaagatgtgcaagttacgcatgacacagctttttaaagtgcttttcccctgcactaatcaagagggaggtcagccctcaggtgtgctggacccgggagggactgtgagctgtaagaagtaacgagccccttgaacttcacaagctggccagggagccatatcccgaatgccactgccacttcctcgtggtgcaaggcttgttgggacct

SEQ ID NO: 356565 - DNA, 4188 bp, Homo sapiens
tccccccctcccccattccgctaggtacgaggctgggtggtgcacgtgtcttagggtagcgcgcgcctgtctctcttcgggtctcgggcccttgggcgcagcggggcgcgcgccatggcgaaggcgaagaaggtcggggcgcgaaggaaggcctccggggcgccggcgggagcgcgagggggcccggcgaaggccaactccaatccgttcgaggtgaaagttaacaggcagaagttccagatcctgggccggaagacgcgccacgacgtgggactgcccggggtgtctcgcgcacgggccctcaggaagcgtacacagactttactaaaagagtacaaagaaagggataaatccaatgtattcagagataaacgcttcggagaatacaacagcaacatgagccccgaggagaagatgatgaagaggtttgctctggaacagcagcgacatcatgagaaaaaaagcatctacaatctaaatgaagatgaagaattgactcattatggccagtctttggcagacatcgagaagcataatgacattgtggacagtgacagcgatgctgaggatcgaggaacgttgtctgctgagctgactgctgcccactttggaggaggcggtgggctccttcacaagaagactcaacaggaaggcgaggagcgggagaaaccgaagtcccggaaagagctgattgaagagctcattgccaagtcaaaacaagagaagagggagagacaagctcaacgagaagatgccctcgagctcacggagaagctagaccaagactggaaagaaattcagactctcctgtcccacaaaactcccaagtcagagaacagagacaaaaaggaaaaacccaagcccgatgcatatgacatgatggttcgcgagcttggctttgaaatgaaggcgcagccctctaacaggatgaagacggaggcagaattggcaaaggaagagcaggagcacctcaggaagctggaggctgagagacttcgaagaatgcttggaaaggatgaggatgaaaatgttaagaaaccaaaacatatgtcagcagatgatctgaatgatggcttcgtgctagataaagatgacaggcgtttgctttcctacaaagatggaaagatgaatgtcgaggaagatgtccaggaagagcaaagcaaggaagccagtgaccctgagagcaacgaggaagaaggtgacagttcaggcggggaggacacagaggagagcgacagcccagatagccacttggacctggaatccaacgtggagagtgaggaagaaaacgagaagccagcaaaagagcagaggcagactcctgggaaagggttgataagcggcaaggaaagagctggaaaagctaccagagacgagctgccctacacgttcgcagcccctgaatcctatgaggaactgagatctctgttgttaggaagatcgatggaagagcagcttttggtggtggagagaattcagaagtgcaaccacccgagtctcgcagaaggaaacaaagcaaaattagaaaaactgtttggctttcttttggaatacgttggcgatttggctacagatgacccaccagacctcacagtcattgataagttggttgtgcacttatatcatctttgccagatgtttcctgaatctgcaagtgacgctatcaaatttgttctccgagatgcgatgcatgagatggaagaaatgattgagaccaaaggccgggcggcattgccagggttggatgtgctcatttatttgaaaatcactgggctgctatttccaacttccgacttctggcacccagtggtgacccctgccctcgtgtgcctcagtcagctgctcaccaagtgccccatcctgtccctccaggacgtggtgaagggcctgttcgtgtgctgcctgttcctggagtatgtggctttgtcccagaggtttatacctgagcttattaattttcttcttgggattctttacatagcaactccaaacaaagcaagccaaggttccactctggtgcaccctttcagagcgcttgggaagaactcggaactgctcgtggtgtctgctagagaggatgtggccacgtggcagcagagcagcctctccctccgctgggcgagtagactgagggccccaacttcgacagaggccaatcacatccgactgtcctgcctggctgtgggcctggccctgctgaagcgctgcgtgctcatgtacgggtccctgccatccttccacgccatcatggggcctctccgagccctcctcacggatcacctggcggactgcagccacccgcaggagctccaggagctgtgtcagagcacactgaccgaaatggaaagccagaagcagctctgccggccgctgacctgtgagaagagcaagcctgtcccactgaagcttttcacaccccggctggtcaaagtgtgtgggtgctggcagcatctccctgggaggccagggctgtgggctcagtgggagctgacggggggcgtctgccagttctgcagttgagcagatgactacggagtgaagccacactcccaagcaggctctggctgagaggtggggacagactcttgcttccttaacagtggctttctggttgtagcctcgagtttggaagaaaacaaggcagtagtaaggaggaacaggaaaggaagaggctgatccacaaacacaagcgtgaatttaaaggggccgttcgagaaatccgcaaggacaatcagttcctggcgaggatgcaactctcagaaatcatggaacgggatgcggaaagaaagcggaaagtaaagcagctttttaacagcctggctacacaggaaggcgaatggaaggctctgaagaggaaaaagttcaaaaaataaattacattttataaataaggcaaggaactggacattacctcacatctgcaattccaaccctctgggaggccaaggcaggaagattgcttcagcccaggagttcgagaccagcctgggcaacacaggaagaccccgtctctaccaaaaaaacataaaaattagccaagtgtggtggcacgcacctgtagtcccaactactcgggaggctgaagcaggaggactgcttgagctgagtccaaggttacagtgagccgtgattgagccactgcactccagcctcggccacagtgcaagactgtgtcgcttaaaaaaaaatttttttttttgagacggagttttgctcttgttgcccaggctggagtgcaatggcacaacctccacctcctgggttcaagcgattctcctgcctcagcctcccgagtagctgggattacagacatgtgccaccacgcccagctaattttgtatttttagtagagacggggtttctccatgttggtcaggctggtctcgaattcccgacctcaggtaatccacctgccttggccccccaattataggtgtgagccacagcacccagccaaaaaagtaattttttttagagtaataatgctataatgttggtgtgattccaacctccagctccccccacccgctgcctgcggttttgtttctgttaaaacgtcacctgatgaaatagaatgaatcctgaaatgcacctctgggatcgggaatggtctgtgtgttatcagctgcgactggttcactgcgtctggacaagcctcatggggactggggattctggccagtgtaatttctgtcaaccacggacgtttgccttcatgtgtagaatttactgttgttatgcaaattatattttcaattataaatgaaacaagtttgcagatattttagaaatcagagaagggaaacatcacccacagtccctctgctggaacagccacagttggccttgtcctacttacgtccttcagtggatgcttctgggtgctggggttctccattcaggacactgcactctcggaggtgggaggagactgggttgcgtctgtgccgacctgggatgcagtttcaggtcagaatcagaagatgtgcaagttacgcatgacacagctttttaaagtgcttttcccctgcactaatcaagagggaggtcagccctcaggtgtgctggacccgggagggactgtgagctgtaagaagtaacgagccccttgaacttcacaagctggccagggagccatatcccgaatgccactgccacttcctcgtggtgcaaggcttgttgggacct

SEQ ID NO: 356566 - DNA, 3298 bp, Homo sapiens
tccccccctcccccattccgctaggtacgaggctgggtggtgcacgtgtcttagggtagcgcgcgcctgtctctcttcgggtctcgggcccttgggcgcagcggggcgcgcgccatggcgaaggcgaagaaggtcggggcgcgaaggaaggcctccggggcgccggcgggagcgcgagggggcccggcgaaggccaactccaatccgttcgaggtgaaagttaacaggcagaagttccagatcctgggccggaagacgcgccacgacgtgggactgcccggggtgtctcgcgcacgggccctcaggaagcgtacacagactttactaaaagagtacaaagaaagggataaatccaatgtattcagagataaacgcttcggagaatacaacagcaacatgagccccgaggagaagatgatgaagaggtttgctctggaacagcagcgacatcatgagaaaaaaagcatctacaatctaaatgaagatgaagaattgactcattatggccagtctttggcagacatcgagaagcataatgacattgtggacagtgacagcgatgctgaggatcgaggaacgttgtctgctgagctgactgctgcccactttggaggaggcggtgggctccttcacaagaagactcaacaggaaggcgaggagcgggagaaaccgaagtcccggaaagagctgattgaagagctcattgccaagtcaaaacaagagaagagggagagacaagctcaacgagaagatgccctcgagctcacggagaagctagaccaagactggaaagaaattcagactctcctgtcccacaaaactcccaagtcagagaacagagacaaaaaggaaaaacccaagcccgatgcatatgacatgatggttcgcgagcttggctttgaaatgaaggcgcagccctctaacaggatgaagacggaggcagaattggcaaaggaagagcaggagcacctcaggaagctggaggctgagagacttcgaagaatgcttggaaaggatgaggatgaaaatgttaagaaaccaaaacatatgtcagcagatgatctgaatgatggcttcgtgctagataaagatgacaggcgtttgctttcctacaaagatggaaagatgaatgtcgaggaagatgtccaggaagagcaaagcaaggaagccagtgaccctgagagcaacgaggaagaaggtgacagttcaggcggggaggacacagaggagagcgacagcccagatagccacttggacctggaatccaacgtggagagtgaggaagaaaacgagaagccagcaaaagagcagaggcagactcctgggaaagggttgataagcggcaaggaaagagctggaaaagctaccagagacgagctgccctacacgttcgcagcccctgaatcctatgaggaactgagatctctgttgttaggaagatcgatggaagagcagcttttggtggtggagagaattcagaagtgcaaccacccgagtctcgcagaaggaaacaaagcaaaattagaaaaactgtttggctttcttttggaatacgttggcgatttggctacagatgacccaccagacctcacagtcattgataagttggttgtgcacttatatcatctttgccagatgtttcctgaatctgcaagtgacgctatcaaatttgttctccgagatgcgatgcatgagatggaagaaatgattgagaccaaaggccgggcggcattgccagggttggatgtgctcatttatttgaaaatcactgggctgctatttccaacttccgacttctggcacccagtggtgacccctgccctcgtgtgcctcagtcagctgctcaccaagtgccccatcctgtccctccaggacgtggtgaagggcctgttcgtgtgctgcctgttcctggagtatgtggctttgtcccagaggtttatacctgagcttattaattttcttcttgggattctttacatagcaactccaaacaaagcaagccaaggttccactctggtgcaccctttcagagcgcttgggaagaactcggaactgctcgtggtgtctgctagagaggatgtggccacgtggcagcagagcagcctctccctccgctgggcgagtagactgagggccccaacttcgacagaggccaatcacatccgactgtcctgcctggctgtgggcctggccctgctgaagcgctgcgtgctcatgtacgggtccctgccatccttccacgccatcatggggcctctccgagccctcctcacggatcacctggcggactgcagccacccgcaggagctccaggagctgtgtcagagcacactgaccgaaatggaaagccagaagcagctctgccggccgctgacctgtgagaagagcaagcctgtcccactgaagcttttcacaccccggctggtcaaagtcctcgagtttggaagaaaacaaggcagtagtaaggaggaacaggaaaggaagaggctggtctcgaattcccgacctcaggtaatccacctgccttggccccccaattataggtgtgagccacagcacccagccaaaaaagtaattttttttagagtaataatgctataatgttggtgtgattccaacctccagctccccccacccgctgcctgcggttttgtttctgttaaaacgtcacctgatgaaatagaatgaatcctgaaatgcacctctgggatcgggaatggtctgtgtgttatcagctgcgactggttcactgcgtctggacaagcctcatggggactggggattctggccagtgtaatttctgtcaaccacggacgtttgccttcatgtgtagaatttactgttgttatgcaaattatattttcaattataaatgaaacaagtttgcagatattttagaaatcagagaagggaaacatcacccacagtccctctgctggaacagccacagttggccttgtcctacttacgtccttcagtggatgcttctgggtgctggggttctccattcaggacactgcactctcggaggtgggaggagactgggttgcgtctgtgccgacctgggatgcagtttcaggtcagaatcagaagatgtgcaagttacgcatgacacagctttttaaagtgcttttcccctgcactaatcaagagggaggtcagccctcaggtgtgctggacccgggagggactgtgagctgtaagaagtaacgagccccttgaacttcacaagctggccagggagccatatcccgaatgccactgccacttcctcgtggtgcaaggcttgttgggacct

SEQ ID NO: 356567 - DNA, 1385 bp, Homo sapiens
gcatctattaggcagaggtggggctttgttcttacccacaattggaagttctctatggagtaaaggcggtatgtgtgccacctgattcctttccccatgtgtatctggttagggtcggccacgtgagatccgcaagcattttagaaggtgggaggggaggtgggagctggctacaggccaggcgttggcgtggttccgtgagtgtgctccagccaggcccaaagcttctcctgcccagagggaccgtttcctccagcgtgggtcgggtgcttctgcgcccggaaagagcgccagctcctccttcgggtgacccagggagcggggctgcaggcaaaggcgcaggcggccaaaaaggtgccaaccgggtcctgtggctttcagttgtctctgcccacccaattcacaccatctttccccctcagccgcctgtcctgggacttcaggctcagcaccaaacgcagcaaaagtaggtgcacagagagcggggtcagctcacgcagcccgagcagaatggctgtgctgccgccccaggcccgcggccaccgctgtgtgtgtggcaggagtcagccccccagcgtggggccccgaagcccgcggtccttccacggggagggccaggcccgcagggcgcagacgatgggggacaggctgcgccagcgctcgcctgaggccccgcacacaaacctcaggcccatgggtccgctccgcggggcaggcgtcgtgggcccaaggaggccaggccaggagtctcggcctcggggttacgcggcggcgggcagctcttccgctccgctcagggtgctgctaacccacagccgagcagcgacccgcaggaccggcgagaaccccgccactgcctcccgacgcgtgggtcgacccacgcgtccggacccacgcgtccggctcaccagggcagaagggcacggtcatgggtacactgcgcagcctaggtgctctggccagggccgcggggcccctggtggccgcttcagtgtactggctggccggggcccaggcctgcttcaccacgtggtccgggctctttttgctccccttcttcctcctgcagaagctgagttacccggcacagacgctcaaggctgagtagctgagccactgtgcccaggctgtgggcaccaggcagagtgggagcctaggtcaggcccctgcccactgcctgacccccaccccccgccagtccagggagaccctgtgggtgggggccggcccctaagcaggaagctcaggcagctcctccagacttacttactccttcagtgactccgagctgcagcactccaaggctgtcagggcttctgtttgttttttaaactatgcaccaggtttctgatgatgaaataaagcacctgtttgttttataccaa

SEQ ID NO: 356568 - DNA, 2019 bp, Homo sapiens
acgtttctggctgtgaggagcacaggctatggtgacctccaactccccaagtcccctcctttcagagagtgctctcaggggccagcccacggccctccctcttcaagaagacagtggctttacttcgttccggctgtgccaggacttgagcagccacagccttggcttacccccccgcccaccggtaggcgcacagcaagggcaccatcctgctgcagggagctcgcagcactgtcctcacgctgccttgacaccacagaacccgtgcgtggagctcagggcacgcagcaggtgagtcatcgcagagtcggggatttcgtgtttttcaggagctgtgtcagagcacactgaccgaaatggaaagccagaagcagctctgccggccgctgacctgtgagaagagcaagcctgtcccactgaagcttttcacaccccggctggtcaaagtcctcgagtttggaagaaaacaaggcagtagtaaggaggaacaggaaaggaagaggctgatccacaaacacaagcgtgaatttaaaggggccgttcgagaaatccgcaaggacaatcagttcctggcgaggatgcaactctcagaaatcatggaacgggatgcggaaagaaagcggaaagtaaagcagctttttaacagcctggctacacaggaaggcgaatggaaggctctgaagaggaaaaagttcaaaaaataaattacattttataaataaggcaaggaactggacattacctcacatctgcaattccaaccctctgggaggccaaggcaggaagattgcttcagcccaggagttcgagaccagcctgggcaacacaggaagaccccgtctctaccaaaaaaacataaaaattagccaagtgtggtggcacgcacctgtagtcccaactactcgggaggctgaagcaggaggactgcttgagctgagtccaaggttacagtgagccgtgattgagccactgcactccagcctcggccacagtgcaagactgtgtcgcttaaaaaaaaatttttttttttgagacggagttttgctcttgttgcccaggctggagtgcaatggcacaacctccacctcctgggttcaagcgattctcctgcctcagcctcccgagtagctgggattacagacatgtgccaccacgcccagctaattttgtatttttagtagagacggggtttctccatgttggtcaggctggtctcgaattcccgacctcaggtaatccacctgccttggccccccaattataggtgtgagccacagcacccagccaaaaaagtaattttttttagagtaataatgctataatgttggtgtgattccaacctccagctccccccacccgctgcctgcggttttgtttctgttaaaacgtcacctgatgaaatagaatgaatcctgaaatgcacctctgggatcgggaatggtctgtgtgttatcagctgcgactggttcactgcgtctggacaagcctcatggggactggggattctggccagtgtaatttctgtcaaccacggacgtttgccttcatgtgtagaatttactgttgttatgcaaattatattttcaattataaatgaaacaagtttgcagatattttagaaatcagagaagggaaacatcacccacagtccctctgctggaacagccacagttggccttgtcctacttacgtccttcagtggatgcttctgggtgctggggttctccattcaggacactgcactctcggaggtgggaggagactgggttgcgtctgtgccgacctgggatgcagtttcaggtcagaatcagaagatgtgcaagttacgcatgacacagctttttaaagtgcttttcccctgcactaatcaagagggaggtcagccctcaggtgtgctggacccgggagggactgtgagctgtaagaagtaacgagccccttgaacttcacaagctggccagggagccatatcccgaatgccactgccacttcctcgtggtgcaaggcttgttgggacct

SEQ ID NO: 356569 - DNA, 1450 bp, Homo sapiens
tccaaaaatgggcatttgccttttgtttcttttagggatgcggaaagaaagcggaaagtaaagcagctttttaacagcctggctacacaggaaggcgaatggaaggctctgaagaggaaaaagttcaaaaaataaattacattttataaataaggcaaggaactggacattacctcacatctgcaattccaaccctctgggaggccaaggcaggaagattgcttcagcccaggagttcgagaccagcctgggcaacacaggaagaccccgtctctaccaaaaaaacataaaaattagccaagtgtggtggcacgcacctgtagtcccaactactcgggaggctgaagcaggaggactgcttgagctgagtccaaggttacagtgagccgtgattgagccactgcactccagcctcggccacagtgcaagactgtgtcgcttaaaaaaaaatttttttttttgagacggagttttgctcttgttgcccaggctggagtgcaatggcacaacctccacctcctgggttcaagcgattctcctgcctcagcctcccgagtagctgggattacagacatgtgccaccacgcccagctaattttgtatttttagtagagacggggtttctccatgttggtcaggctggtctcgaattcccgacctcaggtaatccacctgccttggccccccaattataggtgtgagccacagcacccagccaaaaaagtaattttttttagagtaataatgctataatgttggtgtgattccaacctccagctccccccacccgctgcctgcggttttgtttctgttaaaacgtcacctgatgaaatagaatgaatcctgaaatgcacctctgggatcgggaatggtctgtgtgttatcagctgcgactggttcactgcgtctggacaagcctcatggggactggggattctggccagtgtaatttctgtcaaccacggacgtttgccttcatgtgtagaatttactgttgttatgcaaattatattttcaattataaatgaaacaagtttgcagatattttagaaatcagagaagggaaacatcacccacagtccctctgctggaacagccacagttggccttgtcctacttacgtccttcagtggatgcttctgggtgctggggttctccattcaggacactgcactctcggaggtgggaggagactgggttgcgtctgtgccgacctgggatgcagtttcaggtcagaatcagaagatgtgcaagttacgcatgacacagctttttaaagtgcttttcccctgcactaatcaagagggaggtcagccctcaggtgtgctggacccgggagggactgtgagctgtaagaagtaacgagccccttgaacttcacaagctggccagggagccatatcccgaatgccactgccacttcctcgtggtgcaaggcttgttgggacct

SEQ ID NO: 356570 - DNA, 346 bp, Homo sapiens
gtaaaataagaaataaatatatttttaaaatgaagaatttcttctttctaccttagcccgatgcatatgacatgatggttcgcgagcttggctttgaaatgaaggcgcagccctctaacaggatgaagacggaggcagaattggcaaaggaagagcaggagcacctcaggaagctggaggtagggtggcagcacctcaggagcagggctgtgctgctgtccgtccacagccccttctgctccattttgcaggatgggctgaagagaatactctgtttgatcagtggaatattttagtctatttaaagtttatatttattcatgaatacctttttttttttttttct

SEQ ID NO: 356571 - DNA, 251 bp, Homo sapiens
aagctgtgtgcctgtggctttgttcttggtgctgagcactgagctttatttcccaattcatgttcctgcagaaactgtttggctttcttttggaatacgttggcgatttggctacagatgacccaccagacctcacagtcattgataagttggttgtgtaagtaaaaatggtgtgtcatctgggatgtggggttaagcagaacaatttttctcccatttagagtcataaaaatacattccagagttactaa

SEQ ID NO: 356572 - DNA, 423 bp, Homo sapiens
tgcctgtggctttgttcttggtgctgagcactgagctttatttcccaattcatgttcctgcagaaactgtttggctttcttttggaatacgttggcgatttggctacagatgacccaccagacctcacagtcattgataagttggttgtgtaagtaaaaatggtgtgtcatctgggatgtggggttaagcagaacaatttttctcccatttagagtcataaaaatacattccagagttactaaggtaggtggaatgatggtgtcagcatgccaagtgggcaggtggtcacccagggcttgtgagcctcacagcgcaagccggcttctcacacgtgccgctccagccactgtagagctgggactgacttttaaccacaaacaagttgattttgaaacaagtgaacccctttagatttgtggctg

SEQ ID NO: 356573 - DNA, 250 bp, Homo sapiens
gttttcatctcatttgatgctctcgacactgctataaggtgcgggggttccctctgtacttgtgaagctcagtggggtgcgtggttcatcagggaagcccggtggtcggcctagcatggcatgacatcgtcccaggacagtaaccccccatatgttcctttccagtgccccatcctgtccctccaggacgtggtgaagggcctgttcgtgtgctgcctgttcctggagtatgtggctttgtcccagaggt

SEQ ID NO: 356574 - DNA, 448 bp, Homo sapiens
tccctgcccacgctgaaaccctcagtgtctggcacaacccagaaacataaaaatcggtgtgcgtctgttagagggtgaacttccacaggctcggtgccgcagagcctgctgggagcccagtaatgttcaggccatctctgtcctgtcgcacttggaattcaggttccactctggtgcaccctttcagagcgcttgggaagaactcggaactgctcgtggtgtctgctagagaggatgtggccacgtggcagcagagcagcctctccctccgctgggcgagtagactgagggccccaacttcgacagaggccaatcacatccggtatgtgaggggaccccgctttggggcctgtgccctacagcgtccccagaggcaggagaagccactcgtgctttctgatgtgctgttcttagtgaacttgccgcccggccgtttggtttgatggag

SEQ ID NO: 356575 - DNA, 1959 bp, Homo sapiens
gtgggaggcgcggccgtggggtggggtggggccaggtccgcgatgtgctcaccctggtctctcaggaccgttgcctttgcggctattttttgtgcaatccccgaagcctgcgtttcctgctgcctgggttcggggcgggggcatcgcgcaggccagaacggcccctgcgtccgtaggccagagcccctgccatcagcccctttagggtgctcgccggctgtcgggtgtgggggtatgccaggccccggaggactcggcttccccgctaacccgacccgccgcaccccacccaggccaggtcagagcagcccaccatgggatggggagggggtggaggctgcaccccgcgcccacccatccaccagcagccgccggagcgccgcgtggtcaccgttgtctttctcggcctcctgctggacctcctggccttcacgctgctgctgcccctgctgcccgggctgttggagagccacggccgtgcccacgaccccctctatggctcctggcagggcggggtggactggtttgccaccgccatcgggatgccagtggagaagaggtacaacagtgtcctgttcggaggtctcattggctcggcattctctgtcctgcagtttctgtgtgcgccactcactggggccacctctgactgcttggggaggcgcccggtgatgctgctgtgcctgatgggtgtggccacctcatatgcagtctgggccacctctcggagctttgcggccttcctggcctccaggctgattgggggcatcagcaaagggaacgtcagcctctccacggccatcgttgctgacctgggctcgcctctggcccgcagtcaaggcatggcggtcattggggtggccttctcactgggcttcaccctgggccctatgctcggagcctccctgcccctggaaatggcaccctggtttgccctgctcttcgcagcctccgacctgctgttcatcttctgcttcctgccagagacgctgcccctggagaaacgggcgccctctatcgccctggggttccgtgatgcggctgatctgctcagccccctggccctgctgcgcttctcggctgtcgctcgtggccaggacccaccctctggagacaggctcagcagcctgcgccgcctgggcctagtctacttcctctacctcttcctgttctcgggcctggagtacacgctgagcttcctcacacaccagcgcttccagttcagtagcctacagcaggggaagatgtttttcctcatcggcctcaccatggccaccatccagggtgcctatgcccggcggatccaccctggcggggaagttgctgccgtgaagcgggccctcctgctgctggtgcccgccttcctcctcatcggctggggacgttctctgcccgtgctgggcctggggctgctgctctactcctttgccgccgccgttgtggtgccctgcctgtcctccgtggtcgctggctatggctcaccagggcagaagggcacggtcatgggtacactgcgcagcctaggtgctctggccagggccgcggggcccctggtggccgcttcagtgtactggctggccggggcccaggcctgcttcaccacgtggtccgggctctttttgctccccttcttcctcctgcagaagctgagttacccggcacagacgctcaaggctgagtagctgagccactgtgcccaggctgtgggcaccaggcagagtgggagcctaggtcaggcccctgcccactgcctgacccccaccccccgccagtccagggagaccctgtgggtgggggccggcccctaagcaggaagctcaggcagctcctccagacttacttactccttcagtgactccgagctgcagcactccaaggctgtcagggcttctgtttgttttttaaactatgcaccaggtttctgatgatgaaataaagcacctgtttgttttataccaa

SEQ ID NO: 356576 - DNA, 2666 bp, Homo sapiens
gcatctattaggcagaggtggggctttgttcttacccacaattggaagttctctatggagtaaaggcggtatgtgtgccacctgattcctttccccatgtgtatctggttagggtcggccacgtgagatccgcaagcattttagaaggtgggaggggaggtgggagctggctacaggccaggcgttggcgtggttccgtgagtgtgctccagccaggcccaaagcttctcctgcccagagggaccgtttcctccagcgtgggtcgggtgcttctgcgcccggaaagagcgccagctcctccttcgggtgacccagggagcggggctgcaggcaaaggcgcaggcggccaaaaaggtgccaaccgggtcctgtggctttcagttgtctctgcccacccaattcacaccatctttccccctcagccgcctgtcctgggacttcaggctcagcaccaaacgcagcaaaagtaggtgcacagagagcggggtcagctcacgcagcccgagcagaatggctgtgctgccgccccaggcccgcggccaccgctgtgtgtgtggcaggagtcagccccccagcgtggggccccgaagcccgcggtccttccacggggagggccaggcccgcagggcgcagacgatgggggacaggctgcgccagcgctcgcctgaggccccgcacacaaacctcaggcccatgggtccgctccgcggggcaggcgtcgtgggcccaaggaggccaggccaggagtctcggcctcggggttacgcggcggcgggcagctcttccgctccgctcagggtgctgctaacccacagccgagcagcgacccgcaggaccggcgagaaccccgccactgcctccggccggaagagaacgtgcagagatgtacgtcacttccggggcgtggcgtggcgggcgtggcgtcccgcccctggcggcgtgcctggtgccctgttccgcgtctgtgcgaccgtccgtcccgagcgcgcagccgcggcaggccaggtcagagcagcccaccatgggatggggagggggtggaggctgcaccccgcgcccacccatccaccagcagccgccggagcgccgcgtggtcaccgttgtctttctcggcctcctgctggacctcctggccttcacgctgctgctgcccctgctgcccgggctgttggagagccacggccgtgcccacgaccccctctatggctcctggcagggcggggtggactggtttgccaccgccatcgggatgccagtggagaagaggtacaacagtgtcctgttcggaggtctcattggctcggcattctctgtcctgcagtttctgtgtgcgccactcactggggccacctctgactgcttggggaggcgcccggtgatgctgctgtgcctgatgggtgtggccacctcatatgcagtctgggccacctctcggagctttgcggccttcctggcctccaggctgattgggggcatcagcaaagggaacgtcagcctctccacggccatcgttgctgacctgggctcgcctctggcccgcagtcaaggcatggcggtcattggggtggccttctcactgggcttcaccctgggccctatgctcggagcctccctgcccctggaaatggcaccctggtttgccctgctcttcgcagcctccgacctgctgttcatcttctgcttcctgccagagacgctgcccctggagaaacgggcgccctctatcgccctggggttccgtgatgcggctgatctgctcagccccctggccctgctgcgcttctcggctgtcgctcgtggccaggacccaccctctggagacaggctcagcagcctgcgccgcctgggcctagtctacttcctctacctcttcctgttctcgggcctggagtacacgctgagcttcctcacacaccagcgcttccagttcagtagcctacagcaggggaagatgtttttcctcatcggcctcaccatggccaccatccagggtgcctatgcccggcggatccaccctggcggggaagttgctgccgtgaagcgggccctcctgctgctggtgcccgccttcctcctcatcggctggggacgttctctgcccgtgctgggcctggggctgctgctctactcctttgccgccgccgttgtggtgccctgcctgtcctccgtggtcgctggctatggctcaccagggcagaagggcacggtcatgggtacactgcgcagcctaggtgctctggccagggccgcggggcccctggtggccgcttcagtgtactggctggccggggcccaggcctgcttcaccacgtggtccgggctctttttgctccccttcttcctcctgcagaagctgagttacccggcacagacgctcaaggctgagtagctgagccactgtgcccaggctgtgggcaccaggcagagtgggagcctaggtcaggcccctgcccactgcctgacccccaccccccgccagtccagggagaccctgtgggtgggggccggcccctaagcaggaagctcaggcagctcctccagacttacttactccttcagtgactccgagctgcagcactccaaggctgtcagggcttctgtttgttttttaaactatgcaccaggtttctgatgatgaaataaagcacctgtttgttttataccaa

SEQ ID NO: 356577 - DNA, 2773 bp, Homo sapiens
gcatctattaggcagaggtggggctttgttcttacccacaattggaagttctctatggagtaaaggcggtatgtgtgccacctgattcctttccccatgtgtatctggttagggtcggccacgtgagatccgcaagcattttagaaggtgggaggggaggtgggagctggctacaggccaggcgttggcgtggttccgtgagtgtgctccagccaggcccaaagcttctcctgcccagagggaccgtttcctccagcgtgggtcgggtgcttctgcgcccggaaagagcgccagctcctccttcgggtgacccagggagcggggctgcaggcaaaggcgcaggcggccaaaaaggtgccaaccgggtcctgtggctttcagttgtctctgcccacccaattcacaccatctttccccctcagccgcctgtcctgggacttcaggctcagcaccaaacgcagcaaaagtaggtgcacagagagcggggtcagctcacgcagcccgagcagaatggctgtgctgccgccccaggcccgcggccaccgctgtgtgtgtggcaggagtcagccccccagcgtggggccccgaagcccgcggtccttccacggggagggccaggcccgcagggcgcagacgatgggggacaggctgcgccagcgctcgcctgaggccccgcacacaaacctcaggcccatgggtccgctccgcggggcaggcgtcgtgggcccaaggaggccaggccaggagtctcggcctcggggttacgcggcggcgggcagctcttccgctccgctcagggtgctgctaacccacagccgagcagcgacccgcaggaccggcgagaaccccgccactgcctccggccggaagagaacgtgcagagatgtacgtcacttccggggcgtggcgtggcgggcgtggcgtcccgcccctggcggcgtgcctggtgccctgttccgcgtctgtgcgaccgtccgtcccgagcgcgcagccgcggcaggccaggtcagagcagcccaccatgggatggggagggggtggaggctgcaccccgcgcccacccatccaccagcagccgccggagcgccgcgtggtcaccgttgtctttctcggcctcctgctggacctcctggccttcacgctgctgctgcccctgctgcccgggctgttggagagccacggccgtgcccacgaccccctctatggctcctggcagggcggggtggactggtttgccaccgccatcgggatgccagtggagaagaggtacaacagtgtcctgttcggaggtctcattggctcggcattctctgtcctgcagtttctgtgtgcgccactcactggggccacctctgactgcttggggaggcgcccggtgatgctgctgtgcctgatgggtgtggccacctcatatgcagtctgggccacctctcggagctttgcggccttcctggcctccaggctgattgggggcatcagcaaagggaacgtcagcctctccacggccatcgttgctgacctgggctcgcctctggcccgcagtcaaggcatggcggtcattggggtggccttctcactgggcttcaccctgggccctatgctcggagcctccctgcccctggaaatggcaccctggtttgccctgctcttcgcagcctccgacctgctgttcatcttctgcttcctgccagagacgctgcccctggagaaacgggcgccctctatcgccctggggttccgtgatgcggctgatctgctcagccccctggccctgctgcgcttctcggctgtcgctcgtggccaggacccaccctctggagacaggctcagcagcctgcgccgcctgggcctagtctacttcctctacctcttcctgttctcgggcctggagtacacgctgagcttcctcacacaccagcgcttccagttcagtagcctacagcaggggaagatgtttttcctcatcggcctcaccatggccaccatccagggtgcctatgcccggcggatccaccctggcggggaagttgctgccgtgaagcgggccctcctgctgctggtgcccgccttcctcctcatcggctggggacgttctctgcccgtgctgggcctggggctgctgctctactcctttgccgccgccgttgtggtgccctgcctgtcctccgtggtcgctggctatggctcaccagggcagaagggcacggtcatgggtacactgcgcagcctaggtgctctggccagggccgcggggcccctggtggccgcttcaggtgagggcgcgggatggtgctggggcaggctgggggccaagcacctgccctcgcctcccaagtgccagccccctcggggactgggtgacgccaccgtctctccgcagtgtactggctggccggggcccaggcctgcttcaccacgtggtccgggctctttttgctccccttcttcctcctgcagaagctgagttacccggcacagacgctcaaggctgagtagctgagccactgtgcccaggctgtgggcaccaggcagagtgggagcctaggtcaggcccctgcccactgcctgacccccaccccccgccagtccagggagaccctgtgggtgggggccggcccctaagcaggaagctcaggcagctcctccagacttacttactccttcagtgactccgagctgcagcactccaaggctgtcagggcttctgtttgttttttaaactatgcaccaggtttctgatgatgaaataaagcacctgtttgttttataccaa

SEQ ID NO: 356578 - DNA, 4003 bp, Homo sapiens
tccccccctcccccattccgctaggtacgaggctgggtggtgcacgtgtcttagggtagcgcgcgcctgtctctcttcgggtctcgggcccttgggcgcagcggggcgcgcgccatggcgaaggcgaagaaggtcggggcgcgaaggaaggcctccggggcgccggcgggagcgcgagggggcccggcgaaggccaactccaatccgttcgaggtgaaagttaacaggcagaagttccagatcctgggccggaagacgcgccacgacgtgggactgcccggggtgtctcgcgcacgggccctcaggaagcgtacacagactttactaaaagagtacaaagaaagggataaatccaatgtattcagagataaacgcttcggagaatacaacagcaacatgagccccgaggagaagatgatgaagaggtttgctctggaacagcagcgacatcatgagaaaaaaagcatctacaatctaaatgaagatgaagaattgactcattatggccagtctttggcagacatcgagaagcataatgacattgtggacagtgacagcgatgctgaggatcgaggaacgttgtctgctgagctgactgctgcccactttggaggaggcggtgggctccttcacaagaagactcaacaggaaggcgaggagcgggagaaaccgaagtcccggaaagagctgattgaagagctcattgccaagtcaaaacaagagaagagggagagacaagctcaacgagaagatgccctcgagctcacggagaagctagaccaagactggaaagaaattcagactctcctgtcccacaaaactcccaagtcagagaacagagacaaaaaggaaaaacccaagcccgatgcatatgacatgatggttcgcgagcttggctttgaaatgaaggcgcagccctctaacaggatgaagacggaggcagaattggcaaaggaagagcaggagcacctcaggaagctggaggctgagagacttcgaagaatgcttggaaaggatgaggatgaaaatgttaagaaaccaaaacatatgtcagcagatgatctgaatgatggcttcgtgctagataaagatgacaggcgtttgctttcctacaaagatggaaagatgaatgtcgaggaagatgtccaggaagagcaaagcaaggaagccagtgaccctgagagcaacgaggaagaaggtgacagttcaggcggggaggacacagaggagagcgacagcccagatagccacttggacctggaatccaacgtggagagtgaggaagaaaacgagaagccagcaaaagagcagaggcagactcctgggaaagggttgataagcggcaaggaaagagctggaaaagctaccagagacgagctgccctacacgttcgcagcccctgaatcctatgaggaactgagatctctgttgttaggaagatcgatggaagagcagcttttggtggtggagagaattcagaagtgcaaccacccgagtctcgcagaaggaaacaaagcaaaattagaaaaactgtttggctttcttttggaatacgttggcgatttggctacagatgacccaccagacctcacagtcattgataagttggttgtgcacttatatcatctttgccagatgtttcctgaatctgcaagtgacgctatcaaatttgttctccgagatgcgatgcatgagatggaagaaatgattgagaccaaaggccgggcggcattgccagggttggatgtgctcatttatttgaaaatcactgggctgctatttccaacttccgacttctggcacccagtggtgacccctgccctcgtgtgcctcagtcagctgctcaccaagtgccccatcctgtccctccaggacgtggtgaagggcctgttcgtgtgctgcctgttcctggagtatgtggctttgtcccagaggtttatacctgagcttattaattttcttcttgggattctttacatagcaactccaaacaaagcaagccaaggttccactctggtgcaccctttcagagcgcttgggaagaactcggaactgctcgtggtgtctgctagagaggatgtggccacgtggcagcagagcagcctctccctccgctgggcgagtagactgagggccccaacttcgacagaggccaatcacatccgactgtcctgcctggctgtgggcctggccctgctgaagcgctgcgtgctcatgtacgggtccctgccatccttccacgccatcatggggcctctccgagccctcctcacggatcacctggcggactgcagccacccgcaggagctccaggagctgtgtcagagcacactgaccgaaatggaaagccagaagcagctctgccggccgctgacctgtgagaagagcaagcctgtcccactgaagcttttcacaccccggctggtcaaagtcctcgagtttggaagaaaacaaggcagtagtaaggaggaacaggaaaggaagaggctgatccacaaacacaagcgtgaatttaaaggggccgttcgagaaatccgcaaggacaatcagttcctggcgaggatgcaactctcagaaatcatggaacgggatgcggaaagaaagcggaaagtaaagcagctttttaacagcctggctacacaggaaggcgaatggaaggctctgaagaggaaaaagttcaaaaaataaattacattttataaataaggcaaggaactggacattacctcacatctgcaattccaaccctctgggaggccaaggcaggaagattgcttcagcccaggagttcgagaccagcctgggcaacacaggaagaccccgtctctaccaaaaaaacataaaaattagccaagtgtggtggcacgcacctgtagtcccaactactcgggaggctgaagcaggaggactgcttgagctgagtccaaggttacagtgagccgtgattgagccactgcactccagcctcggccacagtgcaagactgtgtcgcttaaaaaaaaatttttttttttgagacggagttttgctcttgttgcccaggctggagtgcaatggcacaacctccacctcctgggttcaagcgattctcctgcctcagcctcccgagtagctgggattacagacatgtgccaccacgcccagctaattttgtatttttagtagagacggggtttctccatgttggtcaggctggtctcgaattcccgacctcaggtaatccacctgccttggccccccaattataggtgtgagccacagcacccagccaaaaaagtaattttttttagagtaataatgctataatgttggtgtgattccaacctccagctccccccacccgctgcctgcggttttgtttctgttaaaacgtcacctgatgaaatagaatgaatcctgaaatgcacctctgggatcgggaatggtctgtgtgttatcagctgcgactggttcactgcgtctggacaagcctcatggggactggggattctggccagtgtaatttctgtcaaccacggacgtttgccttcatgtgtagaatttactgttgttatgcaaattatattttcaattataaatgaaacaagtttgcagatattttagaaatcagagaagggaaacatcacccacagtccctctgctggaacagccacagttggccttgtcctacttacgtccttcagtggatgcttctgggtgctggggttctccattcaggacactgcactctcggaggtgggaggagactgggttgcgtctgtgccgacctgggatgcagtttcaggtcagaatcagaagatgtgcaagttacgcatgacacagctttttaaagtgcttttcccctgcactaatcaagagggaggtcagccctcaggtgtgctggacccgggagggactgtgagctgtaagaagtaacgagccccttgaacttcacaagctggccagggagccatatcccgaatgccactgccacttcctcgtggtgcaaggcttgttgggacct

SEQ ID NO: 356579 - DNA, 2250 bp, Homo sapiens
gcatctattaggcagaggtggggctttgttcttacccacaattggaagttctctatggagtaaaggcggtatgtgtgccacctgattcctttccccatgtgtatctggttagggtcggccacgtgagatccgcaagcattttagaaggtgggaggggaggtgggagctggctacaggccaggcgttggcgtggttccgtgagtgtgctccagccaggcccaaagcttctcctgcccagagggaccgtttcctccagcgtgggtcgggtgcttctgcgcccggaaagagcgccagctcctccttcgggtgacccagggagcggggctgcaggcaaaggcgcaggcggccaaaaaggtgccaaccgggtcctgtggctttcagttgtctctgcccacccaattcacaccatctttccccctcagccgcctgtcctgggacttcaggctcagcaccaaacgcagcaaaagtaggtgcacagagagcggggtcagctcacgcagcccgagcagaatggctgtgctgccgccccaggcccgcggccaccgctgtgtgtgtggcaggagtcagccccccagcgtggggccccgaagcccgcggtccttccacggggagggccaggcccgcagggcgcagacgatgggggacaggctgcgccagcgctcgcctgaggccccgcacacaaacctcaggcccatgggtccgctccgcggggcaggcgtcgtgggcccaaggaggccaggccaggagtctcggcctcggggttacgcggcggcgggcagctcttccgctccgctcagggtgctgctaacccacagccgagcagcgacccgcaggaccggcgagaaccccgccactgcctccggccggaagagaacgtgcagagatgtacgtcacttccggggcgtggcgtggcgggcgtggcgtcccgcccctggcggcgtgcctggtgccctgttccgcgtctgtgcgaccgtccgtcccgagcgcgcagccgcggcaggccaggtcagagcagcccaccatgggatggggagggggtggaggctgcaccccgcgcccacccatccaccagcagccgccggagcgccgcgtggtcaccgttgtctttctcggcctcctgctggacctcctggccttcacgctgctgctgcccctgctgcccgggctgttggagagccacggccgtgcccacgaccccctctatggctcctggcagggcggggtggactggtttgccaccgccatcgggatgccagtggagaagaggtacaacagtgtcctgttcggaggtctcattggctcggcattctctgtcctgcagtttctgtgtgcgccactcactggggccacctctgactgcttggggaggcgcccggtgatgctgctgtgcctgatgggtgtggccacctcatatgcagtctgggccacctctcggagctttgcggccttcctggcctccaggctgattgggggcatcagcaaagggaacgtcagcctctccacggccatcgttgctgacctgggctcgcctctggcccgcagtcaaggcatggcggtcattggggtggccttctcactgggcttcaccctgggccctatgctcggagcctccctgcccctggaaatggcaccctggtttgccctgctcttcgcagcctccgacctgctgttcatcttctgcttcctgccagagacgctgcccctggagaaacgggcgccctctatcgccctggggttccgtgatgcggctgatctgctcagccccctggccctgctgcgcttctcggctgtcgctcgtggccaggacccaccctctggagacaggctcagcagcctgcgccgcctgggcctagtctacttcctctacctcttcctgttctcgggcctggagtacacgctgagcttcctcacacaccagcgcttccagttcagtagcctacagcaggggaagatgtttttcctcatcggcctcaccatggccaccatccagggtgcctatgcccggcggatccaccctggcggggaagttgctgccgtgaagcgggccctcctgctgctggtgcccgccttcctcctcatcggctggggacgttctctgcccgtgctgggcctggggctgctgctctactcctttgcggcggcgttgtggtgccttctgtctccgtggtcgtggtatggtcacagggcgagggccgcatggtaactgggagcagtgtcggcaggccggggccggggcgaagtaaggggaag

SEQ ID NO: 356580 - DNA, 3769 bp, Homo sapiens
tccccccctcccccattccgctaggtacgaggctgggtggtgcacgtgtcttagggtagcgcgcgcctgtctctcttcgggtctcgggcccttgggcgcagcggggcgcgcgccatggcgaaggcgaagaaggtcggggcgcgaaggaaggcctccggggcgccggcgggagcgcgagggggcccggcgaaggccaactccaatccgttcgaggtgaaagttaacaggcagaagttccagatcctgggccggaagacgcgccacgacgtgggactgcccggggtgtctcgcgcacgggccctcaggaagcgtacacagactttactaaaagagtacaaagaaagggataaatccaatgtattcagagataaacgcttcggagaatacaacagcaacatgagccccgaggagaagatgatgaagaggtttgctctggaacagcagcgacatcatgagaaaaaaagcatctacaatctaaatgaagatgaagaattgactcattatggccagtctttggcagacatcgagaagcataatgacattgtggacagtgacagcgatgctgaggatcgaggaacgttgtctgctgagctgactgctgcccactttggaggaggcggtgggctccttcacaagaagactcaacaggaaggcgaggagcgggagaaaccgaagtcccggaaagagctgattgaagagctcattgccaagtcaaaacaagagaagagggagagacaagctcaacgagaagatgccctcgagctcacggagaagctagaccaagactggaaagaaattcagactctcctgtcccacaaaactcccaagtcagagaacagagacaaaaaggaaaaacccaagcccgatgcatatgacatgatggttcgcgagcttggctttgaaatgaaggcgcagccctctaacaggatgaagacggaggcagaattggcaaaggaagagcaggagcacctcaggaagctggaggctgagagacttcgaagaatgcttggaaaggatgaggatgaaaatgttaagaaaccaaaacatatgtcagcagatgatctgaatgatggcttcgtgctagataaagatgacaggcgtttgctttcctacaaagatggaaagatgaatgtcgaggaagatgtccaggaagagcaaagcaaggaagccagtgaccctgagagcaacgaggaagaaggtgacagttcaggcggggaggacacagaggagagcgacagcccagatagccacttggacctggaatccaacgtggagagtgaggaagaaaacgagaagccagcaaaagagcagaggcagactcctgggaaagggttgataagcggcaaggaaagagctggaaaagctaccagagacgagctgccctacacgttcgcagcccctgaatcctatgaggaactgagatctctgttgttaggaagatcgatggaagagcagcttttggtggtggagagaattcagaagtgcaaccacccgagtctcgcagaaggaaacaaagcaaaattagaaaaactgtttggctttcttttggaatacgttggcgatttggctacagatgacccaccagacctcacagtcattgataagttggttgtgcacttatatcatctttgccagatgtttcctgaatctgcaagtgacgctatcaaatttgttctccgagatgcgatgcatgagatggaagaaatgattgagaccaaaggccgggcggcattgccagggttggatgtgctcatttatttgaaaatcactgggctgctatttccaacttccgacttctggcacccagtggtgacccctgccctcgtgtgcctcagtcagctgctcaccaagtgccccatcctgtccctccaggacgtggtgaagggcctgttcgtgtgctgcctgttcctggagtatgtggctttgtcccagaggtttatacctgagcttattaattttcttcttgggattctttacatagcaactccaaacaaagcaagccaaggttccactctggtgcaccctttcagagcgcttgggaagaactcggaactgctcgtggtgtctgctagagaggatgtggccacgtggcagcagagcagcctctccctccgctgggcgagtagactgagggccccaacttcgacagaggccaatcacatccgactgtcctgcctggctgtgggcctggccctgctgaagcgctgcgtgctcatgtacgggtccctgccatccttccacgccatcatggggcctctccgagccctcctcacggatcacctggcggactgcagccacccgcaggagctccaggagctgtgtcagagcacactgaccgaaatggaaagccagaagcagctctgccggccgctgacctgtgagaagagcaagcctgtcccactgaagcttttcacaccccggctggtcaaagtcctcgagtttggaagaaaacaaggcagtagtaaggaggaacaggaaaggaagaggctgatccacaaacacaagcgtgaatttaaaggggccgttcgagaaatccgcaaggacaatcagttcctggcgaggatgcaactctcagaaatcatggaacgggatgcggaaagaaagcggaaagtaaagcagctttttaacagcctggctacacaggaaggcgaatggaaggctctgaagaggaaaaagttcaaaaaataaattacattttataaataaggcaaggaactggacattacctcacatctgcaattccaaccctctgggaggccaaggcaggaagattgcttcagcccaggagttcgagaccagcctgggcaacacaggaagaccccgtctctaccaaaaaaacataaaaattagccaagtgtggtggcacgcacccgagtagctgggattacagacatgtgccaccacgcccagctaattttgtatttttagtagagacggggtttctccatgttggtcaggctggtctcgaattcccgacctcaggtaatccacctgccttggccccccaattataggtgtgagccacagcacccagccaaaaaagtaattttttttagagtaataatgctataatgttggtgtgattccaacctccagctccccccacccgctgcctgcggttttgtttctgttaaaacgtcacctgatgaaatagaatgaatcctgaaatgcacctctgggatcgggaatggtctgtgtgttatcagctgcgactggttcactgcgtctggacaagcctcatggggactggggattctggccagtgtaatttctgtcaaccacggacgtttgccttcatgtgtagaatttactgttgttatgcaaattatattttcaattataaatgaaacaagtttgcagatattttagaaatcagagaagggaaacatcacccacagtccctctgctggaacagccacagttggccttgtcctacttacgtccttcagtggatgcttctgggtgctggggttctccattcaggacactgcactctcggaggtgggaggagactgggttgcgtctgtgccgacctgggatgcagtttcaggtcagaatcagaagatgtgcaagttacgcatgacacagctttttaaagtgcttttcccctgcactaatcaagagggaggtcagccctcaggtgtgctggacccgggagggactgtgagctgtaagaagtaacgagccccttgaacttcacaagctggccagggagccatatcccgaatgccactgccacttcctcgtggtgcaaggcttgttgggacct

SEQ ID NO: 356581 - DNA, 3456 bp, Homo sapiens
tccccccctcccccattccgctaggtacgaggctgggtggtgcacgtgtcttagggtagcgcgcgcctgtctctcttcgggtctcgggcccttgggcgcagcggggcgcgcgccatggcgaaggcgaagaaggtcggggcgcgaaggaaggcctccggggcgccggcgggagcgcgagggggcccggcgaaggccaactccaatccgttcgaggtgaaagttaacaggcagaagttccagatcctgggccggaagacgcgccacgacgtgggactgcccggggtgtctcgcgcacgggccctcaggaagcgtacacagactttactaaaagagtacaaagaaagggataaatccaatgtattcagagataaacgcttcggagaatacaacagcaacatgagccccgaggagaagatgatgaagaggtttgctctggaacagcagcgacatcatgagaaaaaaagcatctacaatctaaatgaagatgaagaattgactcattatggccagtctttggcagacatcgagaagcataatgacattgtggacagtgacagcgatgctgaggatcgaggaacgttgtctgctgagctgactgctgcccactttggaggaggcggtgggctccttcacaagaagactcaacaggaaggcgaggagcgggagaaaccgaagtcccggaaagagctgattgaagagctcattgccaagtcaaaacaagagaagagggagagacaagctcaacgagaagatgccctcgagctcacggagaagctagaccaagactggaaagaaattcagactctcctgtcccacaaaactcccaagtcagagaacagagacaaaaaggaaaaacccaagcccgatgcatatgacatgatggttcgcgagcttggctttgaaatgaaggcgcagccctctaacaggatgaagacggaggcagaattggcaaaggaagagcaggagcacctcaggaagctggaggctgagagacttcgaagaatgcttggaaaggatgaggatgaaaatgttaagaaaccaaaacatatgtcagcagatgatctgaatgatggcttcgtgctagataaagatgacaggcgtttgctttcctacaaagatggaaagatgaatgtcgaggaagatgtccaggaagagcaaagcaaggaagccagtgaccctgagagcaacgaggaagaaggtgacagttcaggcggggaggacacagaggagagcgacagcccagatagccacttggacctggaatccaacgtggagagtgaggaagaaaacgagaagccagcaaaagagcagaggcagactcctgggaaagggttgataagcggcaaggaaagagctggaaaagctaccagagacgagctgccctacacgttcgcagcccctgaatcctatgaggaactgagatctctgttgttaggaagatcgatggaagagcagcttttggtggtggagagaattcagaagtgcaaccacccgagtctcgcagaaggaaacaaagcaaaattagaaaaactgtttggctttcttttggaatacgttggcgatttggctacagatgacccaccagacctcacagtcattgataagttggttgtgcacttatatcatctttgccagatgtttcctgaatctgcaagtgacgctatcaaatttgttctccgagatgcgatgcatgagatggaagaaatgattgagaccaaaggccgggcggcattgccagggttggatgtgctcatttatttgaaaatcactgggctgctatttccaacttccgacttctggcacccagtggtgacccctgccctcgtgtgcctcagtcagctgctcaccaagtgccccatcctgtccctccaggacgtggtgaagggcctgttcgtgtgctgcctgttcctggagtatgtggctttgtcccagaggtttatacctgagcttattaattttcttcttgggattctttacatagcaactccaaacaaagcaagccaaggttccactctggtgcaccctttcagagcgcttgggaagaactcggaactgctcgtggtgtctgctagagaggatgtggccacgtggcagcagagcagcctctccctccgctgggcgagtagactgagggccccaacttcgacagaggccaatcacatccgactgtcctgcctggctgtgggcctggccctgctgaagcgctgcgtgctcatgtacgggtccctgccatccttccacgccatcatggggcctctccgagccctcctcacggatcacctggcggactgcagccacccgcaggagctccaggagctgtgtcagagcacactgaccgaaatggaaagccagaagcagctctgccggccgctgacctgtgagaagagcaagcctgtcccactgaagcttttcacaccccggctggtcaaagtcctcgagtttggaagaaaacaaggcagtagtaaggaggaacaggaaaggaagaggctgatccacaaacacaagcgtgaatttaaaggggccgttcgagaaatccgcaaggacaatcagttcctggcgaggatgcaactctcagaaatcatggaacgggatgcggaaagaaagcggaaagtaaagcagctttttaacagcctggctacacaggaaggcgaatggaaggctctgaagaggaaaaagttcaaaaaataaattacattttataaataaggcaaggaactggacattacctcacatctgcaattccaaccctctgggaggccaaggcaggaagattgcttcagcccaggagttcgagaccagcctgggcaacacaggaagaccccgtctctaccaaaaaaacataaaaattagccaagtgtggtggcacgcacctgtagtcccaactactcgggaggctgaagcaggaggactgcttgagctgagtccaaggttacagtgagccgtgattgagccactgcactccagcctcggccacagtgcaagactgtgtcgcttaaaaaaaaatttttttttttgagacggagttttgctcttgttgcccaggctggagtgcaatggcacaacctccacctcctgggttcaagcgattctcctgcctcagcctcccgagtagctgggattacagacatgtgccaccacgcccagctaattttgtatttttagtagagacggggtttctccatgttggtcaggctggtctcgaattcccgacctcaggtaatccacctgccttggccccccaattataggtgtgagccacagcacccagccaaaaaagtaattttttttagagtaataatgctataatgttggtgtgattccaacctccagctccccccacccgctgcctgcggttttgtttctgttaaaacgtcacctgatgaaatagaatgaatcctgatgcggccggacggcaatattgaataaaaccagataagtgtgacgaaagggtggtgc

SEQ ID NO: 356582 - DNA, 3014 bp, Homo sapiens
gcatctattaggcagaggtggggctttgttcttacccacaattggaagttctctatggagtaaaggcggtatgtgtgccacctgattcctttccccatgtgtatctggttagggtcggccacgtgagatccgcaagcattttagaaggtgggaggggaggtgggagctggctacaggccaggcgttggcgtggttccgtgagtgtgctccagccaggcccaaagcttctcctgcccagagggaccgtttcctccagcgtgggtcgggtgcttctgcgcccggaaagagcgccagctcctccttcgggtgacccagggagcggggctgcaggcaaaggcgcaggcggccaaaaaggtgccaaccgggtcctgtggctttcagttgtctctgcccacccaattcacaccatctttccccctcagccgcctgtcctgggacttcaggctcagcaccaaacgcagcaaaagtaggtgcacagagagcggggtcagctcacgcagcccgagcagaatggctgtgctgccgccccaggcccgcggccaccgctgtgtgtgtggcaggagtcagccccccagcgtggggccccgaagcccgcggtccttccacggggagggccaggcccgcagggcgcagacgatgggggacaggctgcgccagcgctcgcctgaggccccgcacacaaacctcaggcccatgggtccgctccgcggggcaggcgtcgtgggcccaaggaggccaggccaggagtctcggcctcggggttacgcggcggcgggcagctcttccgctccgctcagggtgctgctaacccacagccgagcagcgacccgcaggaccggcgagaaccccgccactgcctccggccggaagagaacgtgcagagatgtacgtcacttccggggcgtggcgtggcgggcgtggcgtcccgcccctggcggcgtgcctggtgccctgttccgcgtctgtgcgaccgtccgtcccgagcgcgcagccgcggcaggccaggtcagagcagcccaccatgggatggggagggggtggaggctgcaccccgcgcccacccatccaccagcagccgccggagcgccgcgtggtcaccgttgtctttctcggcctcctgctggacctcctggccttcacgctgctgctgcccctgctgcccgggctgttggagagccacggccgtgcccacgaccccctctatggctcctggcagggcggggtggactggtttgccaccgccatcgggatgccagtggagaagaggtacaacagtgtcctgttcggaggtctcattggctcggcattctctgtcctgcagtttctgtgtgcgccactcactggggccacctctgactgcttggggaggcgcccggtgatgctgctgtgcctggtatgttcctgggcctgggtgcccatggggaagcctcctcccacccagccagtagccccatggggttaggtggggagagggaggtggctgtgggcccctcatggccactggttggccctcatcgcatcctggcagggggttctcgggggaccagtggctcctgttccagagccaggctttcaaggagctgctcctggcccctaggaaggcactgagaacgcaagtggccctcagatgcttcgaaatagggcagggttgaggggtgttgtctgggttgccaagccctactctgagccactcctggccttaagcgaccgcccctgcctcttggcccctgcccctgggcagatgggtgtggccacctcatatgcagtctgggccacctctcggagctttgcggccttcctggcctccaggctgattgggggcatcagcaaagggaacgtcagcctctccacggccatcgttgctgacctgggctcgcctctggcccgcagtcaaggcatggcggtcattggggtggccttctcactgggcttcaccctgggccctatgctcggagcctccctgcccctggaaatggcaccctggtttgccctgctcttcgcagcctccgacctgctgttcatcttctgcttcctgccagagacgctgcccctggagaaacgggcgccctctatcgccctggggttccgtgatgcggctgatctgctcagccccctggccctgctgcgcttctcggctgtcgctcgtggccaggacccaccctctggagacaggctcagcagcctgcgccgcctgggcctagtctacttcctctacctcttcctgttctcgggcctggagtacacgctgagcttcctcacacaccagcgcttccagttcagtagcctacagcaggggaagatgtttttcctcatcggcctcaccatggccaccatccagggtgcctatgcccggcggatccaccctggcggggaagttgctgccgtgaagcgggccctcctgctgctggtgcccgccttcctcctcatcggctggggacgttctctgcccgtgctgggcctggggctgctgctctactcctttgccgccgccgttgtggtgccctgcctgtcctccgtggtcgctggctatggctcaccagggcagaagggcacggtcatgggtacactgcgcagcctaggtgctctggccagggccgcggggcccctggtggccgcttcagtgtactggctggccggggcccaggcctgcttcaccacgtggtccgggctctttttgctccccttcttcctcctgcagaagctgagttacccggcacagacgctcaaggctgagtagctgagccactgtgcccaggctgtgggcaccaggcagagtgggagcctaggtcaggcccctgcccactgcctgacccccaccccccgccagtccagggagaccctgtgggtgggggccggcccctaagcaggaagctcaggcagctcctccagacttacttactccttcagtgactccgagctgcagcactccaaggctgtcagggcttctgtttgttttttaaactatgcaccaggtttctgatgatgaaataaagcacctgtttgttttataccaa

SEQ ID NO: 356583 - DNA, 2641 bp, Homo sapiens
gcatctattaggcagaggtggggctttgttcttacccacaattggaagttctctatggagtaaaggcggtatgtgtgccacctgattcctttccccatgtgtatctggttagggtcggccacgtgagatccgcaagcattttagaaggtgggaggggaggtgggagctggctacaggccaggcgttggcgtggttccgtgagtgtgctccagccaggcccaaagcttctcctgcccagagggaccgtttcctccagcgtgggtcgggtgcttctgcgcccggaaagagcgccagctcctccttcgggtgacccagggagcggggctgcaggcaaaggcgcaggcggccaaaaaggtgccaaccgggtcctgtggctttcagttgtctctgcccacccaattcacaccatctttccccctcagccgcctgtcctgggacttcaggctcagcaccaaacgcagcaaaagtaggtgcacagagagcggggtcagctcacgcagcccgagcagaatggctgtgctgccgccccaggcccgcggccaccgctgtgtgtgtggcaggagtcagccccccagcgtggggccccgaagcccgcggtccttccacggggagggccaggcccgcagggcgcagacgatgggggacaggctgcgccagcgctcgcctgaggccccgcacacaaacctcaggcccatgggtccgctccgcggggcaggcgtcgtgggcccaaggaggccaggccaggagtctcggcctcggggttacgcggcggcgggcagctcttccgctccgctcagggtgctgctaacccacagccgagcagcgacccgcaggaccggcgagaaccccgccactgcctccggccggaagagaacgtgcagagatgtacgtcacttccggggcgtggcgtggcgggcgtggcgtcccgcccctggcggcgtgcctggtgccctgttccgcgtctgtgcgaccgtccgtcccgagcgcgcagccgcggcaggccaggtcagagcagcccaccatgggatggggagggggtggaggctgcaccccgcgcccacccatccaccagcagccgccggagcgccgcgtggtcaccgttgtctttctcggcctcctgctggacctcctggccttcacgctgctgctgcccctgctgcccgggctgttggagagccacggccgtgcccacgaccccctctatggctcctggcagggcggggtggactggtttgccaccgccatcgggatgccagtggagaagaggtacaacagtgtcctgttcggaggtctcattggctcggcattctctgtcctgcagtttctgtgtgcgccactcactggggccacctctgactgcttggggaggcgcccggtgatgctgctgtgcctgtctgggccacctctcggagctttgcggccttcctggcctccaggctgattgggggcatcagcaaagggaacgtcagcctctccacggccatcgttgctgacctgggctcgcctctggcccgcagtcaaggcatggcggtcattggggtggccttctcactgggcttcaccctgggccctatgctcggagcctccctgcccctggaaatggcaccctggtttgccctgctcttcgcagcctccgacctgctgttcatcttctgcttcctgccagagacgctgcccctggagaaacgggcgccctctatcgccctggggttccgtgatgcggctgatctgctcagccccctggccctgctgcgcttctcggctgtcgctcgtggccaggacccaccctctggagacaggctcagcagcctgcgccgcctgggcctagtctacttcctctacctcttcctgttctcgggcctggagtacacgctgagcttcctcacacaccagcgcttccagttcagtagcctacagcaggggaagatgtttttcctcatcggcctcaccatggccaccatccagggtgcctatgcccggcggatccaccctggcggggaagttgctgccgtgaagcgggccctcctgctgctggtgcccgccttcctcctcatcggctggggacgttctctgcccgtgctgggcctggggctgctgctctactcctttgccgccgccgttgtggtgccctgcctgtcctccgtggtcgctggctatggctcaccagggcagaagggcacggtcatgggtacactgcgcagcctaggtgctctggccagggccgcggggcccctggtggccgcttcagtgtactggctggccggggcccaggcctgcttcaccacgtggtccgggctctttttgctccccttcttcctcctgcagaagctgagttacccggcacagacgctcaaggctgagtagctgagccactgtgcccaggctgtgggcaccaggcagagtgggagcctaggtcaggcccctgcccactgcctgacccccaccccccgccagtccagggagaccctgtgggtgggggccggcccctaagcaggaagctcaggcagctcctccagacttacttactccttcagtgactccgagctgcagcactccaaggctgtcagggcttctgtttgttttttaaactatgcaccaggtttctgatgatgaaataaagcacctgtttgttttataccaa

SEQ ID NO: 356584 - DNA, 2563 bp, Homo sapiens
gcatctattaggcagaggtggggctttgttcttacccacaattggaagttctctatggagtaaaggcggtatgtgtgccacctgattcctttccccatgtgtatctggttagggtcggccacgtgagatccgcaagcattttagaaggtgggaggggaggtgggagctggctacaggccaggcgttggcgtggttccgtgagtgtgctccagccaggcccaaagcttctcctgcccagagggaccgtttcctccagcgtgggtcgggtgcttctgcgcccggaaagagcgccagctcctccttcgggtgacccagggagcggggctgcaggcaaaggcgcaggcggccaaaaaggtgccaaccgggtcctgtggctttcagttgtctctgcccacccaattcacaccatctttccccctcagccgcctgtcctgggacttcaggctcagcaccaaacgcagcaaaagtaggtgcacagagagcggggtcagctcacgcagcccgagcagaatggctgtgctgccgccccaggcccgcggccaccgctgtgtgtgtggcaggagtcagccccccagcgtggggccccgaagcccgcggtccttccacggggagggccaggcccgcagggcgcagacgatgggggacaggctgcgccagcgctcgcctgaggccccgcacacaaacctcaggcccatgggtccgctccgcggggcaggcgtcgtgggcccaaggaggccaggccaggagtctcggcctcggggttacgcggcggcgggcagctcttccgctccgctcagggtgctgctaacccacagccgagcagcgacccgcaggaccggcgagaaccccgccactgcctccggccggaagagaacgtgcagagatgtacgtcacttccggggcgtggcgtggcgggcgtggcgtcccgcccctggcggcgtgcctggtgccctgttccgcgtctgtgcgaccgtccgtcccgagcgcgcagccgcggcaggccaggtcagagcagcccaccatgggatggggagggggtggaggctgcaccccgcgcccacccatccaccagcagccgccggagcgccgcgtggtcaccgttgtctttctcggcctcctgctggacctcctggccttcacgctgctgctgcccctgctgcccgggctgttggagagccacggccgtgcccacgaccccctctatggctcctggcagggcggggtggactggtttgccaccgccatcgggatgccagtggagaagaggtacaacagtgtcctgttcggaggtctcattggctcggcattctctgtcctgcagtttctgtgtgcgccactcactggggccacctctgactgcttggggaggcgcccggtgatgctgctgtgcctgatgggtgtggccacctcatatgcagtctgggccacctctcggagctttgcggccttcctggcctccaggctgattgggggcatcagcaaagggaacgtcagcctctccacggccatcgttgctgacctgggctcgcctctggcccgcagtcaaggcatgcctccgacctgctgttcatcttctgcttcctgccagagacgctgcccctggagaaacgggcgccctctatcgccctggggttccgtgatgcggctgatctgctcagccccctggccctgctgcgcttctcggctgtcgctcgtggccaggacccaccctctggagacaggctcagcagcctgcgccgcctgggcctagtctacttcctctacctcttcctgttctcgggcctggagtacacgctgagcttcctcacacaccagcgcttccagttcagtagcctacagcaggggaagatgtttttcctcatcggcctcaccatggccaccatccagggtgcctatgcccggcggatccaccctggcggggaagttgctgccgtgaagcgggccctcctgctgctggtgcccgccttcctcctcatcggctggggacgttctctgcccgtgctgggcctggggctgctgctctactcctttgccgccgccgttgtggtgccctgcctgtcctccgtggtcgctggctatggctcaccagggcagaagggcacggtcatgggtacactgcgcagcctaggtgctctggccagggccgcggggcccctggtggccgcttcagtgtactggctggccggggcccaggcctgcttcaccacgtggtccgggctctttttgctccccttcttcctcctgcagaagctgagttacccggcacagacgctcaaggctgagtagctgagccactgtgcccaggctgtgggcaccaggcagagtgggagcctaggtcaggcccctgcccactgcctgacccccaccccccgccagtccagggagaccctgtgggtgggggccggcccctaagcaggaagctcaggcagctcctccagacttacttactccttcagtgactccgagctgcagcactccaaggctgtcagggcttctgtttgttttttaaactatgcaccaggtttctgatgatgaaataaagcacctgtttgttttataccaa

SEQ ID NO: 356585 - DNA, 2925 bp, Homo sapiens
tccccccctcccccattccgctaggtacgaggctgggtggtgcacgtgtcttagggtagcgcgcgcctgtctctcttcgggtctcgggcccttgggcgcagcggggcgcgcgccatggcgaaggcgaagaaggtcggggcgcgaaggaaggcctccggggcgccggcgggagcgcgagggggcccggcgaaggccaactccaatccgttcgaggtgaaagttaacaggcagaagttccagatcctgggccggaagacgcgccacgacgtgggactgcccggggtgtctcgcgcacgggccctcaggaagcgtacacagactttactaaaagagtacaaagaaagggataaatccaatgtattcagagataaacgcttcggagaatacaacagcaacatgagccccgaggagaagatgatgaagaggtttgctctggaacagcagcgacatcatgagaaaaaaagcatctacaatctaaatgaagatgaagaattgactcattatggccagtctttggcagacatcgagaagcataatgacattgtggacagtgacagcgatgctgaggatcgaggaacgttgtctgctgagctgactgctgcccactttggaggaggcggtgggctccttcacaagaagactcaacaggaaggcgaggagcgggagaaaccgaagtcccggaaagagctgattgaagagctcattgccaagtcaaaacaagagaagagggagagacaagctcaacgagaagatgccctcgagctcacggagaagctagaccaagactggaaagaaattcagactctcctgtcccacaaaactcccaagtcagagaacagagacaaaaaggaaaaacccaagcccgatgcatatgacatgatggttcgcgagcttggctttgaaatgaaggcgcagccctctaacaggatgaagacggaggcagaattggcaaaggaagagcaggagcacctcaggaagctggaggctgagagacttcgaagaatgcttggaaaggatgaggatgaaaatgttaagaaaccaaaacatatgtcagcagatgatctgaatgatggcttcgtgctagataaagatgacaggcgtttgctttcctacaaagatggaaagatgaatgtcgaggaagatgtccaggaagagcaaagcaaggaagccagtgaccctgagagcaacgaggaagaaggtgacagttcaggcggggaggacacagaggagagcgacagcccagatagccacttggacctggaatccaacgtggagagtgaggaagaaaacgagaagccagcaaaagagcagaggcagactcctgggaaagggttgataagcggcaaggaaagagctggaaaagctaccagagacgagctgccctacacgttcgcagcccctgaatcctatgaggaactgagatctctgttgttaggaagatcgatggaagagcagcttttggtggtggagagaattcagaagtgcaaccacccgagtctcgcagaaggaaacaaagcaaaattagaaaaactgtttggctttcttttggaatacgttggcgatttggctacagatgacccaccagacctcacagtcattgataagttggttgtgcacttatatcatctttgccagatgtttcctgaatctgcaagtgacgctatcaaatttgttctccgagatgcgatgcatgagatggaagaaatgattgagaccaaaggccgggcggcattgccagggttggatgtgctcatttatttgaaaatcactgggctgctatttccaacttccgacttctggcacccagtggtgacccctgccctcgtgtgcctcagtcagctgctcaccaagtgccccatcctgtccctccaggacgtggtgaagggcctgttcgtgtgctgcctgttcctggagtatgtggctttgtcccagaggtttatacctgagcttattaattttcttcttgggattctttacatagcaactccaaacaaagcaagccaaggttccactctggtgcaccctttcagagcgcttgggaagaactcggaactgctcgtggtgtctgctagagaggatgtggccacgtggcagcagagcagcctctccctccgctggtctcgaattcccgacctcaggtaatccacctgccttggccccccaattataggtgtgagccacagcacccagccaaaaaagtaattttttttagagtaataatgctataatgttggtgtgattccaacctccagctccccccacccgctgcctgcggttttgtttctgttaaaacgtcacctgatgaaatagaatgaatcctgaaatgcacctctgggatcgggaatggtctgtgtgttatcagctgcgactggttcactgcgtctggacaagcctcatggggactggggattctggccagtgtaatttctgtcaaccacggacgtttgccttcatgtgtagaatttactgttgttatgcaaattatattttcaattataaatgaaacaagtttgcagatattttagaaatcagagaagggaaacatcacccacagtccctctgctggaacagccacagttggccttgtcctacttacgtccttcagtggatgcttctgggtgctggggttctccattcaggacactgcactctcggaggtgggaggagactgggttgcgtctgtgccgacctgggatgcagtttcaggtcagaatcagaagatgtgcaagttacgcatgacacagctttttaaagtgcttttcccctgcactaatcaagagggaggtcagccctcaggtgtgctggacccgggagggactgtgagctgtaagaagtaacgagccccttgaacttcacaagctggccagggagccatatcccgaatgccactgccacttcctcgtggtgcaaggcttgttgggacct

SEQ ID NO: 356586 - DNA, 3978 bp, Homo sapiens
tccccccctcccccattccgctaggtacgaggctgggtggtgcacgtgtcttagggtagcgcgcgcctgtctctcttcgggtctcgggcccttgggcgcagcggggcgcgcgccatggcgaaggcgaagaaggtcggggcgcgaaggaaggcctccggggcgccggcgggagcgcgagggggcccggcgaaggccaactccaatccgttcgaggtgaaagttaacaggcagaagttccagatcctgggccggaagacgcgccacgacgtgggactgcccggggtgtctcgcgcacgggccctcaggaagcgtacacagactttactaaaagagtacaaagaaagggataaatccaatgtattcagagataaacgcttcggagaatacaacagcaacatgagccccgaggagaagatgatgaagaggtttgctctggaacagcagcgacatcatgagaaaaaaagcatctacaatctaaatgaagatgaagaattgactcattatggccagtctttggcagacatcgagaagcataatgacattgtggacagtgacagcgatgctgaggatcgaggaacgttgtctgctgagctgactgctgcccactttggaggaggcggtgggctccttcacaagaagactcaacaggaaggcgaggagcgggagaaaccgaagtcccggaaagagctgattgaagagctcattgccaagtcaaaacaagagaagagggagagacaagctcaacgagaagatgccctcgagctcacggagaagctagaccaagactggaaagaaattcagactctcctgtcccacaaaactcccaagtcagagaacagagacaaaaaggaaaaacccaagcccgatgcatatgacatgatggttcgcgagcttggctttgaaatgaaggcgcagccctctaacaggatgaagacggaggcagaattggcaaaggaagagcaggagcacctcaggaagctggaggctgagagacttcgaagaatgcttggaaaggatgaggatgaaaatgttaagaaaccaaaacatatgtcagcagatgatctgaatgatggcttcgtgctagataaagatgacaggcgtttgctttcctacaaagatggaaagatgaatgtcgaggaagatgtccaggaagagcaaagcaaggaagccagtgaccctgagagcaacgaggaagaaggtgacagttcaggcggggaggacacagaggagagcgacagcccagatagccacttggacctggaatccaacgtggagagtgaggaagaaaacgagaagccagcaaaagagcagaggcagactcctgggaaagggttgataagcggcaaggaaagagctggaaaagctaccagagacgagctgccctacacgttcgcagcccctgaatcctatgaggaactgagatctctgttgttaggaagatcgatggaagagcagcttttggtggtggagagaattcagaagtgcaaccacccgagtctcgcagaaggaaacaaagcaaaattagaaaaactgtttggctttcttttggaatacgttggcgatttggctacagatgacccaccagacctcacagtcattgataagttggttgtgcacttatatcatctttgccagatgtttcctgaatctgcaagtgacgctatcaaatttgttctccgagatgcgatgcatgagatggaagaaatgattgagaccaaaggccgggcggcattgccagggttggatgtgctcatttatttgaaaatcactgggctgctatttccaacttccgacttctggcacccagtggtgacccctgccctcgtgtgcctcagtcagctgctcaccaagtgccccatcctgtccctccaggacgtggtgaagggcctgttcgtgtgctgcctgttcctggagtatgtggctttgtcccagaggtttatacctgagcttattaattttcttcttgggattctttacatagcaactccaaacaaagcaagccaagagcgcttgggaagaactcggaactgctcgtggtgtctgctagagaggatgtggccacgtggcagcagagcagcctctccctccgctgggcgagtagactgagggccccaacttcgacagaggccaatcacatccgactgtcctgcctggctgtgggcctggccctgctgaagcgctgcgtgctcatgtacgggtccctgccatccttccacgccatcatggggcctctccgagccctcctcacggatcacctggcggactgcagccacccgcaggagctccaggagctgtgtcagagcacactgaccgaaatggaaagccagaagcagctctgccggccgctgacctgtgagaagagcaagcctgtcccactgaagcttttcacaccccggctggtcaaagtcctcgagtttggaagaaaacaaggcagtagtaaggaggaacaggaaaggaagaggctgatccacaaacacaagcgtgaatttaaaggggccgttcgagaaatccgcaaggacaatcagttcctggcgaggatgcaactctcagaaatcatggaacgggatgcggaaagaaagcggaaagtaaagcagctttttaacagcctggctacacaggaaggcgaatggaaggctctgaagaggaaaaagttcaaaaaataaattacattttataaataaggcaaggaactggacattacctcacatctgcaattccaaccctctgggaggccaaggcaggaagattgcttcagcccaggagttcgagaccagcctgggcaacacaggaagaccccgtctctaccaaaaaaacataaaaattagccaagtgtggtggcacgcacctgtagtcccaactactcgggaggctgaagcaggaggactgcttgagctgagtccaaggttacagtgagccgtgattgagccactgcactccagcctcggccacagtgcaagactgtgtcgcttaaaaaaaaatttttttttttgagacggagttttgctcttgttgcccaggctggagtgcaatggcacaacctccacctcctgggttcaagcgattctcctgcctcagcctcccgagtagctgggattacagacatgtgccaccacgcccagctaattttgtatttttagtagagacggggtttctccatgttggtcaggctggtctcgaattcccgacctcaggtaatccacctgccttggccccccaattataggtgtgagccacagcacccagccaaaaaagtaattttttttagagtaataatgctataatgttggtgtgattccaacctccagctccccccacccgctgcctgcggttttgtttctgttaaaacgtcacctgatgaaatagaatgaatcctgaaatgcacctctgggatcgggaatggtctgtgtgttatcagctgcgactggttcactgcgtctggacaagcctcatggggactggggattctggccagtgtaatttctgtcaaccacggacgtttgccttcatgtgtagaatttactgttgttatgcaaattatattttcaattataaatgaaacaagtttgcagatattttagaaatcagagaagggaaacatcacccacagtccctctgctggaacagccacagttggccttgtcctacttacgtccttcagtggatgcttctgggtgctggggttctccattcaggacactgcactctcggaggtgggaggagactgggttgcgtctgtgccgacctgggatgcagtttcaggtcagaatcagaagatgtgcaagttacgcatgacacagctttttaaagtgcttttcccctgcactaatcaagagggaggtcagccctcaggtgtgctggacccgggagggactgtgagctgtaagaagtaacgagccccttgaacttcacaagctggccagggagccatatcccgaatgccactgccacttcctcgtggtgcaaggcttgttgggacct

SEQ ID NO: 356587 - DNA, 3981 bp, Homo sapiens
tccccccctcccccattccgctaggtacgaggctgggtggtgcacgtgtcttagggtagcgcgcgcctgtctctcttcgggtctcgggcccttgggcgcagcggggcgcgcgccatggcgaaggcgaagaaggtcggggcgcgaaggaaggcctccggggcgccggcgggagcgcgagggggcccggcgaaggccaactccaatccgttcgaggtgaaagttaacaggcagaagttccagatcctgggccggaagacgcgccacgacgtgggactgcccggggtgtctcgcgcacgggccctcaggaagcgtacacagactttactaaaagagtacaaagaaagggataaatccaatgtattcagagataaacgcttcggagaatacaacagcaacatgagccccgaggagaagatgatgaagaggtttgctctggaacagcagcgacatcatgagaaaaaaagcatctacaatctaaatgaagatgaagaattgactcattatggccagtctttggcagacatcgagaagcataatgacattgtggacagtgacagcgatgctgaggatcgaggaacgttgtctgctgagctgactgctgcccactttggaggaggcggtgggctccttcacaagaagactcaacaggaaggcgaggagcgggagaaaccgaagtcccggaaagagctgattgaagagctcattgccaagtcaaaacaagagaagagggagagacaagctcaacgagaagatgccctcgagctcacggagaagctagaccaagactggaaagaaattcagactctcctgtcccacaaaactcccaagtcagagaacagagacaaaaaggaaaaacccaagcccgatgcatatgacatgatggttcgcgagcttggctttgaaatgaaggcgcagccctctaacaggatgaagacggaggcagaattggcaaaggaagagcaggagcacctcaggaagctggaggctgagagacttcgaagaatgcttggaaaggatgaggatgaaaatgttaagaaaccaaaacatatgtcagcagatgatctgaatgatggcttcgtgctagataaagatgacaggcgtttgctttcctacaaagatggaaagatgaatgtcgaggaagatgtccaggaagagcaaagcaaggaagccagtgaccctgagagcaacgaggaagaaggtgacagttcaggcggggaggacacagaggagagcgacagcccagatagccacttggacctggaatccaacgtggagagtgaggaagaaaacgagaagccagcaaaagagcagaggcagactcctgggaaagggttgataagcggcaaggaaagagctggaaaagctaccagagacgagctgccctacacgttcgcagcccctgaatcctatgaggaactgagatctctgttgttaggaagatcgatggaagagcagcttttggtggtggagagaattcagaagtgcaaccacccgagtctcgcagaaggaaacaaagcaaaattagaaaaactgtttggctttcttttggaatacgttggcgatttggctacagatgacccaccagacctcacagtcattgataagttggttgtatgtttcctgaatctgcaagtgacgctatcaaatttgttctccgagatgcgatgcatgagatggaagaaatgattgagaccaaaggccgggcggcattgccagggttggatgtgctcatttatttgaaaatcactgggctgctatttccaacttccgacttctggcacccagtggtgacccctgccctcgtgtgcctcagtcagctgctcaccaagtgccccatcctgtccctccaggacgtggtgaagggcctgttcgtgtgctgcctgttcctggagtatgtggctttgtcccagaggtttatacctgagcttattaattttcttcttgggattctttacatagcaactccaaacaaagcaagccaaggttccactctggtgcaccctttcagagcgcttgggaagaactcggaactgctcgtggtgtctgctagagaggatgtggccacgtggcagcagagcagcctctccctccgctgggcgagtagactgagggccccaacttcgacagaggccaatcacatccgactgtcctgcctggctgtgggcctggccctgctgaagcgctgcgtgctcatgtacgggtccctgccatccttccacgccatcatggggcctctccgagccctcctcacggatcacctggcggactgcagccacccgcaggagctccaggagctgtgtcagagcacactgaccgaaatggaaagccagaagcagctctgccggccgctgacctgtgagaagagcaagcctgtcccactgaagcttttcacaccccggctggtcaaagtcctcgagtttggaagaaaacaaggcagtagtaaggaggaacaggaaaggaagaggctgatccacaaacacaagcgtgaatttaaaggggccgttcgagaaatccgcaaggacaatcagttcctggcgaggatgcaactctcagaaatcatggaacgggatgcggaaagaaagcggaaagtaaagcagctttttaacagcctggctacacaggaaggcgaatggaaggctctgaagaggaaaaagttcaaaaaataaattacattttataaataaggcaaggaactggacattacctcacatctgcaattccaaccctctgggaggccaaggcaggaagattgcttcagcccaggagttcgagaccagcctgggcaacacaggaagaccccgtctctaccaaaaaaacataaaaattagccaagtgtggtggcacgcacctgtagtcccaactactcgggaggctgaagcaggaggactgcttgagctgagtccaaggttacagtgagccgtgattgagccactgcactccagcctcggccacagtgcaagactgtgtcgcttaaaaaaaaatttttttttttgagacggagttttgctcttgttgcccaggctggagtgcaatggcacaacctccacctcctgggttcaagcgattctcctgcctcagcctcccgagtagctgggattacagacatgtgccaccacgcccagctaattttgtatttttagtagagacggggtttctccatgttggtcaggctggtctcgaattcccgacctcaggtaatccacctgccttggccccccaattataggtgtgagccacagcacccagccaaaaaagtaattttttttagagtaataatgctataatgttggtgtgattccaacctccagctccccccacccgctgcctgcggttttgtttctgttaaaacgtcacctgatgaaatagaatgaatcctgaaatgcacctctgggatcgggaatggtctgtgtgttatcagctgcgactggttcactgcgtctggacaagcctcatggggactggggattctggccagtgtaatttctgtcaaccacggacgtttgccttcatgtgtagaatttactgttgttatgcaaattatattttcaattataaatgaaacaagtttgcagatattttagaaatcagagaagggaaacatcacccacagtccctctgctggaacagccacagttggccttgtcctacttacgtccttcagtggatgcttctgggtgctggggttctccattcaggacactgcactctcggaggtgggaggagactgggttgcgtctgtgccgacctgggatgcagtttcaggtcagaatcagaagatgtgcaagttacgcatgacacagctttttaaagtgcttttcccctgcactaatcaagagggaggtcagccctcaggtgtgctggacccgggagggactgtgagctgtaagaagtaacgagccccttgaacttcacaagctggccagggagccatatcccgaatgccactgccacttcctcgtggtgcaaggcttgttgggacct

SEQ ID NO: 356588 - DNA, 2210 bp, Homo sapiens
gccatcctgtccctccaggatggggcacttggtgagcagctgactgaggcacaccaagtgccccatcctgtccctccaggacgtggtgaagggcctgttcgtgtgctgcctgttcctggagtatgtggctttgtcccagaggtttatacctgagcttattaattttcttcttgggattctttacatagcaactccaaacaaagcaagccaaggttccactctggtgcaccctttcagagcgcttgggaagaactcggaactgctcgtggtgtctgctagagaggatgtggccacgtggcagcagagcagcctctccctccgctgggcgagtagactgagggccccaacttcgacagaggccaatcacatccgactgtcctgcctggctgtgggcctggccctgctgaagcgctgcgtgctcatgtacgggtccctgccatccttccacgccatcatggggcctctccgagccctcctcacggatcacctggcggactgcagccacccgcaggagctccaggagctgtgtcagagcacactgaccgaaatggaaagccagaagcagctctgccggccgctgacctgtgagaagagcaagcctgtcccactgaagcttttcacaccccggctggtcaaagtcctcgagtttggaagaaaacaaggcagtagtaaggaggaacaggaaaggaagaggctgatccacaaacacaagcgtgaatttaaaggggccgttcgagaaatccgcaaggacaatcagttcctggcgaggatgcaactctcagaaatcatggaacgggatgcggaaagaaagcggaaagtaaagcagctttttaacagcctggctacacaggaaggcgaatggaaggctctgaagaggaaaaagttcaaaaaataaattacattttataaataaggcaaggaactggacattacctcacatctgcaattccaaccctctgggaggccaaggcaggaagattgcttcagcccaggagttcgagaccagcctgggcaacacaggaagaccccgtctctaccaaaaaaacataaaaattagccaagtgtggtggcacgcacctgtagtcccaactactcgggaggctgaagcaggaggactgcttgagctgagtccaaggttacagtgagccgtgattgagccactgcactccagcctcggccacagtgcaagactgtgtcgcttaaaaaaaaatttttttttttgagacggagttttgctcttgttgcccaggctggagtgcaatggcacaacctccacctcctgggttcaagcgattctcctgcctcagcctcccgagtagctgggattacagacatgtgccaccacgcccagctaattttgtatttttagtagagacggggtttctccatgttggtcaggctggtctcgaattcccgacctcaggtaatccacctgccttggccccccaattataggtgtgagccacagcacccagccaaaaaagtaattttttttagagtaataatgctataatgttggtgtgattccaacctccagctccccccacccgctgcctgcggttttgtttctgttaaaacgtcacctgatgaaatagaatgaatcctgaaatgcacctctgggatcgggaatggtctgtgtgttatcagctgcgactggttcactgcgtctggacaagcctcatggggactggggattctggccagtgtaatttctgtcaaccacggacgtttgccttcatgtgtagaatttactgttgttatgcaaattatattttcaattataaatgaaacaagtttgcagatattttagaaatcagagaagggaaacatcacccacagtccctctgctggaacagccacagttggccttgtcctacttacgtccttcagtggatgcttctgggtgctggggttctccattcaggacactgcactctcggaggtgggaggagactgggttgcgtctgtgccgacctgggatgcagtttcaggtcagaatcagaagatgtgcaagttacgcatgacacagctttttaaagtgcttttcccctgcactaatcaagagggaggtcagccctcaggtgtgctggacccgggagggactgtgagctgtaagaagtaacgagccccttgaacttcacaagctggccagggagccatatcccgaatgccactgccacttcctcgtggtgcaaggcttgttgggacct

SEQ ID NO: 356589 - DNA, 2204 bp, Homo sapiens
acgtttctggctgtgaggagcacaggctatggtgacctccaactccccaagtcccctcctttcagagagtgctctcaggggccagcccacggccctccctcttcaagaagacagtggctttacttcgttccggctgtgccaggacttgagcagccacagccttggcttacccccccgcccaccggtaggcgcacagcaagggcaccatcctgctgcagggagctcgcagcactgtcctcacgctgccttgacaccacagaacccgtgcgtggagctcagggcacgcagcaggtgagtcatcgcagagtcggggatttcgtgtttttcaggagctgtgtcagagcacactgaccgaaatggaaagccagaagcagctctgccggccgctgacctgtgagaagagcaagcctgtcccactgaagcttttcacaccccggctggtcaaagtgtgtgggtgctggcagcatctccctgggaggccagggctgtgggctcagtgggagctgacggggggcgtctgccagttctgcagttgagcagatgactacggagtgaagccacactcccaagcaggctctggctgagaggtggggacagactcttgcttccttaacagtggctttctggttgtagcctcgagtttggaagaaaacaaggcagtagtaaggaggaacaggaaaggaagaggctgatccacaaacacaagcgtgaatttaaaggggccgttcgagaaatccgcaaggacaatcagttcctggcgaggatgcaactctcagaaatcatggaacgggatgcggaaagaaagcggaaagtaaagcagctttttaacagcctggctacacaggaaggcgaatggaaggctctgaagaggaaaaagttcaaaaaataaattacattttataaataaggcaaggaactggacattacctcacatctgcaattccaaccctctgggaggccaaggcaggaagattgcttcagcccaggagttcgagaccagcctgggcaacacaggaagaccccgtctctaccaaaaaaacataaaaattagccaagtgtggtggcacgcacctgtagtcccaactactcgggaggctgaagcaggaggactgcttgagctgagtccaaggttacagtgagccgtgattgagccactgcactccagcctcggccacagtgcaagactgtgtcgcttaaaaaaaaatttttttttttgagacggagttttgctcttgttgcccaggctggagtgcaatggcacaacctccacctcctgggttcaagcgattctcctgcctcagcctcccgagtagctgggattacagacatgtgccaccacgcccagctaattttgtatttttagtagagacggggtttctccatgttggtcaggctggtctcgaattcccgacctcaggtaatccacctgccttggccccccaattataggtgtgagccacagcacccagccaaaaaagtaattttttttagagtaataatgctataatgttggtgtgattccaacctccagctccccccacccgctgcctgcggttttgtttctgttaaaacgtcacctgatgaaatagaatgaatcctgaaatgcacctctgggatcgggaatggtctgtgtgttatcagctgcgactggttcactgcgtctggacaagcctcatggggactggggattctggccagtgtaatttctgtcaaccacggacgtttgccttcatgtgtagaatttactgttgttatgcaaattatattttcaattataaatgaaacaagtttgcagatattttagaaatcagagaagggaaacatcacccacagtccctctgctggaacagccacagttggccttgtcctacttacgtccttcagtggatgcttctgggtgctggggttctccattcaggacactgcactctcggaggtgggaggagactgggttgcgtctgtgccgacctgggatgcagtttcaggtcagaatcagaagatgtgcaagttacgcatgacacagctttttaaagtgcttttcccctgcactaatcaagagggaggtcagccctcaggtgtgctggacccgggagggactgtgagctgtaagaagtaacgagccccttgaacttcacaagctggccagggagccatatcccgaatgccactgccacttcctcgtggtgcaaggcttgttgggacct

SEQ ID NO: 356590 - DNA, 106 bp, Homo sapiens
gtttaatatagtttctggaatttaatcattagtcattagaatgatgttagaataaaatttaggattaggaatatagctgttttgtattttgccacatatgtttgtc

SEQ ID NO: 356591 - DNA, 229 bp, Homo sapiens
gaaaacagatgctccagggctcctgctccaagccaaggcctcacactgaggagaaagtgctgggactggattcaaaaaggagcaaaacagggacagggacaaagaaaaggcaggtaaaactgggagaggggaagcaggaaacctgtacaaaagccacagccgaaggggctgtaacagggcagtgtatctcccaagtctccttccatgagttgaggaaaactagcgtcac

SEQ ID NO: 356592 - DNA, 1203 bp, Homo sapiens
ccacttagttccctaccacaagaccttgaaagaaactggaaccccaggtctccagcccagagattttgttggaagtttccatttgcaggaaatgactgcagggcacatgtgggaagtgacaggaatttgaggactaacattttagttttcctcatttctttttaaatctgagcaattgttcattgatcgataatctatgttcttacattcagataaataaaaacaccaactggctattttgttcttacttagttttatgtgtatgtccaggcatttgccactgctcctaaatagctctccctgaagtcttctggtcatgagttaggtttcttatccagaagctcatgtagtgccagagcttagctctcctatgacaacacaatcacattattgaaacatctatttagggatctgtcttctctaatagattataaacgccttgagcttgggtatcgtgatttaatgatgaatcctccatggtatctgaatcccagaatcctacaatcctgcatggtatctgaaacatactatgctcttaaaaaaaaaaaaaaaactttgtaaatggaacttccctcaaggagtcagggtttaagtcaaacatgtttccctttcaaagccgtgggcatgagaatagaggctgttaggagacacagtagtagttgactgcaaaagtgtctgtcagtcagttgtgtggcccaagactctttttatcagttccaacaactgaaaaatgagagggttttagtggaagatctctgtactgctaatattttaagatctcgaagtctttattgagcacctagtatgtgtacaacactatgccagttactaagagagagatgaaaaaataagatatctccattgccctaagagagcataaaatcttatctcaaggaaaaacaaggcaaacactcctagcctacctttacagacacgcacagacatgagttaacacagttgtaaactgttctaaagaagataaaggctcaaggagtgaaaaggcatgaaatagaaacaaaagcaactgacctatgagtttgggcaataatcagtaataataccagctaaagtgtatctaaggcttatagtgccaggtactatgcaaaatgaatcataggagctgcaccttttgttcattttacaaatggggaaacggaggtttaggagagtttagtgactcgttcaaggtgacatactaataag

SEQ ID NO: 356593 - DNA, 690 bp, Homo sapiens
  misc_feature (610)..(610): n is a, c, g, or t
caatattgggttcaccttttgtgcacaagttgaaagctcaatgtgaaagtgagaggagaagatataaaatgtctttattatattctataatgtctcgtgaactcttcaatgcatttctgataaaaattttctatttagatggatgtgtgtgtcagcaagaattaaaaatgtatattctttgaatttcaaagcattgcattattcctagactagtaattggaacaaattattatttacatggcaatagctagcacattcaccatctttacagactagaaccagcccctctctgggcagacgtagccctgaaaatgcactgcttggtatacctagaggaatgctttcatgaaaattagagaactgaggaaaatgttcacctttcttcatgctgaacctaccgctcatttgctatcagaagacctgtacaacattaagaaacagcctcgtgtgtttctttaacagctcctaatagttagcaggcttttacaactgccaaagataagcttcaggaattaaaaaatggcaattgtttagctggcaaaaattacagatattagagtcaatatcatttttctcatgctttattatgccagtgagtcacaagttcccncattttaaaactactatggactaatttaattccatgacacagtggctggcttttattttcaggattgccatacaaattca

SEQ ID NO: 356594 - DNA, 5332 bp, Homo sapiens
  misc_feature (473)..(473): n is a, c, g, or t
ggcgggactcttgctgcgcggaggagccgtgcggaacccgaggctgcgcgcgcgcgcgcgctctctggccgcggcgtggggacagcgaggcgcactggggcctcccagcgcggggccggccgcgccgtccagcccgaggtctacggctttgcgctccgagcccagaggaagatgcctgccggcaccgagctcgggctgcggggctgaacgcctgtcttccaggcgcagcggcagcactgccctcggccggtgtcggtagcggcactcggcgtgccccgggcggacgaagagcgcaggctgggtacaccttgcccgaatcggcggagttcgcagctagcgagggcgggccggccggcccggatgggcgcggggtttgcggcccccgccgggtgctccggagcggcccgggcaccgggggcacgctgagtgccggagccgcggccgcagagagaacttggggcgggggccatgcnccggtgcggagtctagagccgagcggagcgccccgcgggcccgcccgcgtctgcggccgttcgggtcctcacagtccccgcgcccggagttcgcagcgcgctccagacaagatggcgcggccggtccggggagggctcggggccccgcgccgctcgccttgccttctccttctctggctgcttttgcttcggctggagccggtgaccgccgcggccggcccgcgggcgccctgcgcggccgcctgcacttgcgctggggactcgctggactgcggtgggcgcgggctggctgcgttgcccggggacctgccctcctggacgcggagcctaaacctgagttacaacaaactctctgagattgaccctgctggttttgaggacttgccgaacctacaggaagtgtacctcaataataatgagttgacagcggtaccatccctgggcgctgcttcatcacatgtcgtctctctctttctgcagcacaacaagattcgcagcgtggaggggagccagctgaaggcctacctttccttagaagtgttagatctgagtttgaacaacatcacggaagtgcggaacacctgctttccacacggaccgcctataaaggagctcaacctggcaggcaatcggattggcaccctggagttgggagcatttgatggtctgtcacggtcgctgctaactcttcgcctgagcaaaaacaggatcacccagcttcctgtaagagcattcaagctacccaggctgacacaactggacctcaatcggaacaggattcggctgatagagggcctcaccttccaggggctcaacagcttggaggtgctgaagcttcagcgaaacaacatcagcaaactgacagatggggccttctggggactgtccaagatgcatgtgctgcacctggagtacaacagcctggtagaagtgaacagcggctcgctctacggcctcacggccctgcatcagctccacctcagcaacaattccatcgctcgcattcaccgcaagggctggagcttctgccagaagctgcatgagttggtcctgtccttcaacaacctgacacggctggacgaggagagcctggccgagctgagcagcctgagtgtcctgcgtctcagccacaattccatcagccacattgcggagggtgccttcaagggactcaggagcctgcgagtcttggatctggaccataacgagatttcgggcacaatagaggacacgagcggcgccttctcagggctcgacagcctcagcaagctgactctgtttggaaacaagatcaagtctgtggctaagagagcattctcggggctggaaggcctggagcacctgaaccttggagggaatgcgatcagatctgtccagtttgatgcctttgtgaagatgaagaatcttaaagagctccatatcagcagcgacagcttcctgtgtgactgccagctgaagtggctgcccccgtggctaattggcaggatgctgcaggcctttgtgacagccacctgtgcccacccagaatcactgaagggtcagagcattttctctgtgccaccagagagtttcgtgtgcgatgacttcctgaagccacagatcatcacccagccagaaaccaccatggctatggtgggcaaggacatccggtttacatgctcagcagccagcagcagcagctcccccatgacctttgcctggaagaaagacaatgaagtcctgaccaatgcagacatggagaactttgtccacgtccacgcgcaggacggggaagtgatggagtacaccaccatcctgcacctccgtcaggtcactttcgggcacgagggccgctaccaatgtgtcatcaccaaccactttggctccacctattcacataaggccaggctcaccgtgaatgtgttgccatcattcaccaaaacgccccacgacataaccatccggaccaccaccatggcccgcctcgaatgtgctgccacaggtcacccaaaccctcagattgcctggcagaaggatggaggcacggatttccccgctgcccgtgagcgacgcatgcatgtcatgccggatgacgacgtgtttttcatcactgatgtgaaaatagatgacgcaggggtttacagctgtactgctcagaactcagccggttctatttcagctaatgccaccctgactgtcctagagaccccatccttggtggtccccttggaagaccgtgtggtatctgtgggagaaacagtggccctccaatgcaaagccacggggaaccctccgccccgcatcacctggttcaagggggaccgcccgctgagcctcactgagcggcaccacttgacccctgacaaccagctcctggtggttcagaacgtggtggcagaggatgcgggccgatatacctgtgagatgtccaacaccctgggcacggagcgagctcacagccagctgagcgtcctgcccgcagcaggctgcaggaaggatgggaccacggtaggcatcttcaccattgctgtcgtgagcagcatcgtcctgacgtcactggtctgggtgtgcatcatctaccagaccaggaagaagagtgaagagtacagtgtcaccaacacagatgaaaccgtcgtgccaccagatgttccaagctacctctcttctcaggggaccctttctgaccgacaagaaaccgtggtcaggaccgagggtggccctcaggccaatgggcacattgagagcaatggtgtgtgtccaagagatgcaagccactttccagagcccgacactcacagcgttgcctgcaggcagccaaagctctgtgctgggtctgcgtatcacaaagagccgtggaaagcgatggagaaagctgaagggacacctgggccacataagatggaacacggtggccgggtcgtatgcagtgactgcaacaccgaagtggactgttactccaggggacaagccttccacccccagcctgtgtccagagacagcgcacagccaagtgcgccaaatggcccggagccgggtgggagtgaccaagagcattctccacatcaccagtgcagcaggactgccgctgggtcctgccccgagtgccaagggtcgctctaccccagtaaccacgatagaatgctgacggctgtgaagaaaaagccaatggcatctctagatgggaaaggggattcttcctggactttagcaaggttgtatcacccggactccacagagctacagcctgcatcttcattaacttcaggcagtccagagcgcgcggaagcccagtacttgcttgtttccaatggccacctccccaaagcatgtgacgccagtcccgagtccacgccactgacaggacagctccccgggaaacagagggtgccactgctgttggcaccaaaaagctaggttttgtctacctcagttcttgtcataccaatctctacgggaaagagaggtaggagaggctgcgaggaagcttgggttcaagcgtcactcatctgtacatagttgtaactcccatgtggagtatcagtcgctcacaggacttggatctgaagcacagtaaacgcaagaggggatttgtgtacaaaaggcaaaaaaagtatttgatatcattgtacataagagttttcagagatttcatatatatcttttacagaggctattttaatctttagtgcatggttaacagaaaaaaattatacaattttgacaatattatttttcgtatcaggttgctgtttaattttggagggggtggggaaatagttctggtgccttaacgcatggctggaatttatagaggctacaaccacatttgttcacaggagtttttggtgcggggtgggaaggatggaaggccttggatttatattgcacttcatagacccctaggctgctgtgcggtgggactccacatgcgccggaaggagcttcaggtgagcactgctcatgtgtggatgcccctgcaacaggcttccctgtctgtagagccaggggtgcaagtgccatccacacttgcagtgaatggcttttccttttaggtttaagtcctgtctgtctgtaaggcgtagaatctgtccgtctgtaaggcgtagaatgagggttgttaatccatcacaagcaaaaggtcagaacagttaaacactgcctttcctcctcctcttattttatgataaaagcaaatgtggccttctcagtatcattcgattgctatttgagacttttaaattaaggtaaaggctgctggtgttggtacctgtggatttttctatactgatgttttcgttttgccaatataatgagtattacattggccttgggggacagaaaggaggaagttctgacttttcagggctaccttatttctactaaggacccagagcaggcctgtccatgccattccttcgcacagatgaaactgagctgggactggaaaggacagcccttgacctgggttctgggtataatttgcacttttgagactggtagctaaccatcttatgagtgccaatgtgtcatttagtaaaacttaaatagaaacaaggtccttcaaatgttcctttggccaaaagctgaagggagttactgagaaaatagttaacaattactgtcaggtgtcatcactgttcaaaaggtaagcacatttagaattttgttcttgacagttaactgactaatcttacttccacaaaatatgtgaatttgctgcttctgagaggcaatgtgaaagagggagtattacttttatgtacaaagttatttatttatagaaattttggtacagtgtacattgaaaaccatgtaaaatattgaagtgtctaacaaatggcattgaagtgtctttaataaaggttcatttataaatgtca

SEQ ID NO: 356595 - DNA, 1023 bp, Homo sapiens
tgggaggggccttttttaggccagacggcacatgcaattccagcctatcatcactattaaattctaataaagataaaagtatttcatttcagaaaggggaaggcctgcgtgcctcaaacccgtaatctcagcgcaggtcagctttccacctgcccctcactggacagacttatcaggtagcactaccttaattgtgtgttttctttttctttttctttctctcaacccttcctgtttcgctttccttccctggccttaatttctggatgtttggaaactacaggactctgtttggaaacaagatcaagtctgtggctaagagagcattctcggggctggaaggcctggagcacctgtgagtatctcaccagccctgccctgaggcacagcctgctgaatgcggctgccggggagttctgctagcaatttaatcgcatctttgtaaactgagaaacaggctatttggaaacaccagctgcttccttctcattatgtcagcttcagctttggcctttatgttgcctatgccaggaacagttacagaacatatggccagtggatgtgctcccagttaattcagttggtatttggataaataccctccccgctcctgctgcgcagcctaacccctgcactggctccttcatggacccctggcctcattgcctcttccaccaacgcgcttcctcctggccaagcctgttgcctccattaaagcagcttaacaatgcagagtaggtgctgggctgaaccagtttggtgtggttgcttctgagaccctgggaggaagggaacagagccacccgagacagtcatgctgttgccatctggggaggatgcctcatgtatgtgattcttagtttgtttcctctttgaatcaagtttgactctaactctgttgggaaaggttttgccttgctgagcaggcctcagcccagctttgatggtgccctaaggctggcttggctcctgagtcattccatgggcttgtgttgcgatttgggaaacaacagccacttatag

SEQ ID NO: 356596 - DNA, 514 bp, Homo sapiens
tctcaggtgggttatatgcactgccctgggaaattggagaggaagtgtgagaaaaaccatttcccccttccagcttgctgatgttcacttgagaagctgattggaggcgactgatcagtgtgtgtgtgaagggagtgtccctcctttgcggctgcacctgaagcatccactgttgtgtttctttcagccatatcagcagcgacagcttcctgtgtgactgccagctgaagtggctgcccccgtggctaattggcaggatgctgcaggcctttgtgacagccacctgtgcccacccagaatcactgaagggtcagagcattttctctgtgccaccagagagtttcgtgtgcggtaagactgtctttgtaactttttctctccttcatgaaggacaaggaagccaggaggtactcttcattatgggagtaattcctgtgatcagagtaaaccccagcccgtggttacagatcagctgctggatgcaatttatttcttgctgaaaccacacacagta

SEQ ID NO: 356597 - DNA, 467 bp, Homo sapiens
tgggaggggccttttttaggccagacggcacatgcaattccagcctatcatcactattaaattctaataaagataaaagtatttcatttcagaaaggggaaggcctgcgtgcctcaaacccgtaatctcagcgcaggtcagctttccacctgcccctcactggacagacttatcaggtagcactaccttaattgtgtgttttctttttctttttctttctctcaacccttcctgtttcgctttccttccctggccttaatttctggatgtttggaaactacaggactctgtttggaaacaagatcaagtctgtggctaagagagcattctcggggctggaaggcctggagcacctgaaccttggagggaatgcgatcagatctgtccagtttgatgcctttgtgaagatgaagaatcttaaagagctgtaagtatctggattccctgggtctgattaatggtagtgg

SEQ ID NO: 356598 - DNA, 5257 bp, Homo sapiens
  misc_feature (473)..(473): n is a, c, g, or t
ggcgggactcttgctgcgcggaggagccgtgcggaacccgaggctgcgcgcgcgcgcgcgctctctggccgcggcgtggggacagcgaggcgcactggggcctcccagcgcggggccggccgcgccgtccagcccgaggtctacggctttgcgctccgagcccagaggaagatgcctgccggcaccgagctcgggctgcggggctgaacgcctgtcttccaggcgcagcggcagcactgccctcggccggtgtcggtagcggcactcggcgtgccccgggcggacgaagagcgcaggctgggtacaccttgcccgaatcggcggagttcgcagctagcgagggcgggccggccggcccggatgggcgcggggtttgcggcccccgccgggtgctccggagcggcccgggcaccgggggcacgctgagtgccggagccgcggccgcagagagaacttggggcgggggccatgcnccggtgcggagtctagagccgagcggagcgccccgcgggcccgcccgcgtctgcggccgttcgggtcctcacagtccccgcgcccggagttcgcagcgcgctccagacaagatggcgcggccggtccggggagggctcggggccccgcgccgctcgccttgccttctccttctctggctgcttttgcttcggctggagccggtgaccgccgcggccggcccgcgggcgccctgcgcggccgcctgcacttgcgctggggactcgctggactgcggtgggcgcgggctggctgcgttgcccggggacctgccctcctggacgcggagcctaaacctgagttacaacaaactctctgagattgaccctgctggttttgaggacttgccgaacctacaggaagtgcagcacaacaagattcgcagcgtggaggggagccagctgaaggcctacctttccttagaagtgttagatctgagtttgaacaacatcacggaagtgcggaacacctgctttccacacggaccgcctataaaggagctcaacctggcaggcaatcggattggcaccctggagttgggagcatttgatggtctgtcacggtcgctgctaactcttcgcctgagcaaaaacaggatcacccagcttcctgtaagagcattcaagctacccaggctgacacaactggacctcaatcggaacaggattcggctgatagagggcctcaccttccaggggctcaacagcttggaggtgctgaagcttcagcgaaacaacatcagcaaactgacagatggggccttctggggactgtccaagatgcatgtgctgcacctggagtacaacagcctggtagaagtgaacagcggctcgctctacggcctcacggccctgcatcagctccacctcagcaacaattccatcgctcgcattcaccgcaagggctggagcttctgccagaagctgcatgagttggtcctgtccttcaacaacctgacacggctggacgaggagagcctggccgagctgagcagcctgagtgtcctgcgtctcagccacaattccatcagccacattgcggagggtgccttcaagggactcaggagcctgcgagtcttggatctggaccataacgagatttcgggcacaatagaggacacgagcggcgccttctcagggctcgacagcctcagcaagctgactctgtttggaaacaagatcaagtctgtggctaagagagcattctcggggctggaaggcctggagcacctgaaccttggagggaatgcgatcagatctgtccagtttgatgcctttgtgaagatgaagaatcttaaagagctccatatcagcagcgacagcttcctgtgtgactgccagctgaagtggctgcccccgtggctaattggcaggatgctgcaggcctttgtgacagccacctgtgcccacccagaatcactgaagggtcagagcattttctctgtgccaccagagagtttcgtgtgcgatgacttcctgaagccacagatcatcacccagccagaaaccaccatggctatggtgggcaaggacatccggtttacatgctcagcagccagcagcagcagctcccccatgacctttgcctggaagaaagacaatgaagtcctgaccaatgcagacatggagaactttgtccacgtccacgcgcaggacggggaagtgatggagtacaccaccatcctgcacctccgtcaggtcactttcgggcacgagggccgctaccaatgtgtcatcaccaaccactttggctccacctattcacataaggccaggctcaccgtgaatgtgttgccatcattcaccaaaacgccccacgacataaccatccggaccaccaccatggcccgcctcgaatgtgctgccacaggtcacccaaaccctcagattgcctggcagaaggatggaggcacggatttccccgctgcccgtgagcgacgcatgcatgtcatgccggatgacgacgtgtttttcatcactgatgtgaaaatagatgacgcaggggtttacagctgtactgctcagaactcagccggttctatttcagctaatgccaccctgactgtcctagagaccccatccttggtggtccccttggaagaccgtgtggtatctgtgggagaaacagtggccctccaatgcaaagccacggggaaccctccgccccgcatcacctggttcaagggggaccgcccgctgagcctcactgagcggcaccacttgacccctgacaaccagctcctggtggttcagaacgtggtggcagaggatgcgggccgatatacctgtgagatgtccaacaccctgggcacggagcgagctcacagccagctgagcgtcctgcccgcagcaggctgcaggaaggatgggaccacggtaggcatcttcaccattgctgtcgtgagcagcatcgtcctgacgtcactggtctgggtgtgcatcatctaccagaccaggaagaagagtgaagagtacagtgtcaccaacacagatgaaaccgtcgtgccaccagatgttccaagctacctctcttctcaggggaccctttctgaccgacaagaaaccgtggtcaggaccgagggtggccctcaggccaatgggcacattgagagcaatggtgtgtgtccaagagatgcaagccactttccagagcccgacactcacagcgttgcctgcaggcagccaaagctctgtgctgggtctgcgtatcacaaagagccgtggaaagcgatggagaaagctgaagggacacctgggccacataagatggaacacggtggccgggtcgtatgcagtgactgcaacaccgaagtggactgttactccaggggacaagccttccacccccagcctgtgtccagagacagcgcacagccaagtgcgccaaatggcccggagccgggtgggagtgaccaagagcattctccacatcaccagtgcagcaggactgccgctgggtcctgccccgagtgccaagggtcgctctaccccagtaaccacgatagaatgctgacggctgtgaagaaaaagccaatggcatctctagatgggaaaggggattcttcctggactttagcaaggttgtatcacccggactccacagagctacagcctgcatcttcattaacttcaggcagtccagagcgcgcggaagcccagtacttgcttgtttccaatggccacctccccaaagcatgtgacgccagtcccgagtccacgccactgacaggacagctccccgggaaacagagggtgccactgctgttggcaccaaaaagctaggttttgtctacctcagttcttgtcataccaatctctacgggaaagagaggtaggagaggctgcgaggaagcttgggttcaagcgtcactcatctgtacatagttgtaactcccatgtggagtatcagtcgctcacaggacttggatctgaagcacagtaaacgcaagaggggatttgtgtacaaaaggcaaaaaaagtatttgatatcattgtacataagagttttcagagatttcatatatatcttttacagaggctattttaatctttagtgcatggttaacagaaaaaaattatacaattttgacaatattatttttcgtatcaggttgctgtttaattttggagggggtggggaaatagttctggtgccttaacgcatggctggaatttatagaggctacaaccacatttgttcacaggagtttttggtgcggggtgggaaggatggaaggccttggatttatattgcacttcatagacccctaggctgctgtgcggtgggactccacatgcgccggaaggagcttcaggtgagcactgctcatgtgtggatgcccctgcaacaggcttccctgtctgtagagccaggggtgcaagtgccatccacacttgcagtgaatggcttttccttttaggtttaagtcctgtctgtctgtaaggcgtagaatctgtccgtctgtaaggcgtagaatgagggttgttaatccatcacaagcaaaaggtcagaacagttaaacactgcctttcctcctcctcttattttatgataaaagcaaatgtggccttctcagtatcattcgattgctatttgagacttttaaattaaggtaaaggctgctggtgttggtacctgtggatttttctatactgatgttttcgttttgccaatataatgagtattacattggccttgggggacagaaaggaggaagttctgacttttcagggctaccttatttctactaaggacccagagcaggcctgtccatgccattccttcgcacagatgaaactgagctgggactggaaaggacagcccttgacctgggttctgggtataatttgcacttttgagactggtagctaaccatcttatgagtgccaatgtgtcatttagtaaaacttaaatagaaacaaggtccttcaaatgttcctttggccaaaagctgaagggagttactgagaaaatagttaacaattactgtcaggtgtcatcactgttcaaaaggtaagcacatttagaattttgttcttgacagttaactgactaatcttacttccacaaaatatgtgaatttgctgcttctgagaggcaatgtgaaagagggagtattacttttatgtacaaagttatttatttatagaaattttggtacagtgtacattgaaaaccatgtaaaatattgaagtgtctaacaaatggcattgaagtgtctttaataaaggttcatttataaatgtca

SEQ ID NO: 356599 - DNA, 5684 bp, Homo sapiens
  misc_feature (473)..(473): n is a, c, g, or t
ggcgggactcttgctgcgcggaggagccgtgcggaacccgaggctgcgcgcgcgcgcgcgctctctggccgcggcgtggggacagcgaggcgcactggggcctcccagcgcggggccggccgcgccgtccagcccgaggtctacggctttgcgctccgagcccagaggaagatgcctgccggcaccgagctcgggctgcggggctgaacgcctgtcttccaggcgcagcggcagcactgccctcggccggtgtcggtagcggcactcggcgtgccccgggcggacgaagagcgcaggctgggtacaccttgcccgaatcggcggagttcgcagctagcgagggcgggccggccggcccggatgggcgcggggtttgcggcccccgccgggtgctccggagcggcccgggcaccgggggcacgctgagtgccggagccgcggccgcagagagaacttggggcgggggccatgcnccggtgcggagtctagagccgagcggagcgccccgcgggcccgcccgcgtctgcggccgttcgggtcctcacagtccccgcgcccggagttcgcagcgcgctccagacaagatggcgcggccggtccggggagggctcggggccccgcgccgctcgccttgccttctccttctctggctgcttttgcttcggctggagccggtgaccgccgcggccggcccgcgggcgccctgcgcggccgcctgcacttgcgctggggactcgctggactgcggtgggcgcgggctggctgcgttgcccggggacctgccctcctggacgcggagcctaaacctgagttacaacaaactctctgagattgaccctgctggttttgaggacttgccgaacctacaggaagtgtacctcaataataatgagttgacagcggtaccatccctgggcgctgcttcatcacatgtcgtctctctctttctgcagcacaacaagattcgcagcgtggaggggagccagctgaaggcctacctttccttagaagtgttagatctgagtttgaacaacatcacggaagtgcggaacacctgctttccacacggaccgcctataaaggagctcaacctggcaggcaatcggattggcaccctggagttgggagcatttgatggtctgtcacggtcgctgctaactcttcgcctgagcaaaaacaggatcacccagcttcctgtaagagcattcaagctacccaggctgacacaactggacctcaatcggaacaggattcggctgatagagggcctcaccttccaggggctcaacagcttggaggtgctgaagcttcagcgaaacaacatcagcaaactgacagatggggccttctggggactgtccaagatgcatgtgctgcacctggagtacaacagcctggtagaagtgaacagcggctcgctctacggcctcacggccctgcatcagctccacctcagcaacaattccatcgctcgcattcaccgcaagggctggagcttctgccagaagctgcatgagttggtcctgtccttcaacaacctgacacggctggacgaggagagcctggccgagctgagcagcctgagtgtcctgcgtctcagccacaattccatcagccacattgcggagggtgccttcaagggactcaggagcctgcgagtcttggatctggaccataacgagatttcgggcacaatagaggacacgagcggcgccttctcagggctcgacagcctcagcaagctgactctgtttggaaacaagatcaagtctgtggctaagagagcattctcggggctggaaggcctggagcacctgaaccttggagggaatgcgatcagatctgtccagtttgatgcctttgtgaagatgaagaatcttaaagagctccatatcagcagcgacagcttcctgtgtgactgccagctgaagtggctgcccccgtggctaattggcaggatgctgcaggcctttgtgacagccacctgtgcccacccagaatcactgaagggtcagagcattttctctgtgccaccagagagtttcgtgtgcgatgacttcctgaagccacagatcatcacccagccagaaaccaccatggctatggtgggcaaggacatccggtttacatgctcagcagccagcagcagcagctcccccatgacctttgcctggaagaaagacaatgaagtcctgaccaatgcagacatggagaactttgtccacgtccacgcgcaggacggggaagtgatggagtacaccaccatcctgcacctccgtcaggtcactttcgggcacgagggccgctaccaatgtgtcatcaccaaccactttggctccacctattcacataaggccaggctcaccgtgaatgtgttgccatcattcaccaaaacgccccacgacataaccatccggaccaccaccatggcccgcctcgaatgtgctgccacaggtcacccaaaccctcagattgcctggcagaaggatggaggcacggatttccccgctgcccgtgagcgacgcatgcatgtcatgccggatgacgacgtgtttttcatcactgatgtgaaaatagatgacgcaggggtttacagctgtactgctcagaactcagccggttctatttcagctaatgccaccctgactgtcctagagaccccatccttggtggtccccttggaagaccgtgtggtatctgtgggagaaacagtggccctccaatgcaaagccacggggaaccctccgccccgcatcacctggttcaagggggaccgcccgctgagcctcactgagcggcaccacttgacccctgacaaccagctcctggtggttcagaacgtggtggcagaggatgcgggccgatatacctgtgagatgtccaacaccctgggcacggagcgagctcacagccagctgagcgtcctgcccgcagcaggctgcaggaaggatgggaccacggtaggcatcttcaccattgctgtcgtgagcagcatcgtcctgacgtcactggtctgggtgtgcatcatctaccagaccaggaagaagagtgaagagtacagtgtcaccaacacagatgaaaccgtcgtgccaccagatgttccaagctacctctcttctcaggggaccctttctgaccgacaagaaaccgtggtcaggaccgagggtggccctcaggccaatgggcacattgagagcaatggtgtgtgtccaagagatgcaagccactttccagagcccgacactcacagcgttgcctgcaggcagccaaagctctgtgctgggtctgcgtatcacaaagagccgtggaaagcgatggagaaagctgaagggacacctgggccacataagatggaacacggtggccgggtcgtatgcagtgactgcaacaccgaagtggactgttactccaggggacaagccttccacccccagcctgtgtccagagacagcgcacagccaagtgcgccaaatggcccggagccgggtgggagtgaccaagagcattctccacatcaccagtgcagcaggactgccgctgggtcctgccccgagtgccaagggtcgctctaccccagtaaccacgatagaatgctgacggctgtgaagaaaaagccaatggcatctctagatgggaaaggggattcttcctggactttagcaaggttgtatcacccggactccacagagctacagcctgcatcttcattaacttcaggcagtccagagcgcgcggaagcccagtacttgcttgtttccaatggccacctccccaaagcatgtgacgccagtcccgagtccacgccactgacaggacagctccccgggaaacagagggtgccactgctgttggcaccaaaaagctaggttttgtctacctcagttcttgtcataccaatctctacgggaaagagaggtaggagaggctgcgaggaagcttgggttcaagcgtcactcatctgtacatagttgtaactcccatgtggagtatcagtcgctcacaggacttggatctgaagcacagtaaacgcaagaggggatttgtgtacaaaaggcaaaaaaagtatttgatatcattgtacataagagttttcagagatttcatatatatcttttacagaggctattttaatctttagtgcatggttaacagaaaaaaattatacaattttgacaatattatttttcgtatcaggttgctgtttaattttggagggggtggggaaatagttctggtgccttaacgcatggctggaatttatagaggctacaaccacatttgttcacaggagtttttggtgcggggtgggaaggatggaaggccttggatttatattgcacttcatagacccctaggctgctgtgcggtgggactccacatgcgccggaaggagcttcaggtgagcactgctcatgtgtggatgcccctgcaacaggcttccctgtctgtagagccaggggtgcaagtgccatccacacttgcagtgaatggcttttccttttaggtttaagtcctgtctgtctgtaaggcgtagaatctgtccgtctgtaaggcgtagaatgagggttgttaatccatcacaagcaaaaggtcagaacagttaaacactgcctttcctcctcctcttattttatgataaaagcaaatgtggccttctcagtatcattcgattgctatttgagacttttaaattaaggtaaaggctgctggtgttggtacctgtggatttttctatactgatgttttcgttttgccaatataatgagtattacattggccttgggggacagaaaggaggaagttctgacttttcagggctaccttatttctactaaggacccagagcaggcctgtccatgccattccttcgcacagatgaaactgagctgggactggaaaggacagcccttgacctgggttctgggtataatttgcacttttgagactggtagctaaccatcttatgagtgccaatgtgtcatttagtaaaacttaaatagaaacaaggtccttcaaatgttcctttggccaaaagctgaagggagttactgagaaaatagttaacaattactgtcaggtgtcatcactgttcaaaaggtaagcacatttagaattttgttcttgacagttaactgactaatcttacttccacaaaatatgtgaatttgctgcttctgagaggcaatgtgaaagagggagtattacttttatgtacaaagttatttatttatagaaattttggtacagtgtacattgaaaaccatgtaaaatattgaagtgtctaacaaatggcattgaagtgtctttaataaaggttcatttataaatgtcaaaaaaaaaaaaaaaaaaaaaaagataaaaaaaaagaaaaaaaaaaaaaagaagagggaaaggggcacaaatcagaaagcaataaacgaacaaacaaactaaaatgacgagtacggcgccaggcaagacgaaggaaaagaggaaacaaaacacaagataatgggtggcgcggacgcgccacgaaagtaatgtagcatagccgtagcaccaatagtccagaaacaacagcggagtatgaagacagagcggggtgttgcccacacacagagaacacggcggggcaaagggttggtagacaaacacagaagacgtggggggcaaccggcctaacagcaaggacggggctaaaaacc

SEQ ID NO: 356600 - DNA, 4000 bp, Homo sapiens
gcaatagcagcagacagtggttaatcggccgagggtacccaaacctgagttacaacaaactctctgagattgaccctgctggttttgaggacttgccgaacctacaggaagtgtacctcaataataatgagttgacagcggtaccatccctgggcgctgcttcatcacatgtcgtctctctctttctggtcctgtccttcaacaacctgacacggctggacgaggagagcctggccgagctgagcagcctgagtgtcctgcgtctcagccacaattccatcagccacattgcggagggtgccttcaagggactcaggagcctgcgagtcttggatctggaccataacgagatttcgggcacaatagaggacacgagcggcgccttctcagggctcgacagcctcagcaagctgactctgtttggaaacaagatcaagtctgtggctaagagagcattctcggggctggaaggcctggagcacctgaaccttggagggaatgcgatcagatctgtccagtttgatgcctttgtgaagatgaagaatcttaaagagctccatatcagcagcgacagcttcctgtgtgactgccagctgaagtggctgcccccgtggctaattggcaggatgctgcaggcctttgtgacagccacctgtgcccacccagaatcactgaagggtcagagcattttctctgtgccaccagagagtttcgtgtgcgatgacttcctgaagccacagatcatcacccagccagaaaccaccatggctatggtgggcaaggacatccggtttacatgctcagcagccagcagcagcagctcccccatgacctttgcctggaagaaagacaatgaagtcctgaccaatgcagacatggagaactttgtccacgtccacgcgcaggacggggaagtgatggagtacaccaccatcctgcacctccgtcaggtcactttcgggcacgagggccgctaccaatgtgtcatcaccaaccactttggctccacctattcacataaggccaggctcaccgtgaatgtgttgccatcattcaccaaaacgccccacgacataaccatccggaccaccaccatggcccgcctcgaatgtgctgccacaggtcacccaaaccctcagattgcctggcagaaggatggaggcacggatttccccgctgcccgtgagcgacgcatgcatgtcatgccggatgacgacgtgtttttcatcactgatgtgaaaatagatgacgcaggggtttacagctgtactgctcagaactcagccggttctatttcagctaatgccaccctgactgtcctagagaccccatccttggtggtccccttggaagaccgtgtggtatctgtgggagaaacagtggccctccaatgcaaagccacggggaaccctccgccccgcatcacctggttcaagggggaccgcccgctgagcctcactgagcggcaccacttgacccctgacaaccagctcctggtggttcagaacgtggtggcagaggatgcgggccgatatacctgtgagatgtccaacaccctgggcacggagcgagctcacagccagctgagcgtcctgcccgcagcaggctgcaggaaggatgggaccacggtaggcatcttcaccattgctgtcgtgagcagcatcgtcctgacgtcactggtctgggtgtgcatcatctaccagaccaggaagaagagtgaagagtacagtgtcaccaacacagatgaaaccgtcgtgccaccagatgttccaagctacctctcttctcaggggaccctttctgaccgacaagaaaccgtggtcaggaccgagggtggccctcaggccaatgggcacattgagagcaatggtgtgtgtccaagagatgcaagccactttccagagcccgacactcacagcgttgcctgcaggcagccaaagctctgtgctgggtctgcgtatcacaaagagccgtggaaagcgatggagaaagctgaagggacacctgggccacataagatggaacacggtggccgggtcgtatgcagtgactgcaacaccgaagtggactgttactccaggggacaagccttccacccccagcctgtgtccagagacagcgcacagccaagtgcgccaaatggcccggagccgggtgggagtgaccaagagcattctccacatcaccagtgcagcaggactgccgctgggtcctgccccgagtgccaagggtcgctctaccccagtaaccacgatagaatgctgacggctgtgaagaaaaagccaatggcatctctagatgggaaaggggattcttcctggactttagcaaggttgtatcacccggactccacagagctacagcctgcatcttcattaacttcaggcagtccagagcgcgcggaagcccagtacttgcttgtttccaatggccacctccccaaagcatgtgacgccagtcccgagtccacgccactgacaggacagctccccgggaaacagagggtgccactgctgttggcaccaaaaagctaggttttgtctacctcagttcttgtcataccaatctctacgggaaagagaggtaggagaggctgcgaggaagcttgggttcaagcgtcactcatctgtacatagttgtaactcccatgtggagtatcagtcgctcacaggacttggatctgaagcacagtaaacgcaagaggggatttgtgtacaaaaggcaaaaaaagtatttgatatcattgtacataagagttttcagagatttcatatatatcttttacagaggctattttaatctttagtgcatggttaacagaaaaaaattatacaattttgacaatattatttttcgtatcaggttgctgtttaattttggagggggtggggaaatagttctggtgccttaacgcatggctggaatttatagaggctacaaccacatttgttcacaggagtttttggtgcggggtgggaaggatggaaggccttggatttatattgcacttcatagacccctaggctgctgtgcggtgggactccacatgcgccggaaggagcttcaggtgagcactgctcatgtgtggatgcccctgcaacaggcttccctgtctgtagagccaggggtgcaagtgccatccacacttgcagtgaatggcttttccttttaggtttaagtcctgtctgtctgtaaggcgtagaatctgtccgtctgtaaggcgtagaatgagggttgttaatccatcacaagcaaaaggtcagaacagttaaacactgcctttcctcctcctcttattttatgataaaagcaaatgtggccttctcagtatcattcgattgctatttgagacttttaaattaaggtaaaggctgctggtgttggtacctgtggatttttctatactgatgttttcgttttgccaatataatgagtattacattggccttgggggacagaaaggaggaagttctgacttttcagggctaccttatttctactaaggacccagagcaggcctgtccatgccattccttcgcacagatgaaactgagctgggactggaaaggacagcccttgacctgggttctgggtataatttgcacttttgagactggtagctaaccatcttatgagtgccaatgtgtcatttagtaaaacttaaatagaaacaaggtccttcaaatgttcctttggccaaaagctgaagggagttactgagaaaatagttaacaattactgtcaggtgtcatcactgttcaaaaggtaagcacatttagaattttgttcttgacagttaactgactaatcttacttccacaaaatatgtgaatttgctgcttctgagaggcaatgtgaaagagggagtattacttttatgtacaaagttatttatttatagaaattttggtacagtgtacattgaaaaccatgtaaaatattgaagtgtctaacaaatggcattgaagtgtctttaataaaggttcatttataaatgtca

SEQ ID NO: 356601 - DNA, 3892 bp, Homo sapiens
agggaagaatggggctttggataagttaaaataccacaaagctcacatttctgagatgttgctatttgcttgaatcaacaatccatggattgttgtaagcctttggttttccagaattctgaaaaagttgcttttgaccatttttccaggtgttttccttgttttaatggaggtgcagatttttggaggtccttattctgacattttggaagtgttttacaccccctccttttggagtaaggtttgtgggtaagatctctgcagtcatgaccagtggtgcctgactgttttgtgtgaaagtcagcaggcagagccagttgtcttaaggaaactgccggctggctggtttgagaactgagaagtggtgggttaatttctaatcaaggagtgtgatcataaaggtgatcagtactcacagacttctaattagatgaggtcagatgtccatggtgcaactcttacggcatctggttggtggggctgaggatgcacagggacctcaagctctggttcctgcttggtgtctgtgtcagtttctgttagcatgaacagcagctggttcctctgtgtaccaagaacccagcgctttacagttgacccttctctccccagatgacttcctgaagccacagatcatcacccagccagaaaccaccatggctatggtgggcaaggacatccggtttacatgctcagcagccagcagcagcagctcccccatgacctttgcctggaagaaagacaatgaagtcctgaccaatgcagacatggagaactttgtccacgtccacgcgcaggacggggaagtgatggagtacaccaccatcctgcacctccgtcaggtcactttcgggcacgagggccgctaccaatgtgtcatcaccaaccactttggctccacctattcacataaggccaggctcaccgtgaatgtgttgccatcattcaccaaaacgccccacgacataaccatccggaccaccaccatggcccgcctcgaatgtgctgccacaggtcacccaaaccctcagattgcctggcagaaggatggaggcacggatttccccgctgcccgtgagcgacgcatgcatgtcatgccggatgacgacgtgtttttcatcactgatgtgaaaatagatgacgcaggggtttacagctgtactgctcagaactcagccggttctatttcagctaatgccaccctgactgtcctagagaccccatccttggtggtccccttggaagaccgtgtggtatctgtgggagaaacagtggccctccaatgcaaagccacggggaaccctccgccccgcatcacctggttcaagggggaccgcccgctgagcctcactgagcggcaccacttgacccctgacaaccagctcctggtggttcagaacgtggtggcagaggatgcgggccgatatacctgtgagatgtccaacaccctgggcacggagcgagctcacagccagctgagcgtcctgcccgcagcaggctgcaggaaggatgggaccacggtaggcatcttcaccattgctgtcgtgagcagcatcgtcctgacgtcactggtctgggtgtgcatcatctaccagaccaggaagaagagtgaagagtacagtgtcaccaacacagatgaaaccgtcgtgccaccagatgttccaagctacctctcttctcaggggaccctttctgaccgacaagaaaccgtggtcaggaccgagggtggccctcaggccaatgggcacattgagagcaatggtgtgtgtccaagagatgcaagccactttccagagcccgacactcacagcgttgcctgcaggcagccaaagctctgtgctgggtctgcgtatcacaaagagccgtggaaagcgatggagaaagctgaagggacacctgggccacataagatggaacacggtggccgggtcgtatgcagtgactgcaacaccgaagtggactgttactccaggggacaagccttccacccccagcctgtgtccagagacagcgcacagccaagtgcgccaaatggcccggagccgggtgggagtgaccaagagcattctccacatcaccagtgcagcaggactgccgctgggtcctgccccgagtgccaagggtcgctctaccccagtaaccacgatagaatgctgacggctgtgaagaaaaagccaatggcatctctagatgggaaaggggattcttcctggactttagcaaggttgtatcacccggactccacagagctacagcctgcatcttcattaacttcaggcagtccagagcgcgcggaagcccagtacttgcttgtttccaatggccacctccccaaagcatgtgacgccagtcccgagtccacgccactgacaggacagctccccgggaaacagagggtgccactgctgttggcaccaaaaagctaggttttgtctacctcagttcttgtcataccaatctctacgggaaagagaggtaggagaggctgcgaggaagcttgggttcaagcgtcactcatctgtacatagttgtaactcccatgtggagtatcagtcgctcacaggacttggatctgaagcacagtaaacgcaagaggggatttgtgtacaaaaggcaaaaaaagtatttgatatcattgtacataagagttttcagagatttcatatatatcttttacagaggctattttaatctttagtgcatggttaacagaaaaaaattatacaattttgacaatattatttttcgtatcaggttgctgtttaattttggagggggtggggaaatagttctggtgccttaacgcatggctggaatttatagaggctacaaccacatttgttcacaggagtttttggtgcggggtgggaaggatggaaggccttggatttatattgcacttcatagacccctaggctgctgtgcggtgggactccacatgcgccggaaggagcttcaggtgagcactgctcatgtgtggatgcccctgcaacaggcttccctgtctgtagagccaggggtgcaagtgccatccacacttgcagtgaatggcttttccttttaggtttaagtcctgtctgtctgtaaggcgtagaatctgtccgtctgtaaggcgtagaatgagggttgttaatccatcacaagcaaaaggtcagaacagttaaacactgcctttcctcctcctcttattttatgataaaagcaaatgtggccttctcagtatcattcgattgctatttgagacttttaaattaaggtaaaggctgctggtgttggtacctgtggatttttctatactgatgttttcgttttgccaatataatgagtattacattggccttgggggacagaaaggaggaagttctgacttttcagggctaccttatttctactaaggacccagagcaggcctgtccatgccattccttcgcacagatgaaactgagctgggactggaaaggacagcccttgacctgggttctgggtataatttgcacttttgagactggtagctaaccatcttatgagtgccaatgtgtcatttagtaaaacttaaatagaaacaaggtccttcaaatgttcctttggccaaaagctgaagggagttactgagaaaatagttaacaattactgtcaggtgtcatcactgttcaaaaggtaagcacatttagaattttgttcttgacagttaactgactaatcttacttccacaaaatatgtgaatttgctgcttctgagaggcaatgtgaaagagggagtattacttttatgtacaaagttatttatttatagaaattttggtacagtgtacattgaaaaccatgtaaaatattgaagtgtctaacaaatggcattgaagtgtctttaataaaggttcatttataaatgtca

SEQ ID NO: 356602 - DNA, 3024 bp, Homo sapiens
agaggacttcctggttttgcatctagctgtcccgtaacccgaccctgtatacgtatgttttccagtgttgccatcattcaccaaaacgccccacgacataaccatccggaccaccaccatggcccgcctcgaatgtgctgccacaggtcacccaaaccctcagattgcctggcagaaggatggaggcacggatttccccgctgcccgtgagcgacgcatgcatgtcatgccggatgacgacgtgtttttcatcactgatgtgaaaatagatgacgcaggggtttacagctgtactgctcagaactcagccggttctatttcagctaatgccaccctgactgtcctagagaccccatccttggtggtccccttggaagaccgtgtggtatctgtgggagaaacagtggccctccaatgcaaagccacggggaaccctccgccccgcatcacctggttcaagggggaccgcccgctgagcctcactgagcggcaccacttgacccctgacaaccagctcctggtggttcagaacgtggtggcagaggatgcgggccgatatacctgtgagatgtccaacaccctgggcacggagcgagctcacagccagctgagcgtcctgcccgcagcaggctgcaggaaggatgggaccacggtaggcatcttcaccattgctgtcgtgagcagcatcgtcctgacgtcactggtctgggtgtgcatcatctaccagaccaggaagaagagtgaagagtacagtgtcaccaacacagatgaaaccgtcgtgccaccagatgttccaagctacctctcttctcaggggaccctttctgaccgacaagaaaccgtggtcaggaccgagggtggccctcaggccaatgggcacattgagagcaatggtgtgtgtccaagagatgcaagccactttccagagcccgacactcacagcgttgcctgcaggcagccaaagctctgtgctgggtctgcgtatcacaaagagccgtggaaagcgatggagaaagctgaagggacacctgggccacataagatggaacacggtggccgggtcgtatgcagtgactgcaacaccgaagtggactgttactccaggggacaagccttccacccccagcctgtgtccagagacagcgcacagccaagtgcgccaaatggcccggagccgggtgggagtgaccaagagcattctccacatcaccagtgcagcaggactgccgctgggtcctgccccgagtgccaagggtcgctctaccccagtaaccacgatagaatgctgacggctgtgaagaaaaagccaatggcatctctagatgggaaaggggattcttcctggactttagcaaggttgtatcacccggactccacagagctacagcctgcatcttcattaacttcaggcagtccagagcgcgcggaagcccagtacttgcttgtttccaatggccacctccccaaagcatgtgacgccagtcccgagtccacgccactgacaggacagctccccgggaaacagagggtgccactgctgttggcaccaaaaagctaggttttgtctacctcagttcttgtcataccaatctctacgggaaagagaggtaggagaggctgcgaggaagcttgggttcaagcgtcactcatctgtacatagttgtaactcccatgtggagtatcagtcgctcacaggacttggatctgaagcacagtaaacgcaagaggggatttgtgtacaaaaggcaaaaaaagtatttgatatcattgtacataagagttttcagagatttcatatatatcttttacagaggctattttaatctttagtgcatggttaacagaaaaaaattatacaattttgacaatattatttttcgtatcaggttgctgtttaattttggagggggtggggaaatagttctggtgccttaacgcatggctggaatttatagaggctacaaccacatttgttcacaggagtttttggtgcggggtgggaaggatggaaggccttggatttatattgcacttcatagacccctaggctgctgtgcggtgggactccacatgcgccggaaggagcttcaggtgagcactgctcatgtgtggatgcccctgcaacaggcttccctgtctgtagagccaggggtgcaagtgccatccacacttgcagtgaatggcttttccttttaggtttaagtcctgtctgtctgtaaggcgtagaatctgtccgtctgtaaggcgtagaatgagggttgttaatccatcacaagcaaaaggtcagaacagttaaacactgcctttcctcctcctcttattttatgataaaagcaaatgtggccttctcagtatcattcgattgctatttgagacttttaaattaaggtaaaggctgctggtgttggtacctgtggatttttctatactgatgttttcgttttgccaatataatgagtattacattggccttgggggacagaaaggaggaagttctgacttttcagggctaccttatttctactaaggacccagagcaggcctgtccatgccattccttcgcacagatgaaactgagctgggactggaaaggacagcccttgacctgggttctgggtataatttgcacttttgagactggtagctaaccatcttatgagtgccaatgtgtcatttagtaaaacttaaatagaaacaaggtccttcaaatgttcctttggccaaaagctgaagggagttactgagaaaatagttaacaattactgtcaggtgtcatcactgttcaaaaggtaagcacatttagaattttgttcttgacagttaactgactaatcttacttccacaaaatatgtgaatttgctgcttctgagaggcaatgtgaaagagggagtattacttttatgtacaaagttatttatttatagaaattttggtacagtgtacattgaaaaccatgtaaaatattgaagtgtctaacaaatggcattgaagtgtctttaataaaggttcatttataaatgtca

SEQ ID NO: 356603 - DNA, 4067 bp, Homo sapiens
  misc_feature (473)..(473): n is a, c, g, or t
ggcgggactcttgctgcgcggaggagccgtgcggaacccgaggctgcgcgcgcgcgcgcgctctctggccgcggcgtggggacagcgaggcgcactggggcctcccagcgcggggccggccgcgccgtccagcccgaggtctacggctttgcgctccgagcccagaggaagatgcctgccggcaccgagctcgggctgcggggctgaacgcctgtcttccaggcgcagcggcagcactgccctcggccggtgtcggtagcggcactcggcgtgccccgggcggacgaagagcgcaggctgggtacaccttgcccgaatcggcggagttcgcagctagcgagggcgggccggccggcccggatgggcgcggggtttgcggcccccgccgggtgctccggagcggcccgggcaccgggggcacgctgagtgccggagccgcggccgcagagagaacttggggcgggggccatgcnccggtgcggagtctagagccgagcggagcgccccgcgggcccgcccgcgtctgcggccgttcgggtcctcacagtccccgcgcccggagttcgcagcgcgctccagacaagatggcgcggccggtccggggagggctcggggccccgcgccgctcgccttgccttctccttctctggctgcttttgcttcggctggagccggtgaccgccgcggccggcccgcgggcgccctgcgcggccgcctgcacttgcgctggggactcgctggactgcggtgggcgcgggctggctgcgttgcccggggacctgccctcctggacgcggagcctaaacctgagttacaacaaactctctgagattgaccctgctggttttgaggacttgccgaacctacaggaagtgtacctcaataataatgagttgacagcggtaccatccctgggcgctgcttcatcacatgtcgtctctctctttctgcagcacaacaagattcgcagcgtggaggggagccagctgaaggcctacctttccttagaagtgttagatctgagtttgaacaacatcacggaagtgcggaacacctgctttccacacggaccgcctataaaggagctcaacctggcaggcaatcggattggcaccctggagttgggagcatttgatggtctgtcacggtcgctgctaactcttcgcctgagcaaaaacaggatcacccagcttcctgtaagagcattcaagctacccaggctgacacaactggacctcaatcggaacaggattcggctgatagagggcctcaccttccaggggctcaacagcttggaggtgctgaagcttcagcgaaacaacatcagcaaactgacagatggggccttctggggactgtccaagatgcatgtgctgcacctggagtacaacagcctggtagaagtgaacagcggctcgctctacggcctcacggccctgcatcagctccacctcagcaacaattccatcgctcgcattcaccgcaagggctggagcttctgccagaagctgcatgagttggtcctgtccttcaacaacctgacacggctggacgaggagagcctggccgagctgagcagcctgagtgtcctgcgtctcagccacaattccatcagccacattgcggagggtgccttcaagggactcaggagcctgcgagtcttggatctggaccataacgagatttcgggcacaatagaggacacgagcggcgccttctcagggctcgacagcctcagcaagctgactctgtttggaaacaagatcaagtctgtggctaagagagcattctcggggctggaaggcctggagcacctgaaccttggagggaatgcgatcagatctgtccagtttgatgcctttgtgaagatgaagaatcttaaagagctccatatcagcagcgacagcttcctgtgtgactgccagctgaagtggctgcccccgtggctaattggcaggatgctgcaggcctttgtgacagccacctgtgcccacccagaatcactgaagggtcagagcattttctctgtgccaccagagagtttcgtgtgcgatgacttcctgaagccacagatcatcacccagccagaaaccaccatggctatggtgggcaaggacatccggtttacatgctcagcagccagcagcagcagctcccccatgacctttgcctggaagaaagacaatgaagtcctgaccaatgcagacatggagaactttgtccacgtccacgcgcaggacggggaagtgatggagtacaccaccatcctgcacctccgtcaggtcactttcgggcacgagggccgctaccaatgtgtcatcaccaaccactttggctccacctattcacataaggccaggctcaccgtgaatgtgttgccatcattcaccaaaacgccccacgacataaccatccggaccaccaccatggcccgcctcgaatgtgctgccacaggtcacccaaaccctcagattgcctggcagaaggatggaggcacggatttccccgctgcccgtgagcgacgcatgcatgtcatgccggatgacaggacagctccccgggaaacagagggtgccactgctgttggcaccaaaaagctaggttttgtctacctcagttcttgtcataccaatctctacgggaaagagaggtaggagaggctgcgaggaagcttgggttcaagcgtcactcatctgtacatagttgtaactcccatgtggagtatcagtcgctcacaggacttggatctgaagcacagtaaacgcaagaggggatttgtgtacaaaaggcaaaaaaagtatttgatatcattgtacataagagttttcagagatttcatatatatcttttacagaggctattttaatctttagtgcatggttaacagaaaaaaattatacaattttgacaatattatttttcgtatcaggttgctgtttaattttggagggggtggggaaatagttctggtgccttaacgcatggctggaatttatagaggctacaaccacatttgttcacaggagtttttggtgcggggtgggaaggatggaaggccttggatttatattgcacttcatagacccctaggctgctgtgcggtgggactccacatgcgccggaaggagcttcaggtgagcactgctcatgtgtggatgcccctgcaacaggcttccctgtctgtagagccaggggtgcaagtgccatccacacttgcagtgaatggcttttccttttaggtttaagtcctgtctgtctgtaaggcgtagaatctgtccgtctgtaaggcgtagaatgagggttgttaatccatcacaagcaaaaggtcagaacagttaaacactgcctttcctcctcctcttattttatgataaaagcaaatgtggccttctcagtatcattcgattgctatttgagacttttaaattaaggtaaaggctgctggtgttggtacctgtggatttttctatactgatgttttcgttttgccaatataatgagtattacattggccttgggggacagaaaggaggaagttctgacttttcagggctaccttatttctactaaggacccagagcaggcctgtccatgccattccttcgcacagatgaaactgagctgggactggaaaggacagcccttgacctgggttctgggtataatttgcacttttgagactggtagctaaccatcttatgagtgccaatgtgtcatttagtaaaacttaaatagaaacaaggtccttcaaatgttcctttggccaaaagctgaagggagttactgagaaaatagttaacaattactgtcaggtgtcatcactgttcaaaaggtaagcacatttagaattttgttcttgacagttaactgactaatcttacttccacaaaatatgtgaatttgctgcttctgagaggcaatgtgaaagagggagtattacttttatgtacaaagttatttatttatagaaattttggtacagtgtacattgaaaaccatgtaaaatattgaagtgtctaacaaatggcattgaagtgtctttaataaaggttcatttataaatgtca

SEQ ID NO: 356604 - DNA, 5204 bp, Homo sapiens
  misc_feature (473)..(473): n is a, c, g, or t
  misc_feature (5181)..(5181): n is a, c, g, or t
ggcgggactcttgctgcgcggaggagccgtgcggaacccgaggctgcgcgcgcgcgcgcgctctctggccgcggcgtggggacagcgaggcgcactggggcctcccagcgcggggccggccgcgccgtccagcccgaggtctacggctttgcgctccgagcccagaggaagatgcctgccggcaccgagctcgggctgcggggctgaacgcctgtcttccaggcgcagcggcagcactgccctcggccggtgtcggtagcggcactcggcgtgccccgggcggacgaagagcgcaggctgggtacaccttgcccgaatcggcggagttcgcagctagcgagggcgggccggccggcccggatgggcgcggggtttgcggcccccgccgggtgctccggagcggcccgggcaccgggggcacgctgagtgccggagccgcggccgcagagagaacttggggcgggggccatgcnccggtgcggagtctagagccgagcggagcgccccgcgggcccgcccgcgtctgcggccgttcgggtcctcacagtccccgcgcccggagttcgcagcgcgctccagacaagatggcgcggccggtccggggagggctcggggccccgcgccgctcgccttgccttctccttctctggctgcttttgcttcggctggagccggtgaccgccgcggccggcccgcgggcgccctgcgcggccgcctgcacttgcgctggggactcgctggactgcggtgggcgcgggctggctgcgttgcccggggacctgccctcctggacgcggagcctaaacctgagttacaacaaactctctgagattgaccctgctggttttgaggacttgccgaacctacaggaagtgtacctcaataataatgagttgacagcggtaccatccctgggcgctgcttcatcacatgtcgtctctctctttctgcagcacaacaagattcgcagcgtggaggggagccagctgaaggcctacctttccttagaagtgttagatctgagtttgaacaacatcacggaagtgcggaacacctgctttccacacggaccgcctataaaggagctcaacctggcaggcaatcggattggcaccctggagttgggagcatttgatggtctgtcacggtcgctgctaactcttcgcctgagcaaaaacaggatcacccagcttcctgtaagagcattcaagctacccaggctgacacaactggacctcaatcggaacaggattcggctgatagagggcctcaccttccaggggctcaacagcttggaggtgctgaagcttcagcgaaacaacatcagcaaactgacagatggggccttctggggactgtccaagatgcatgtgctgcacctggagtacaacagcctggtagaagtgaacagcggctcgctctacggcctcacggccctgcatcagctccacctcagcaacaattccatcgctcgcattcaccgcaagggctggagcttctgccagaagctgcatgagttggtcctgtccttcaacaacctgacacggctggacgaggagagcctggccgagctgagcagcctgagtgtcctgcgtctcagccacaattccatcagccacattgcggagggtgccttcaagggactcaggagcctgcgagtcttggatctggaccataacgagatttcgggcacaatagaggacacgagcggcgccttctcagggctcgacagcctcagcaagctgactctgtttggaaacaagatcaagtctgtggctaagagagcattctcggggctggaaggcctggagcacctgaaccttggagggaatgcgatcagatctgtccagtttgatgcctttgtgaagatgaagaatcttaaagagctccatatcagcagcgacagcttcctgtgtgactgccagctgaagtggctgcccccgtggctaattggcaggatgctgcaggcctttgtgacagccacctgtgcccacccagaatcactgaagggtcagagcattttctctgtgccaccagagagtttcgtgtgcgatgacttcctgaagccacagatcatcacccagccagaaaccaccatggctatggtgggcaaggacatccggtttacatgctcagcagccagcagcagcagctcccccatgacctttgcctggaagaaagacaatgaagtcctgaccaatgcagacatggagaactttgtccacgtccacgcgcaggacggggaagtgatggagtacaccaccatcctgcacctccgtcaggtcactttcgggcacgagggccgctaccaatgtgtcatcaccaaccactttggctccacctattcacataaggccaggctcaccgtgaatgtgttgccatcattcaccaaaacgccccacgacataaccatccggaccaccaccatggcccgcctcgaatgtgctgccacaggtcacccaaaccctcagattgcctggcagaaggatggaggcacggatttccccgctgcccgtgagcgacgcatgcatgtcatgccggatgacgacgtgtttttcatcactgatgtgaaaatagatgacgcaggggtttacagctgtactgctcagaactcagccggttctatttcagctaatgccaccctgactgtcctagagaccccatccttggtggtccccttggaagaccgtgtggtatctgtgggagaaacagtggccctccaatgcaaagccacggggaaccctccgccccgcatcacctggttcaagggggaccgcccgctgagcctcactgagcggcaccacttgacccctgacaaccagctcctggtggttcagaacgtggtggcagaggatgcgggccgatatacctgtgagatgtccaacaccctgggcacggagcgagctcacagccagctgagcgtcctgcccgcagcaggctgcaggaaggatgggaccacggtaggcatcttcaccattgctgtcgtgagcagcatcgtcctgacgtcactggtctgggtgtgcatcatctaccagaccaggaagaagagtgaagagtacagtgtcaccaacacagatgaaaccgtcgtgccaccagatgttccaagctacctctcttctcaggggaccctttctgaccgacaagaaaccgtggtcaggaccgagggtggccctcaggccaatgggcacattgagagcaatggtgtgtgtccaagagatgcaagccactttccagagcccgacactcacagcgttgcctgcaggcagccaaagctctgtgctgggtctgcgtatcacaaagagccgtggaaagcgatggagaaagctgaagggacacctgggccacataagatggaacacggtggccgggtcgtatgcagtgactgcaacaccgaagtggactgttactccaggggacaagccttccacccccagcctgtgtccagagacagcgcacagccaagtgcgccaaatggcccggagccgggtgggagtgaccaagagcattctccacatcaccagtgcagcaggactgccgctgggtcctgccccgagtgccaagggtcgctctaccccagtaaccacgatagaatgctgacggctgtgaagaaaaagccaatggcatctctagatgggaaaggggattcttcctggactttagcaaggttgtatcacccggactccacagagctacagcctgcatcttcattaacttcaggcagtccagagcgcgcggaagcccagtacttgcttgtttccaatggccacctccccaaagcatgtgacgccagtcccgagtccacgccactgacaggacagctccccgggaaacagagggtgccactgctgttggcaccaaaaagctaggttttgtctacctcagttcttgtcataccaatctctacgggaaagagaggtaggagaggctgcgaggaagcttgggttcaagcgtcactcatctgtacatagttgtaactcccatgtggagtatcagtcgctcacaggacttggatctgaagcacagtaaacgcaagaggggatttgtgtacaaaaggcaaaaaaagtatttgatatcattgtacataagagttttcagagatttcatatatatcttttacagaggctattttaatctttagtgcatggttaacagaaaaaaattatacaattttgacaatattatttttcgtatcaggttgctgtttaattttggagggggtggggaaatagttctggtgccttaacgcatggctggaatttatagaggctacaaccacatttgttcacaggagtttttggtgcggggtgggaaggatggaaggccttggatttatattgcacttcatagacccctaggctgctgtgcggtgggactccacatgcgccggaaggagcttcaggtgagcactgctcatgtgtggatgcccctgcaacaggcttccctgtctgtagagccaggggtgcaagtgccatccacacttgcagtgaatggcttttccttttaggtttaagtcctgtctgtctgtaaggcgtagaatctgtccgtctgtaaggcgtagaatgagggttgttaatccatcacaagcaaaaggtcagaacagttaaacactgcctttcctcctcctcttattttatgataaaagcaaatgtggccttctcagtatcattcgattgctatttgagacttttaaattaaggtaaaggctgctggtgttggtacctgtggatttttctatactgatgttttcgttttgccaatataatgagtattacattggccttgggggacagaaaggaggaagttctgacttttcagggctaccttatttctactaaggacccagagcaggcctgtccatgccattccttcgcacagatgaaactgagctgggactggaaaggacagcccttgacctgggttctgggtataatttgcacttttgagactggtagctaaccatcttatgagtgccaatgtgtcatttagtaaaacttaaatagaaacaaggtccttcaaatgttcctttggccaaaagctgaagggagttactgagaaaatagttaacaattactgtcaggtgtcatcactgttcaaaatcctctgtggctttccatctcactcacagtaatgtccatattcctcactgtgacatacagggttctgtagtttgatgcgacctcnccggtatttccgttgattactga

SEQ ID NO: 356605 - DNA, 2484 bp, Homo sapiens
  misc_feature (473)..(473): n is a, c, g, or t
ggcgggactcttgctgcgcggaggagccgtgcggaacccgaggctgcgcgcgcgcgcgcgctctctggccgcggcgtggggacagcgaggcgcactggggcctcccagcgcggggccggccgcgccgtccagcccgaggtctacggctttgcgctccgagcccagaggaagatgcctgccggcaccgagctcgggctgcggggctgaacgcctgtcttccaggcgcagcggcagcactgccctcggccggtgtcggtagcggcactcggcgtgccccgggcggacgaagagcgcaggctgggtacaccttgcccgaatcggcggagttcgcagctagcgagggcgggccggccggcccggatgggcgcggggtttgcggcccccgccgggtgctccggagcggcccgggcaccgggggcacgctgagtgccggagccgcggccgcagagagaacttggggcgggggccatgcnccggtgcggagtctagagccgagcggagcgccccgcgggcccgcccgcgtctgcggccgttcgggtcctcacagtccccgcgcccggagttcgcagcgcgctccagacaagatggcgcggccggtccggggagggctcggggccccgcgccgctcgccttgccttctccttctctggctgcttttgcttcggctggagccggtgaccgccgcggccggcccgcgggcgccctgcgcggccgcctgcacttgcgctggggactcgctggactgcggtgggcgcgggctggctgcgttgcccggggacctgccctcctggacgcggagcctaaacctgagttacaacaaactctctgagattgaccctgctggttttgaggacttgccgaacctacaggaagtgtacctcaataataatgagttgacagcggtaccatccctgggcgctgcttcatcacatgtcgtctctctctttctgcagcacaacaagattcgcagcgtggaggggagccagctgaaggcctacctttccttagaagtgttagatctgagtttgaacaacatcacggaagtgcggaacacctgctttccacacggaccgcctataaaggagctcaacctggcaggcaatcggattggcaccctggagttgggagcatttgatggtctgtcacggtcgctgctaactcttcgcctgagcaaaaacaggatcacccagcttcctgtaagagcattcaagctacccaggctgacacaactggacctcaatcggaacaggattcggctgatagagggcctcaccttccaggggctcaacagcttggaggtgctgaagcttcagcgaaacaacatcagcaaactgacagatggggccttctggggactgtccaagatgcatgtgctgcacctggagtacaacagcctggtagaagtgaacagcggctcgctctacggcctcacggccctgcatcagctccacctcagcaacaattccatcgctcgcattcaccgcaagggctggagcttctgccagaagctgcatgagttggtcctgtccttcaacaacctgacacggctggacgaggagagcctggccgagctgagcagcctgagtgtcctgcgtctcagccacaattccatcagccacattgcggagggtgccttcaagggactcaggagcctgcgagtcttggatctggaccataacgagatttcgggcacaatagaggacacgagcggcgccttctcagggctcgacagcctcagcaagctgactctgtttggaaacaagatcaagtctgtggctaagagagcattctcggggctggaaggcctggagcacctgtgagtatctcaccagccctgccctgaggcacagcctgctgaatgcggctgccggggagttctgctagcaatttaatcgcatctttgtaaactgagaaacaggctatttggaaacaccagctgcttccttctcattatgtcagcttcagctttggcctttatgttgcctatgccaggaacagttacagaacatatggccagtggatgtgctcccagttaattcagttggtatttggataaataccctccccgctcctgctgcgcagcctaacccctgcactggctccttcatggacccctggcctcattgcctcttccaccaacgcgcttcctcctggccaagcctgttgcctccattaaagcagcttaacaatgcagagtaggtgctgggctgaaccagtttggtgtggttgcttctgagaccctgggaggaagggaacagagccacccgagacagtcatgctgttgccatctggggaggatgcctcatgtatgtgattcttagtttgtttcctctttgaatcaagtttgactctaactctgttgggaaaggttttgccttgctgagcaggcctcagcccagctttgatggtgccctaaggctggcttggctcctgagtcattccatgggcttgtgttgcgatttgggaaacaacagccacttatag

SEQ ID NO: 356606 - DNA, 350 bp, Homo sapiens
ccggttctatttcagctaatgccaccctgactgtcctaggtttgcctattgctctactgtgtgtgtgtgtgtgtgtgtgtgagcgagagagagagactctcaaatgctctgtgtggccaggggtggtatgcgttgtgggcctttcgaccctgtttgaaatttggggctgctttttgagttgagttaatttttcttaaacaagtgtttctatctctttaaaagaaatgatagctggtgaattaagagtcttcatagggtttagctacagaacattttaagaattggacaggatggatgtgggcttggtcaagagctacagaacattttaagaattggacaggatggatgtg

SEQ ID NO: 356607 - DNA, 308 bp, Homo sapiens
tttgactcagcttcctctcactgaaaccataatcagtctcatctctccatcactaaacttcaccacccaagggttggtggtccttggagagagactgggccagacaaggtgatttctgcctaacactgggaggggccttttttaggccagacggcacatgcaattccagcctatcatcactattaaattctaataaagataaaagtatttcatttcagaaaggggaaggcctgcgtgcctcaaacccgtaatctcagcgcaggtcagctttccacctgcccctcactggacagacttatcaggtagca

SEQ ID NO: 356608 - DNA, 862 bp, Homo sapiens
agggaagaatggggctttggataagttaaaataccacaaagctcacatttctgagatgttgctatttgcttgaatcaacaatccatggattgttgtaagcctttggttttccagaattctgaaaaagttgcttttgaccatttttccaggtgttttccttgttttaatggaggtgcagatttttggaggtccttattctgacattttggaagtgttttacaccccctccttttggagtaaggtttgtgggtaagatctctgcagtcatgaccagtggtgcctgactgttttgtgtgaaagtcagcaggcagagccagttgtcttaaggaaactgccggctggctggtttgagaactgagaagtggtgggttaatttctaatcaaggagtgtgatcataaaggtgatcagtactcacagacttctaattagatgaggtcagatgtccatggtgcaactcttacggcatctggttggtggggctgaggatgcacagggacctcaagctctggttcctgcttggtgtctgtgtcagtttctgttagcatgaacagcagctggttcctctgtgtaccaagaacccagcgctttacagttgacccttctctccccagatgacttcctgaagccacagatcatcacccagccagaaaccaccatggctatggtgggcaaggacatccggtttacatgctcagcagccagcagcagcagctcccccaagaaccacctggtggagatcccgaccaaactacccagctccctggtggagctccgcatccacggagatcgtgatcctcgaggatcacgatgtccgtcggacatggtgcagggagactcgaagtactgtcgggctagtcgggg

SEQ ID NO: 356609 - DNA, 5639 bp, Homo sapiens
  misc_feature (473)..(473): n is a, c, g, or t
ggcgggactcttgctgcgcggaggagccgtgcggaacccgaggctgcgcgcgcgcgcgcgctctctggccgcggcgtggggacagcgaggcgcactggggcctcccagcgcggggccggccgcgccgtccagcccgaggtctacggctttgcgctccgagcccagaggaagatgcctgccggcaccgagctcgggctgcggggctgaacgcctgtcttccaggcgcagcggcagcactgccctcggccggtgtcggtagcggcactcggcgtgccccgggcggacgaagagcgcaggctgggtacaccttgcccgaatcggcggagttcgcagctagcgagggcgggccggccggcccggatgggcgcggggtttgcggcccccgccgggtgctccggagcggcccgggcaccgggggcacgctgagtgccggagccgcggccgcagagagaacttggggcgggggccatgcnccggtgcggagtctagagccgagcggagcgccccgcgggcccgcccgcgtctgcggccgttcgggtcctcacagtccccgcgcccggagttcgcagcgcgctccagacaagatggcgcggccggtccggggagggctcggggccccgcgccgctcgccttgccttctccttctctggctgcttttgcttcggctggagccggtgaccgccgcggccggcccgcgggcgccctgcgcggccgcctgcacttgcgctggggactcgctggactgcggtgggcgcgggctggctgcgttgcccggggacctgccctcctggacgcggagcctgtgagtgccgccctttccgccctctctgcgccccggggctctgtcacttggggatggagcggcgggggttcgtactcagggagggggtgcggactgggttgtgtgtgtggagttgtgcgtgcttgtgcgtgttggaagactgtcaggttggagtggcggaagggagattctgcgtggaggtccgggggagtaggcgtgcgagagagcctggagaagaagagcgtgcctcgtggggtctggagacgagcgagcgtgggtcgtagagatttgggggttagccagcacgcgtcgtgcgggccatctggggaaacctgagttacaacaaactctctgagattgaccctgctggttttgaggacttgccgaacctacaggaagtgtacctcaataataatgagttgacagcggtaccatccctgggcgctgcttcatcacatgtcgtctctctctttctgcagcacaacaagattcgcagcgtggaggggagccagctgaaggcctacctttccttagaagtgttagatctgagtttgaacaacatcacggaagtgcggaacacctgctttccacacggaccgcctataaaggagctcaacctggcaggcaatcggattggcaccctggagttgggagcatttgatggtctgtcacggtcgctgctaactcttcgcctgagcaaaaacaggatcacccagcttcctgtaagagcattcaagctacccaggctgacacaactggacctcaatcggaacaggattcggctgatagagggcctcaccttccaggggctcaacagcttggaggtgctgaagcttcagcgaaacaacatcagcaaactgacagatggggccttctggggactgtccaagatgcatgtgctgcacctggagtacaacagcctggtagaagtgaacagcggctcgctctacggcctcacggccctgcatcagctccacctcagcaacaattccatcgctcgcattcaccgcaagggctggagcttctgccagaagctgcatgagttggtcctgtccttcaacaacctgacacggctggacgaggagagcctggccgagctgagcagcctgagtgtcctgcgtctcagccacaattccatcagccacattgcggagggtgccttcaagggactcaggagcctgcgagtcttggatctggaccataacgagatttcgggcacaatagaggacacgagcggcgccttctcagggctcgacagcctcagcaagctgactctgtttggaaacaagatcaagtctgtggctaagagagcattctcggggctggaaggcctggagcacctgaaccttggagggaatgcgatcagatctgtccagtttgatgcctttgtgaagatgaagaatcttaaagagctccatatcagcagcgacagcttcctgtgtgactgccagctgaagtggctgcccccgtggctaattggcaggatgctgcaggcctttgtgacagccacctgtgcccacccagaatcactgaagggtcagagcattttctctgtgccaccagagagtttcgtgtgcgatgacttcctgaagccacagatcatcacccagccagaaaccaccatggctatggtgggcaaggacatccggtttacatgctcagcagccagcagcagcagctcccccatgacctttgcctggaagaaagacaatgaagtcctgaccaatgcagacatggagaactttgtccacgtccacgcgcaggacggggaagtgatggagtacaccaccatcctgcacctccgtcaggtcactttcgggcacgagggccgctaccaatgtgtcatcaccaaccactttggctccacctattcacataaggccaggctcaccgtgaatgtgttgccatcattcaccaaaacgccccacgacataaccatccggaccaccaccatggcccgcctcgaatgtgctgccacaggtcacccaaaccctcagattgcctggcagaaggatggaggcacggatttccccgctgcccgtgagcgacgcatgcatgtcatgccggatgacgacgtgtttttcatcactgatgtgaaaatagatgacgcaggggtttacagctgtactgctcagaactcagccggttctatttcagctaatgccaccctgactgtcctagagaccccatccttggtggtccccttggaagaccgtgtggtatctgtgggagaaacagtggccctccaatgcaaagccacggggaaccctccgccccgcatcacctggttcaagggggaccgcccgctgagcctcactgagcggcaccacttgacccctgacaaccagctcctggtggttcagaacgtggtggcagaggatgcgggccgatatacctgtgagatgtccaacaccctgggcacggagcgagctcacagccagctgagcgtcctgcccgcagcaggctgcaggaaggatgggaccacggtaggcatcttcaccattgctgtcgtgagcagcatcgtcctgacgtcactggtctgggtgtgcatcatctaccagaccaggaagaagagtgaagagtacagtgtcaccaacacagatgaaaccgtcgtgccaccagatgttccaagctacctctcttctcaggggaccctttctgaccgacaagaaaccgtggtcaggaccgagggtggccctcaggccaatgggcacattgagagcaatggtgtgtgtccaagagatgcaagccactttccagagcccgacactcacagcgttgcctgcaggcagccaaagctctgtgctgggtctgcgtatcacaaagagccgtggaaagcgatggagaaagctgaagggacacctgggccacataagatggaacacggtggccgggtcgtatgcagtgactgcaacaccgaagtggactgttactccaggggacaagccttccacccccagcctgtgtccagagacagcgcacagccaagtgcgccaaatggcccggagccgggtgggagtgaccaagagcattctccacatcaccagtgcagcaggactgccgctgggtcctgccccgagtgccaagggtcgctctaccccagtaaccacgatagaatgctgacggctgtgaagaaaaagccaatggcatctctagatgggaaaggggattcttcctggactttagcaaggttgtatcacccggactccacagagctacagcctgcatcttcattaacttcaggcagtccagagcgcgcggaagcccagtacttgcttgtttccaatggccacctccccaaagcatgtgacgccagtcccgagtccacgccactgacaggacagctccccgggaaacagagggtgccactgctgttggcaccaaaaagctaggttttgtctacctcagttcttgtcataccaatctctacgggaaagagaggtaggagaggctgcgaggaagcttgggttcaagcgtcactcatctgtacatagttgtaactcccatgtggagtatcagtcgctcacaggacttggatctgaagcacagtaaacgcaagaggggatttgtgtacaaaaggcaaaaaaagtatttgatatcattgtacataagagttttcagagatttcatatatatcttttacagaggctattttaatctttagtgcatggttaacagaaaaaaattatacaattttgacaatattatttttcgtatcaggttgctgtttaattttggagggggtggggaaatagttctggtgccttaacgcatggctggaatttatagaggctacaaccacatttgttcacaggagtttttggtgcggggtgggaaggatggaaggccttggatttatattgcacttcatagacccctaggctgctgtgcggtgggactccacatgcgccggaaggagcttcaggtgagcactgctcatgtgtggatgcccctgcaacaggcttccctgtctgtagagccaggggtgcaagtgccatccacacttgcagtgaatggcttttccttttaggtttaagtcctgtctgtctgtaaggcgtagaatctgtccgtctgtaaggcgtagaatgagggttgttaatccatcacaagcaaaaggtcagaacagttaaacactgcctttcctcctcctcttattttatgataaaagcaaatgtggccttctcagtatcattcgattgctatttgagacttttaaattaaggtaaaggctgctggtgttggtacctgtggatttttctatactgatgttttcgttttgccaatataatgagtattacattggccttgggggacagaaaggaggaagttctgacttttcagggctaccttatttctactaaggacccagagcaggcctgtccatgccattccttcgcacagatgaaactgagctgggactggaaaggacagcccttgacctgggttctgggtataatttgcacttttgagactggtagctaaccatcttatgagtgccaatgtgtcatttagtaaaacttaaatagaaacaaggtccttcaaatgttcctttggccaaaagctgaagggagttactgagaaaatagttaacaattactgtcaggtgtcatcactgttcaaaaggtaagcacatttagaattttgttcttgacagttaactgactaatcttacttccacaaaatatgtgaatttgctgcttctgagaggcaatgtgaaagagggagtattacttttatgtacaaagttatttatttatagaaattttggtacagtgtacattgaaaaccatgtaaaatattgaagtgtctaacaaatggcattgaagtgtctttaataaaggttcatttataaatgtca

SEQ ID NO: 356610 - DNA, 3631 bp, Homo sapiens
tctcaggtgggttatatgcactgccctgggaaattggagaggaagtgtgagaaaaaccatttcccccttccagcttgctgatgttcacttgagaagctgattggaggcgactgatcagtgtgtgtgtgaagggagtgtccctcctttgcggctgcacctgaagcatccactgttgtgtttctttcagccatatcagcagcgacagcttcctgtgtgactgccagctgaagtggctgcccccgtggctaattggcaggatgctgcaggcctttgtgacagccacctgtgcccacccagaatcactgaagggtcagagcattttctctgtgccaccagagagtttcgtgtgcgatgacttcctgaagccacagatcatcacccagccagaaaccaccatggctatggtgggcaaggacatccggtttacatgctcagcagccagcagcagcagctcccccatgacctttgcctggaagaaagacaatgaagtcctgaccaatgcagacatggagaactttgtccacgtccacgcgcaggacggggaagtgatggagtacaccaccatcctgcacctccgtcaggtcactttcgggcacgagggccgctaccaatgtgtcatcaccaaccactttggctccacctattcacataaggccaggctcaccgtgaatgtgttgccatcattcaccaaaacgccccacgacataaccatccggaccaccaccatggcccgcctcgaatgtgctgccacaggtcacccaaaccctcagattgcctggcagaaggatggaggcacggatttccccgctgcccgtgagcgacgcatgcatgtcatgccggatgacgacgtgtttttcatcactgatgtgaaaatagatgacgcaggggtttacagctgtactgctcagaactcagccggttctatttcagctaatgccaccctgactgtcctagagaccccatccttggtggtccccttggaagaccgtgtggtatctgtgggagaaacagtggccctccaatgcaaagccacggggaaccctccgccccgcatcacctggttcaagggggaccgcccgctgagcctcactgagcggcaccacttgacccctgacaaccagctcctggtggttcagaacgtggtggcagaggatgcgggccgatatacctgtgagatgtccaacaccctgggcacggagcgagctcacagccagctgagcgtcctgcccgcagcaggctgcaggaaggatgggaccacggtaggcatcttcaccattgctgtcgtgagcagcatcgtcctgacgtcactggtctgggtgtgcatcatctaccagaccaggaagaagagtgaagagtacagtgtcaccaacacagatgaaaccgtcgtgccaccagatgttccaagctacctctcttctcaggggaccctttctgaccgacaagaaaccgtggtcaggaccgagggtggccctcaggccaatgggcacattgagagcaatggtgtgtgtccaagagatgcaagccactttccagagcccgacactcacagcgttgcctgcaggcagccaaagctctgtgctgggtctgcgtatcacaaagagccgtggaaagcgatggagaaagctgaagggacacctgggccacataagatggaacacggtggccgggtcgtatgcagtgactgcaacaccgaagtggactgttactccaggggacaagccttccacccccagcctgtgtccagagacagcgcacagccaagtgcgccaaatggcccggagccgggtgggagtgaccaagagcattctccacatcaccagtgcagcaggactgccgctgggtcctgccccgagtgccaagggtcgctctaccccagtaaccacgatagaatgctgacggctgtgaagaaaaagccaatggcatctctagatgggaaaggggattcttcctggactttagcaaggttgtatcacccggactccacagagctacagcctgcatcttcattaacttcaggcagtccagagcgcgcggaagcccagtacttgcttgtttccaatggccacctccccaaagcatgtgacgccagtcccgagtccacgccactgacaggacagctccccgggaaacagagggtgccactgctgttggcaccaaaaagctaggttttgtctacctcagttcttgtcataccaatctctacgggaaagagaggtaggagaggctgcgaggaagcttgggttcaagcgtcactcatctgtacatagttgtaactcccatgtggagtatcagtcgctcacaggacttggatctgaagcacagtaaacgcaagaggggatttgtgtacaaaaggcaaaaaaagtatttgatatcattgtacataagagttttcagagatttcatatatatcttttacagaggctattttaatctttagtgcatggttaacagaaaaaaattatacaattttgacaatattatttttcgtatcaggttgctgtttaattttggagggggtggggaaatagttctggtgccttaacgcatggctggaatttatagaggctacaaccacatttgttcacaggagtttttggtgcggggtgggaaggatggaaggccttggatttatattgcacttcatagacccctaggctgctgtgcggtgggactccacatgcgccggaaggagcttcaggtgagcactgctcatgtgtggatgcccctgcaacaggcttccctgtctgtagagccaggggtgcaagtgccatccacacttgcagtgaatggcttttccttttaggtttaagtcctgtctgtctgtaaggcgtagaatctgtccgtctgtaaggcgtagaatgagggttgttaatccatcacaagcaaaaggtcagaacagttaaacactgcctttcctcctcctcttattttatgataaaagcaaatgtggccttctcagtatcattcgattgctatttgagacttttaaattaaggtaaaggctgctggtgttggtacctgtggatttttctatactgatgttttcgttttgccaatataatgagtattacattggccttgggggacagaaaggaggaagttctgacttttcagggctaccttatttctactaaggacccagagcaggcctgtccatgccattccttcgcacagatgaaactgagctgggactggaaaggacagcccttgacctgggttctgggtataatttgcacttttgagactggtagctaaccatcttatgagtgccaatgtgtcatttagtaaaacttaaatagaaacaaggtccttcaaatgttcctttggccaaaagctgaagggagttactgagaaaatagttaacaattactgtcaggtgtcatcactgttcaaaaggtaagcacatttagaattttgttcttgacagttaactgactaatcttacttccacaaaatatgtgaatttgctgcttctgagaggcaatgtgaaagagggagtattacttttatgtacaaagttatttatttatagaaattttggtacagtgtacattgaaaaccatgtaaaatattgaagtgtctaacaaatggcattgaagtgtctttaataaaggttcatttataaatgtca

SEQ ID NO: 356611 - DNA, 2752 bp, Homo sapiens
gctagtacgagggctggtttgaatctggccgaggctcagcggttctatttcagctaatgcaccctgactgtctagagaccccatccttggtggtccccttggaagaccgtgtggtatctgtgggagaaacagtggccctccaatgcaaagccacggggaaccctccgccccgcatcacctggttcaagggggaccgcccgctgagcctcactgagcggcaccacttgacccctgacaaccagctcctggtggttcagaacgtggtggcagaggatgcgggccgatatacctgtgagatgtccaacaccctgggcacggagcgagctcacagccagctgagcgtcctgcccgcagcaggctgcaggaaggatgggaccacggtaggcatcttcaccattgctgtcgtgagcagcatcgtcctgacgtcactggtctgggtgtgcatcatctaccagaccaggaagaagagtgaagagtacagtgtcaccaacacagatgaaaccgtcgtgccaccagatgttccaagctacctctcttctcaggggaccctttctgaccgacaagaaaccgtggtcaggaccgagggtggccctcaggccaatgggcacattgagagcaatggtgtgtgtccaagagatgcaagccactttccagagcccgacactcacagcgttgcctgcaggcagccaaagctctgtgctgggtctgcgtatcacaaagagccgtggaaagcgatggagaaagctgaagggacacctgggccacataagatggaacacggtggccgggtcgtatgcagtgactgcaacaccgaagtggactgttactccaggggacaagccttccacccccagcctgtgtccagagacagcgcacagccaagtgcgccaaatggcccggagccgggtgggagtgaccaagagcattctccacatcaccagtgcagcaggactgccgctgggtcctgccccgagtgccaagggtcgctctaccccagtaaccacgatagaatgctgacggctgtgaagaaaaagccaatggcatctctagatgggaaaggggattcttcctggactttagcaaggttgtatcacccggactccacagagctacagcctgcatcttcattaacttcaggcagtccagagcgcgcggaagcccagtacttgcttgtttccaatggccacctccccaaagcatgtgacgccagtcccgagtccacgccactgacaggacagctccccgggaaacagagggtgccactgctgttggcaccaaaaagctaggttttgtctacctcagttcttgtcataccaatctctacgggaaagagaggtaggagaggctgcgaggaagcttgggttcaagcgtcactcatctgtacatagttgtaactcccatgtggagtatcagtcgctcacaggacttggatctgaagcacagtaaacgcaagaggggatttgtgtacaaaaggcaaaaaaagtatttgatatcattgtacataagagttttcagagatttcatatatatcttttacagaggctattttaatctttagtgcatggttaacagaaaaaaattatacaattttgacaatattatttttcgtatcaggttgctgtttaattttggagggggtggggaaatagttctggtgccttaacgcatggctggaatttatagaggctacaaccacatttgttcacaggagtttttggtgcggggtgggaaggatggaaggccttggatttatattgcacttcatagacccctaggctgctgtgcggtgggactccacatgcgccggaaggagcttcaggtgagcactgctcatgtgtggatgcccctgcaacaggcttccctgtctgtagagccaggggtgcaagtgccatccacacttgcagtgaatggcttttccttttaggtttaagtcctgtctgtctgtaaggcgtagaatctgtccgtctgtaaggcgtagaatgagggttgttaatccatcacaagcaaaaggtcagaacagttaaacactgcctttcctcctcctcttattttatgataaaagcaaatgtggccttctcagtatcattcgattgctatttgagacttttaaattaaggtaaaggctgctggtgttggtacctgtggatttttctatactgatgttttcgttttgccaatataatgagtattacattggccttgggggacagaaaggaggaagttctgacttttcagggctaccttatttctactaaggacccagagcaggcctgtccatgccattccttcgcacagatgaaactgagctgggactggaaaggacagcccttgacctgggttctgggtataatttgcacttttgagactggtagctaaccatcttatgagtgccaatgtgtcatttagtaaaacttaaatagaaacaaggtccttcaaatgttcctttggccaaaagctgaagggagttactgagaaaatagttaacaattactgtcaggtgtcatcactgttcaaaaggtaagcacatttagaattttgttcttgacagttaactgactaatcttacttccacaaaatatgtgaatttgctgcttctgagaggcaatgtgaaagagggagtattacttttatgtacaaagttatttatttatagaaattttggtacagtgtacattgaaaaccatgtaaaatattgaagtgtctaacaaatggcattgaagtgtctttaataaaggttcatttataaatgtca

SEQ ID NO: 356612 - DNA, 5687 bp, Homo sapiens
  misc_feature (473)..(473): n is a, c, g, or t
ggcgggactcttgctgcgcggaggagccgtgcggaacccgaggctgcgcgcgcgcgcgcgctctctggccgcggcgtggggacagcgaggcgcactggggcctcccagcgcggggccggccgcgccgtccagcccgaggtctacggctttgcgctccgagcccagaggaagatgcctgccggcaccgagctcgggctgcggggctgaacgcctgtcttccaggcgcagcggcagcactgccctcggccggtgtcggtagcggcactcggcgtgccccgggcggacgaagagcgcaggctgggtacaccttgcccgaatcggcggagttcgcagctagcgagggcgggccggccggcccggatgggcgcggggtttgcggcccccgccgggtgctccggagcggcccgggcaccgggggcacgctgagtgccggagccgcggccgcagagagaacttggggcgggggccatgcnccggtgcggagtctagagccgagcggagcgccccgcgggcccgcccgcgtctgcggccgttcgggtcctcacagtccccgcgcccggagttcgcagcgcgctccagacaagatggcgcggccggtccggggagggctcggggccccgcgccgctcgccttgccttctccttctctggctgcttttgcttcggctggagccggtgaccgccgcggccggcccgcgggcgccctgcgcggccgcctgcacttgcgctggggactcgctggactgcggtgggcgcgggctggctgcgttgcccggggacctgccctcctggacgcggagcctaaacctgagttacaacaaactctctgagattgaccctgctggttttgaggacttgccgaacctacaggaagtgtacctcaataataatgagttgacagcggtaccatccctgggcgctgcttcatcacatgtcgtctctctctttctgcagcacaacaagattcgcagcgtggaggggagccagctgaaggcctacctttccttagaagtgttagatctgagtttgaacaacatcacggaagtgcggaacacctgctttccacacggaccgcctataaaggagctcaacctggcaggcaatcggattggcaccctggagttgggagcatttgatggtctgtcacggtcgctgctaactcttcgcctgagcaaaaacaggatcacccagcttcctgtaagagcattcaagctacccaggctgacacaactggacctcaatcggaacaggattcggctgatagagggcctcaccttccaggggctcaacagcttggaggtgctgaagcttcagcgaaacaacatcagcaaactgacagatggggccttctggggactgtccaagatgcatgtgctgcacctggagtacaacagcctggtagaagtgaacagcggctcgctctacggcctcacggccctgcatcagctccacctcagcaacaattccatcgctcgcattcaccgcaagggctggagcttctgccagaagctgcatgagttggtcctgtccttcaacaacctgacacggctggacgaggagagcctggccgagctgagcagcctgagtgtcctgcgtctcagccacaattccatcagccacattgcggagggtgccttcaagggactcaggagcctgcgagtcttggatctggaccataacgagatttcgggcacaatagaggacacgagcggcgccttctcagggctcgacagcctcagcaagctgactctgtttggaaacaagatcaagtctgtggctaagagagcattctcggggctggaaggcctggagcacctgaaccttggagggaatgcgatcagatctgtccagtttgatgcctttgtgaagatgaagaatcttaaagagctccatatcagcagcgacagcttcctgtgtgactgccagctgaagtggctgcccccgtggctaattggcaggatgctgcaggcctttgtgacagccacctgtgcccacccagaatcactgaagggtcagagcattttctctgtgccaccagagagtttcgtgtgcgatgacttcctgaagccacagatcatcacccagccagaaaccaccatggctatggtgggcaaggacatccggtttacatgctcagcagccagcagcagcagctcccccatgacctttgcctggaagaaagacaatgaagtcctgaccaatgcagacatggagaactttgtccacgtccacgcgcaggacggggaagtgatggagtacaccaccatcctgcacctccgtcaggtcactttcgggcacgagggccgctaccaatgtgtcatcaccaaccactttggctccacctattcacataaggccaggctcaccgtgaatgtgttgccatcattcaccaaaacgccccacgacataaccatccggaccaccaccatggcccgcctcgaatgtgctgccacaggtcacccaaaccctcagattgcctggcagaaggatggaggcacggatttccccgctgcccgtgagcgacgcatgcatgtcatgccggatgacgacgtgtttttcatcactgatgtgaaaatagatgacgcaggggtttacagctgtactgctcagaactcagccggttctatttcagctaatgccaccctgactgtcctagagaccccatccttggtggtccccttggaagaccgtgtggtatctgtgggagaaacagtggccctccaatgcaaagccacggggaaccctccgccccgcatcacctggttcaagggggaccgcccgctgagcctcactgagcggcaccacttgacccctgacaaccagctcctggtggttcagaacgtggtggcagaggatgcgggccgatatacctgtgagatgtccaacaccctgggcacggagcgagctcacagccagctgagcgtcctgcccgcagcaggctgcaggaaggatgggaccacggtaggcatcttcaccattgctgtcgtgagcagcatcgtcctgacgtcactggtctgggtgtgcatcatctaccagaccaggaagaagagtgaagagtacagtgtcaccaacacagatgaaaccgtcgtgccaccagatgttccaagctacctctcttctcaggggaccctttctgaccgacaagaaaccgtggtcaggaccgagggtggccctcaggccaatgggcacattgagagcaatggtgtgtgtccaagagatgcaagccactttccagagcccgacactcacagcgttgcctgcaggcagccaaagctctgtgctgggtctgcgtatcacaaagagccgtggaaagcgatggagaaagctgaagggacacctgggccacataagatggaacacggtggccgggtcgtatgcagtgactgcaacaccgaagtggactgttactccaggggacaagccttccacccccagcctgtgtccagagacagcgcacagccaagtgcgccaaatggcccggagccgggtgggagtgaccaagagcattctccacatcaccagtgcagcaggactgccgctgggtcctgccccgagtgccaagggtcgctctaccccagtaaccacgatagaatgctgacggctgtgaagaaaaagccaatggcatctctagatgggaaaggggattcttcctggactttagcaaggttgtatcacccggactccacagagctacagcctgcatcttcattaacttcaggcagtccagagcgcgcggaagcccagtacttgcttgtttccaatggccacctccccaaagcatgtgacgccagtcccgagtccacgccactgacaggacagctccccgggaaacagagggtgccactgctgttggcaccaaaaagctaggttttgtctacctcagttcttgtcataccaatctctacgggaaagagaggtaggagaggctgcgaggaagcttgggttcaagcgtcactcatctgtacatagttgtaactcccatgtggagtatcagtcgctcacaggacttggatctgaagcacagtaaacgcaagaggggatttgtgtacaaaaggcaaaaaaagtatttgatatcattgtacataagagttttcagagatttcatatatatcttttacagaggctattttaatctttagtgcatggttaacagaaaaaaattatacaattttgacaatattatttttcgtatcaggttgctgtttaattttggagggggtggggaaatagttctggtgccttaacgcatggctggaatttatagaggctacaaccacatttgttcacaggagtttttggtgcggggtgggaaggatggaaggccttggatttatattgcacttcatagacccctaggctgctgtgcggtgggactccacatgcgccggaaggagcttcaggtgagcactgctcatgtgtggatgcccctgcaacaggcttccctgtctgtagagccaggggtgcaagtgccatccacacttgcagtgaatggcttttccttttaggtttaagtcctgtctgtctgtaaggcgtagaatctgtccgtctgtaaggcgtagaatgagggttgttaatccatcacaagcaaaaggtcagaacagttaaacactgcctttcctcctcctcttattttatgataaaagcaaatgtggccttctcagtatcattcgattgctatttgagacttttaaattaaggtaaaggctgctggtgttggtacctgtggatttttctatactgatgttttcgttttgccaatataatgagtattacattggccttgggggacagaaaggaggaagttctgacttttcagggctaccttatttctactaaggacccagagcaggcctgtccatgccattccttcgcacagatgaaactgagctgggactggaaaggacagcccttgacctgggttctgggtataatttgcacttttgagactggtagctaaccatcttatgagtgccaatgtgtcatttagtaaaacttaaatagaaacaaggtccttcaaatgttcctttggccaaaagctgaagggagttactgagaaaatagttaacaattactgtcaggtgtcatcactgttcaaaaggtaagcacatttagaattttgttcttgacagttaactgactaatcttacttccacaaaatatgtgaatttgctgcttctgagaggcaatgtgaaagagggagtattacttttatgtacaaagttatttatttatagaaattttggtacagtgtacattgaaaaccatgtaaaatattgaagtgtctaacaaatggcattgaagtgtctttaataaaggttcatttataaatgtcagtatagttggtggtccttcttttacaaacgcagtcattctgcctttaattatcttcccccaaaaaagaaaaaaaaaataggcgaagcaaaatcacatactgtttgtttgctccagggcagacaacactgctagattcctgacattttgttttgaatttttctacacctggagcttgttagtcaaggtctaaaatccctaagtgtggtgacctttccatttcatcctgccttttcaaagctggcccaggccctcctttcagtctgacatgagaatggcgagaatggctcacccaccgtgccctcctgcacgaagccagctgggcccacctagtcacttgagttgcagctgctttct

SEQ ID NO: 356613 - DNA, 2789 bp, Homo sapiens
  misc_feature (473)..(473): n is a, c, g, or t
  misc_feature (2759)..(2759): n is a, c, g, or t
  misc_feature (2775)..(2775): n is a, c, g, or t
  misc_feature (2780)..(2780): n is a, c, g, or t
  misc_feature (2783)..(2783): n is a, c, g, or t
ggcgggactcttgctgcgcggaggagccgtgcggaacccgaggctgcgcgcgcgcgcgcgctctctggccgcggcgtggggacagcgaggcgcactggggcctcccagcgcggggccggccgcgccgtccagcccgaggtctacggctttgcgctccgagcccagaggaagatgcctgccggcaccgagctcgggctgcggggctgaacgcctgtcttccaggcgcagcggcagcactgccctcggccggtgtcggtagcggcactcggcgtgccccgggcggacgaagagcgcaggctgggtacaccttgcccgaatcggcggagttcgcagctagcgagggcgggccggccggcccggatgggcgcggggtttgcggcccccgccgggtgctccggagcggcccgggcaccgggggcacgctgagtgccggagccgcggccgcagagagaacttggggcgggggccatgcnccggtgcggagtctagagccgagcggagcgccccgcgggcccgcccgcgtctgcggccgttcgggtcctcacagtccccgcgcccggagttcgcagcgcgctccagacaagatggcgcggccggtccggggagggctcggggccccgcgccgctcgccttgccttctccttctctggctgcttttgcttcggctggagccggtgaccgccgcggccggcccgcgggcgccctgcgcggccgcctgcacttgcgctggggactcgctggactgcggtgggcgcgggctggctgcgttgcccggggacctgccctcctggacgcggagcctaaacctgagttacaacaaactctctgagattgaccctgctggttttgaggacttgccgaacctacaggaagtgtacctcaataataatgagttgacagcggtaccatccctgggcgctgcttcatcacatgtcgtctctctctttctgcagcacaacaagattcgcagcgtggaggggagccagctgaaggcctacctttccttagaagtgttagatctgagtttgaacaacatcacggaagtgcggaacacctgctttccacacggaccgcctataaaggagctcaacctggcaggcaatcggattggcaccctggagttgggagcatttgatggtctgtcacggtcgctgctaactcttcgcctgagcaaaaacaggatcacccagcttcctgtaagagcattcaagctacccaggctgacacaactggacctcaatcggaacaggattcggctgatagagggcctcaccttccaggggctcaacagcttggaggtgctgaagcttcagcgaaacaacatcagcaaactgacagatggggccttctggggactgtccaagatgcatgtgctgcacctggagtacaacagcctggtagaagtgaacagcggctcgctctacggcctcacggccctgcatcagctccacctcagcaacaattccatcgctcgcattcaccgcaagggctggagcttctgccagaagctgcatgagttggtcctgtccttcaacaacctgacacggctggacgaggagagcctggccgagctgagcagcctgagtgtcctgcgtctcagccacaattccatcagccacattgcggagggtgccttcaagggactcaggagcctgcgagtcttggatctggaccataacgagatttcgggcacaatagaggacacgagcggcgccttctcagggctcgacagcctcagcaagctgactctgtttggaaacaagatcaagtctgtggctaagagagcattctcggggctggaaggcctggagcacctgaaccttggagggaatgcgatcagatctgtccagtttgatgcctttgtgaagatgaagaatcttaaagagctccatatcagcagcgacagcttcctgtgtgactgccagctgaagtggctgcccccgtggctaattggcaggatgctgcaggcctttgtgacagccacctgtgcccacccagaatcactgaagggtcagagcattttctctgtgccaccagagagtttcgtgtgcgatgacttcctgaagccacagatcatcacccagccagaaaccaccatggctatggtgggcaaggacatccggtttacatgctcagcagccagcagcagcagctcccccatgacctttgcctggaagaaagacaatgaagtcctgaccaatgcagacatggagaactttgtccacgtccacgcgcaggacggggaagtgatggagtacaccaccatcctgcacctccgtcaggtcactttcgggcacgagggccgctaccaatgtgtcatcaccaaccactttggctccacctattcacataaggccaggctcaccgtgaatgtgttgccatcattcaccaaaacgccccacgacataaccatccggaccaccaccatggcccgcctcgaatgtgctgccacaggtcacccaaaccctcagattgcctggcagaaggatggaggcacggatttccccgctgcccgtgagcgacgcatgcatgtcatgccggatgacgacgtgtttttcatcactgatgtgaaaatagatgacgcaggggtttacagctgtactgctcagaactcagccggttctatttcagctaatgccaccctgactgtcctagagaccccatccttggtggtccccttggaagaccgtgtggtatctgtgggagaaacagtggccctccaatgcaaagccacggggaaccctccgccccgctccccncaatgaaataaagttnttttntcnttccca

SEQ ID NO: 356614 - DNA, 2620 bp, Homo sapiens
  misc_feature (473)..(473): n is a, c, g, or t
ggcgggactcttgctgcgcggaggagccgtgcggaacccgaggctgcgcgcgcgcgcgcgctctctggccgcggcgtggggacagcgaggcgcactggggcctcccagcgcggggccggccgcgccgtccagcccgaggtctacggctttgcgctccgagcccagaggaagatgcctgccggcaccgagctcgggctgcggggctgaacgcctgtcttccaggcgcagcggcagcactgccctcggccggtgtcggtagcggcactcggcgtgccccgggcggacgaagagcgcaggctgggtacaccttgcccgaatcggcggagttcgcagctagcgagggcgggccggccggcccggatgggcgcggggtttgcggcccccgccgggtgctccggagcggcccgggcaccgggggcacgctgagtgccggagccgcggccgcagagagaacttggggcgggggccatgcnccggtgcggagtctagagccgagcggagcgccccgcgggcccgcccgcgtctgcggccgttcgggtcctcacagtccccgcgcccggagttcgcagcgcgctccagacaagatggcgcggccggtccggggagggctcggggccccgcgccgctcgccttgccttctccttctctggctgcttttgcttcggctggagccggtgaccgccgcggccggcccgcgggcgccctgcgcggccgcctgcacttgcgctggggactcgctggactgcggtgggcgcgggctggctgcgttgcccggggacctgccctcctggacgcggagcctaaacctgagttacaacaaactctctgagattgaccctgctggttttgaggacttgccgaacctacaggaagtgtacctcaataataatgagttgacagcggtaccatccctgggcgctgcttcatcacatgtcgtctctctctttctgcagcacaacaagattcgcagcgtggaggggagccagctgaaggcctacctttccttagaagtgttagatctgagtttgaacaacatcacggaagtgcggaacacctgctttccacacggaccgcctataaaggagctcaacctggcaggcaatcggattggcaccctggagttgggagcatttgatggtctgtcacggtcgctgctaactcttcgcctgagcaaaaacaggatcacccagcttcctgtaagagcattcaagctacccaggctgacacaactggacctcaatcggaacaggattcggctgatagagggcctcaccttccaggggctcaacagcttggaggtgctgaagcttcagcgaaacaacatcagcaaactgacagatggggccttctggggactgtccaagatgcatgtgctgcacctggagtacaacagcctggtagaagtgaacagcggctcgctctacggcctcacggccctgcatcagctccacctcagcaacaattccatcgctcgcattcaccgcaagggctggagcttctgccagaagctgcatgagttggtcctgtccttcaacaacctgacacggctggacgaggagagcctggccgagctgagcagcctgagtgtcctgcgtctcagccacaattccatcagccacattgcggagggtgccttcaagggactcaggagcctgcgagtcttggatctggaccataacgagatttcgggcacaatagaggacacgagcggcgccttctcagggctcgacagcctcagcaagctgactctgtttggaaacaagatcaagtctgtggctaagagagcattctcggggctggaaggcctggagcacctgaaccttggagggaatgcgatcagatctgtccagtttgatgcctttgtgaagatgaagaatcttaaagagctccatatcagcagcgacagcttcctgtgtgactgccagctgaagtggctgcccccgtggctaattggcaggatgctgcaggcctttgtgacagccacctgtgcccacccagaatcactgaagggtcagagcattttctctgtgccaccagagagtttcgtgtgcgatgacttcctgaagccacagatcatcacccagccagaaaccaccatggctatggtgggcaaggacatccggtttacatgctcagcagccagcagcagcagctcccccatgacctttgcctggaagaaagacaatgaagtcctgaccaatgcagacatggagaactttgtccacgtccacgcgcaggacggggaagtgatggagtacaccaccatcctgcacctccgtcaggtcactttcgggcacgagggccgctaccaatgtgtcatcaccaaccactttggctccacctattcacataaggccaggctcaccgtgaatgtgttgccatcattcaccaaaacgccccacgacataaccatccggaccaccaccatggcccgcctcgaatgtgctgccacaggtcacccaaaccctcagattgcctggcagaaggatggaggcacggatttccccgctgcccgtgagcgacgcatgcatgtcatgccggatgacgacgtgtttttcatcactgatgtgaaaatagatgacgcaggtgggtactactgggttaattgcaggtggtactt

SEQ ID NO: 356615 - DNA, 2738 bp, Homo sapiens
agcgggtctcctcggccgacaagctctcgcgagacgagccgtgcaggctgaaaaaatggcgccacccagtacccgggagcccagggtcctgtcggcgaccagcgcaaccaaatccgacggagagatggtgctgccaggcttcccggacgccgacagctttgtgaagtttgctcttgggtccgtggtggcagtcaccaaggcatctgggggcctaccacagtttggcgatgagtatgatttttaccgaagttttcctggcttccaagcattttgcgaaacacagggagacaggttgcttcagtgcatgagcagagtaatgcagtaccatgggtgtcgcagcaacattaaggatcgaagtaaagtgactgagctggaagacaagtttgatttactagttgatgccaatgatgtaattctggagagagtgggtattttactggatgaagcctcaggtgtaaacaagaatcaacagcctgtcctccctgccggcttgcaggtccccaaaacggtagtgtccagctggaaccgtaaggcagcagaatatggcaaaaaagcaaaatctgaaactttccggctgcttcatgcaaaaaatatcatccgacctcagctcaagtttcgagagaagattgacaattccaacacaccatttcttcctaaaatcttcatcaaacccaatgctcagaaacctctccctcaagctctctctaaggaaaggcgggaacgcccacaggatcgtcctgaggacttggacgtcccccctgcactggctgatttcatccatcagcagagaacccagcaggttgagcaagacatgtttgcacatccttatcaatatgaactaaatcactttaccccagcagatgcagtgcttcaaaagccacaaccccagttatacagacctatagaagagacaccatgccatttcatatcctccctggatgaactcgtggaactcaacgaaaagctcttgaattgtcaggaatttgcagttgacttggagcaccactcttacaggagcttcctgggactgacctgcctgatgcaaatttctactcggacggaagacttcatcattgacaccctcgagcttcgaagtgacatgtacattctcaatgagagcctcacagacccagccatcgttaaggtctttcatggtgctgattcagacatagaatggctacagaaagactttgggttgtatgtagtaaacatgtttgatactcatcaggcagcacgccttcttaacctgggcaggcactcactcgatcatctcctgaaactctactgcaacgtggactcaaacaagcaatatcagctggctgattggagaatacgccctctgcccgaggagatgctcagctacgcccgggatgacacccattacctgctatatatctatgacaaaatgaggctggagatgtgggagcgcggcaacgggcagcccgtgcagctgcaggtggtgtggcaacggagcagggacatctgcctcaagaaattcatcaaacctatcttcacggatgagtcctaccttgaactctataggaagcagaagaagcaccttaacacacagcagttgacagcctttcagctgctgtttgcctggagggataaaacagctcgcagggaagatgaaagttacggatatgtactgccaaaccacatgatgctgaaaatagctgaagaactgcctaaggaacctcagggcatcatagcttgctgcaacccagtaccgccccttgtgcggcagcagatcaacgaaatgcaccttttaatccagcaggcccgagagatgcccctgctcaagtctgaagttgcagccggagtgaagaagagcggaccgctgcccagtgctgagagattggagaatgttctctttggacctcacgactgctcccatgcccctccggatggctatccaatcatcccaaccagtggatctgtgccagttcagaagcaggcgagcctcttccctgatgaaaaagaagataacttgctgggtaccacatgcctgattgccacagctgtcatcacgttatttaatgaacctagtgctgaagacagtaaaaagggtccattgacagttgcacagaaaaaagcccagaacatcatggagtcctttgaaaatccatttaggatgatcagcaaccgttggaagctggcccaggtacaagtacaaaaagactctaaagaagctgtcaagaagaaggcagctgagcaaacagctgcccgggaacaggcaaaggaggcgtgcaaagctgcagcagaacaggccatctccgtccgacagcaggtcgtgctagaaaatgctgcaaagaagagagagcgagcaacaagcgacccaaggaccacagaacagaaacaagagaagaaacgactcaaaatttccaagaagccaaaggacccagagccaccagaaaaagagtttacgccttacgactacagccagtcagacttcaaggcttttgctggaaacagcaaatccaaagtttcttctcagtttgatccaaataaacagaccccgtctggcaagaaatgcattgcagccaaaaaaattaaacagtcggtgggaaacaaaagcatgtcctttccaactggaaagtcagacagaggcttcaggtacaactggccacagagatagtcctggaagacacgtggcgcctgtggaccggaagcaccaaatgctggtgctgcttttgtacatacatatttttaaaccattaaaattcttcctgaagaaa

SEQ ID NO: 356616 - DNA, 1145 bp, Homo sapiens
acactgaacaactgcacgtcctgtgtgttatgcccagtgtcacctccatgtgttgtaacgccataggtccgtggggtgtcataaagaaacacagcagacttgcggaagcccagccttgagtctgcttctgtcatttactgaccatgccccttggacaagttatttagtctcccggagtctgtttgctcatctctaaagagagggtgatgacagtacctttttcccagggttacagagggattgaatgagatgatggatggcccagtgcctggaggacagtagcactttgtccttaatagggattttagcaataaagccagcatgaaatttatttttcatgcccttagatttgaaaatttatgacttagaatgtgtgtacttcttaggttaacctgcccttcgtcacctcatgaaaagtaagacagacttaggtggctgactttggagggttttttttgttatatttgctttcattatatcagcaaccgttggaagctggcccaggtacaagtacaaaaagactctaaagaagctgtcaagaagaaggcagctgagcaaacaggtaacactcacttccttgcaactcagtcggctgttaaagaatggctgttgcacacccgctgtttcagccaagtgccagatacggcgatgaatgaagcccctgtggggcttcccttctgctgagggatggtgggcaatcagtatctatcctggcagatggcagcaggtgctgtgcagagagattggtggggagtgctggaggtgctgtagctgtctcggtggttggagaaggcagtctaatgaatgcgacattgacgagacctgcagtgacctagagaagagttctggagccacagcacagcgagcccagaggccctggggctagttcactgggcatgctgagcagcagcaagtgggcctgcatgagcagaggcgggtagagaagagcaggagatggggaaggagccagcagaggcccacgggatgacgctgccttttactctgagttcagaagccaggagggtgctgagcagacaggggggaagtgactgacatgtggcactctggctgctgtgtcaacagtagactatagaggacaggatgggagtccaggaagggataggagacatggcagtggctcaggc

SEQ ID NO: 356617 - DNA, 360 bp, Homo sapiens
agccgaccctgaggtcaggggacttgcccgagggcaggaaaaacaggtctgccttctcaagatgctgctcagctcagccaactctggtgggccgccgagttctctggggcccctgagcaaaccattcttcctctgttctgcatgattaagatttgcaccattttgtaaaccatctgagaacatccaaccagcccggaagaaataactgttgtttttgtactctctgcagaggcttcaggtacaactggccacagagatagtcctggaagacacgtggcgcctgtggaccggaagcaccaaatgctggtgctgcttttgtacatacatatttttaaaccattaaaattcttcctgaagaaa

SEQ ID NO: 356618 - DNA, 500 bp, Homo sapiens
acactgaacaactgcacgtcctgtgtgttatgcccagtgtcacctccatgtgttgtaacgccataggtccgtggggtgtcataaagaaacacagcagacttgcggaagcccagccttgagtctgcttctgtcatttactgaccatgccccttggacaagttatttagtctcccggagtctgtttgctcatctctaaagagagggtgatgacagtacctttttcccagggttacagagggattgaatgagatgatggatggcccagtgcctggaggacagtagcactttgtccttaatagggattttagcaataaagccagcatgaaatttatttttcatgcccttagatttgaaaatttatgacttagaatgtgtgtacttcttaggttaacctgcccttcgtcacctcatgaaaagtaagacagacttaggtggctgactttggagggttttttttgttatatttgctttcattatcgcgtcagtgtgggggatcctct

SEQ ID NO: 356619 - DNA, 216 bp, Homo sapiens
gcggccgcctactactactactgctcgaattcaagcttctaacgatgtacggggacatgtcctttccaactggaaagtcagacagaggcttcaggtacaactggccacagagatagtcctggaagacacgtggcgcctgtggaccggaagcaccaaatgctggtgctgcttttgtacatacatatttttaaaccattaaaattcttcctgaagaaa

SEQ ID NO: 356620 - DNA, 3229 bp, Homo sapiens
agcgggtctcctcggccgacaagctctcgcgagacgagccgtgcaggctgaaaaaatggcgccacccagtacccgggagcccagggtcctgtcggcgaccagcgcaaccaaatccgacggagagatggtgctgccaggcttcccggacgccgacagctttgtgaagtttgctcttgggtccgtggtggcagtcaccaaggcatctgggggcctaccacagtttggcgatgagtatgatttttaccgaagttttcctggcttccaagcattttgcgaaacacagggagacaggttgcttcagtgcatgagcagagtaatgcagtaccatgggtgtcgcagcaacattaaggatcgaagtaaagtgactgagctggaagacaagtttgatttactagttgatgccaatgatgtaattctggagagagtgggtattttactggatgaagcctcaggtgtaaacaagaatcaacagcctgtcctccctgccggcttgcaggtccccaaaacggtagtgtccagctggaaccgtaaggcagcagaatatggcaaaaaagcaaaatctgaaactttccggctgcttcatgcaaaaaatatcatccgacctcagctcaagtttcgagagaagattgacaattccaacacaccatttcttcctaaaatcttcatcaaacccaatgctcagaaacctctccctcaagctctctctaaggaaaggcgggaacgcccacaggatcgtcctgaggacttggacgtcccccctgcactggctgatttcatccatcagcagagaacccagcaggttgagcaagacatgtttgcacatccttatcaatatgaactaaatcactttaccccagcagatgcagtgcttcaaaagccacaaccccagttatacagacctatagaagagacaccatgccatttcatatcctccctggatgaactcgtggaactcaacgaaaagctcttgaattgtcaggaatttgcagttgacttggagcaccactcttacaggagcttcctgggactgacctgcctgatgcaaatttctactcggacggaagacttcatcattgacaccctcgagcttcgaagtgacatgtacattctcaatgagagcctcacagacccagccatcgttaaggtctttcatggtgctgattcagacatagaatggctacagaaagactttgggttgtatgtagtaaacatgtttgatactcatcaggcagcacgccttcttaacctgggcaggcactcactcgatcatctcctgaaactctactgcaacgtggactcaaacaagcaatatcagctggctgattggagaatacgccctctgcccgaggagatgctcagctacgcccgggatgacacccattacctgctatatatctatgacaaaatgaggctggagatgtgggagcgcggcaacgggcagcccgtgcagctgcaggtggtgtggcaacggagcagggacatctgcctcaagaaattcatcaaacctatcttcacggatgagtcctaccttgaactctataggaagcagaagaagcaccttaacacacagcagttgacagcctttcagctgctgtttgcctggagggataaaacagctcgcagggaagatgaaagttacggatatgtactgccaaaccacatgatgctgaaaatagctgaagaactgcctaaggaacctcagggcatcatagcttgctgcaacccagtaccgccccttgtgcggcagcagatcaacgaaatgcaccttttaatccagcaggcccgagagatgcccctgctcaagtctgaagttgcagccggagtgaagaagagcggaccgctgcccagtgctgagagattggagaatgttctctttggacctcacgactgctcccatgcccctccggatggctatccaatcatcccaaccagtggtaaagtcgagagccctcctgactgtcccgaagaggttgggacacagctaccttgtctaaaattctgtaggcttggccgggcgtggtggcttatgcctgtaatgccagcatattggaaggctgaggcgggtagatcacctgaggtcaggagtttgagaccagcctggccaacatggtgaaaccccatctctactaaaaatacaaaaattagctggcatggtggtgggcacctgtaatcttagctacttaggaggcagaggcaggagaatcacttgaaccgaggaggcggaggttgcagtgagccgagattgtgccattgtactccagcctaggggactacactaaaactccatctcaaaaagaaaaaataaacaaaattctgtaggctttgaccttactatcttctgctcctctaggatctgtgccagttcagaagcaggcgagcctcttccctgatgaaaaagaagataacttgctgggtaccacatgcctgattgccacagctgtcatcacgttatttaatgaacctagtgctgaagacagtaaaaagggtccattgacagttgcacagaaaaaagcccagaacatcatggagtcctttgaaaatccatttaggatgtttctgccctcactgggacaccgtgctcccgtctctcaggcagcgaagttcgatccatcaaccaaaatctatgaaatcagcaaccgttggaagctggcccaggtacaagtacaaaaagactctaaagaagctgtcaagaagaaggcagctgagcaaacagctgcccgggaacaggcaaaggaggcgtgcaaagctgcagcagaacaggccatctccgtccgacagcaggtcgtgctagaaaatgctgcaaagaagagagagcgagcaacaagcgacccaaggaccacagaacagaaacaagagaagaaacgactcaaaatttccaagaagccaaaggacccagagccaccagaaaaagagtttacgccttacgactacagccagtcagacttcaaggcttttgctggaaacagcaaatccaaagtttcttctcagtttgatccaaataaacagaccccgtctggcaagaaatgcattgcagccaaaaaaattaaacagtcggtgggaaacaaaagcatgtcctttccaactggaaagtcagacagaggcttcaggtacaactggccacagagatagtcctggaagacacgtggcgcctgtggaccggaagcaccaaatgctggtgctgcttttgtacatacatatttttaaaccattaaaattcttcctgaagaaa

SEQ ID NO: 356621 - DNA, 3013 bp, Homo sapiens
agcgggtctcctcggccgacaagctctcgcgagacgagccgtgcaggctgaaaaaatggcgccacccagtacccgggagcccagggtcctgtcggcgaccagcgcaaccaaatccgacggagagatggtgctgccaggcttcccggacgccgacagctttgtgaagtttgctcttgggtccgtggtggcagtcaccaaggcatctgggggcctaccacagtttggcgatgagtatgatttttaccgaagttttcctggcttccaagcattttgcgaaacacagggagacaggttgcttcagtgcatgagcagagtaatgcagtaccatgggtgtcgcagcaacattaaggatcgaagtaaagtgactgagctggaagacaagtttgatttactagttgatgccaatgatgtaattctggagagagtgggtattttactggatgaagcctcaggtgtaaacaagaatcaacagcctgtcctccctgccggcttgcaggtccccaaaacggtagtgtccagctggaaccgtaaggcagcagaatatggcaaaaaagcaaaatctgaaactttccggctgcttcatgcaaaaaatatcatccgacctcagctcaagtttcgagagaagattgacaattccaacacaccatttcttcctaaaatcttcatcaaacccaatgctcagaaacctctccctcaagctctctctaaggaaaggcgggaacgcccacaggatcgtcctgaggacttggacgtcccccctgcactggctgatttcatccatcagcagagaacccagcaggttgagcaagacatgtttgcacatccttatcaatatgaactaaatcactttaccccagcagatgcagtgcttcaaaagccacaaccccagttatacagacctatagaagagacaccatgccatttcatatcctccctggatgaactcgtggaactcaacgaaaagctcttgaattgtcaggaatttgcagttgacttggagcaccactcttacaggagcttcctgggactgacctgcctgatgcaaatttctactcggacggaagacttcatcattgacaccctcgagcttcgaagtgacatgtacattctcaatgagagcctcacagacccagccatcgttaaggtctttcatggtgctgattcagacatagaatggctacagaaagactttgggttgtatgtagtaaacatgtttgatactcatcaggcagcacgccttcttaacctgggcaggcactcactcgatcatctcctgaaactctactgcaacgtggactcaaacaagcaatatcagctggctgattggagaatacgccctctgcccgaggagatgctcagctacgcccgggatgacacccattacctgctatatatctatgacaaaatgaggctggagatgtgggagcgcggcaacgggcagcccgtgcagctgcaggtggtgtggcaacggagcagggacatctgcctcaagaaattcatcaaacctatcttcacggatgagtcctaccttgaactctataggaagcagaagaagcaccttaacacacagcagttgacagcctttcagctgctgtttgcctggagggataaaacagctcgcagggaagatgaaagttacgggtaagggattagaggttcttttaatacttgtttccagactgaggagatctaataacaagtaaataatgggcttttttcttttgctatgaaagctggttatttcccctatgtgacagcatctaatggaacttactggctgaatgtaatgtgtccccactgtgtgtgtgtgtgtgtgtgtgtgtgtgtgtgtttttttccagatatgtactgccaaaccacatgatgctgaaaatagctgaagaactgcctaaggaacctcagggcatcatagcttgctgcaacccagtaccgccccttgtgcggcagcagatcaacgaaatgcaccttttaatccagcaggcccgagagatgcccctgctcaagtctgaagttgcagccggagtgaagaagagcggaccgctgcccagtgctgagagattggagaatgttctctttggacctcacgactgctcccatgcccctccggatggctatccaatcatcccaaccagtggatctgtgccagttcagaagcaggcgagcctcttccctgatgaaaaagaagataacttgctgggtaccacatgcctgattgccacagctgtcatcacgttatttaatgaacctagtgctgaagacagtaaaaagggtccattgacagttgcacagaaaaaagcccagaacatcatggagtcctttgaaaatccatttaggatgtttctgccctcactgggacaccgtgctcccgtctctcaggcagcgaagttcgatccatcaaccaaaatctatgaaatcagcaaccgttggaagctggcccaggtacaagtacaaaaagactctaaagaagctgtcaagaagaaggcagctgagcaaacagctgcccgggaacaggcaaaggaggcgtgcaaagctgcagcagaacaggccatctccgtccgacagcaggtcgtgctagaaaatgctgcaaagaagagagagcgagcaacaagcgacccaaggaccacagaacagaaacaagagaagaaacgactcaaaatttccaagaagccaaaggacccagagccaccagaaaaagagtttacgccttacgactacagccagtcagacttcaaggcttttgctggaaacagcaaatccaaagtttcttctcagtttgatccaaataaacagaccccgtctggcaagaaatgcattgcagccaaaaaaattaaacagtcggtgggaaacaaaagcatgtcctttccaactggaaagtcagacagaggcttcaggtacaactggccacagagatagtcctggaagacacgtggcgcctgtggaccggaagcaccaaatgctggtgctgcttttgtacatacatatttttaaaccattaaaattcttcctgaagaaa

SEQ ID NO: 356622 - DNA, 2889 bp, Homo sapiens
  misc_feature (2824)..(2824): n is a, c, g, or t
  misc_feature (2850)..(2850): n is a, c, g, or t
  misc_feature (2853)..(2853): n is a, c, g, or t
agcgggtctcctcggccgacaagctctcgcgagacgagccgtgcaggctgaaaaaatggcgccacccagtacccgggagcccagggtcctgtcggcgaccagcgcaaccaaatccgacggagagatggtgctgccaggcttcccggacgccgacagctttgtgaagtttgctcttgggtccgtggtggcagtcaccaaggcatctgggggcctaccacagtttggcgatgagtatgatttttaccgaagttttcctggcttccaagcattttgcgaaacacagggagacaggttgcttcagtgcatgagcagagtaatgcagtaccatgggtgtcgcagcaacattaaggatcgaagtaaagtgactgagctggaagacaagtttgatttactagttgatgccaatgatgtaattctggagagagtgggtattttactggatgaagcctcaggtgtaaacaagaatcaacagcctgtcctccctgccggcttgcaggtccccaaaacggtagtgtccagctggaaccgtaaggcagcagaatatggcaaaaaagcaaaatctgaaactttccggctgcttcatgcaaaaaatatcatccgacctcagctcaagtttcgagagaagattgacaattccaacacaccatttcttcctaaaatcttcatcaaacccaatgctcagaaacctctccctcaagctctctctaaggaaaggcgggaacgcccacaggatcgtcctgaggacttggacgtcccccctgcactggctgatttcatccatcagcagagaacccagcaggttgagcaagacatgtttgcacatccttatcaatatgaactaaatcactttaccccagcagatgcagtgcttcaaaagccacaaccccagttatacagacctatagaagagacaccatgccatttcatatcctccctggatgaactcgtggaactcaacgaaaagctcttgaattgtcaggaatttgcagttgacttggagcaccactcttacaggagcttcctgggactgacctgcctgatgcaaatttctactcggacggaagacttcatcattgacaccctcgagcttcgaagtgacatgtacattctcaatgagagcctcacagacccagccatcgttaaggtctttcatggtgctgattcagacatagaatggctacagaaagactttgggttgtatgtagtaaacatgtttgatactcatcaggcagcacgccttcttaacctgggcaggcactcactcgatcatctcctgaaactctactgcaacgtggactcaaacaagcaatatcagctggctgattggagaatacgccctctgcccgaggagatgctcagctacgcccgggatgacacccattacctgctatatatctatgacaaaatgaggctggagatgtgggagcgcggcaacgggcagcccgtgcagctgcaggtggtgtggcaacggagcagggacatctgcctcaagaaattcatcaaacctatcttcacggatgagtcctaccttgaactctataggaagcagaagaagcaccttaacacacagcagttgacagcctttcagctgctgtttgcctggagggataaaacagctcgcagggaagatgaaagttacggatatgtactgccaaaccacatgatgctgaaaatagctgaagaactgcctaaggaacctcagggcatcatagcttgctgcaacccagtaccgccccttgtgcggcagcagatcaacgaaatgcaccttttaatccagcaggcccgagagatgcccctgctcaagtctgaagttgcagccggagtgaagaagagcggaccgctgcccagtgctgagagattggagaatgttctctttggacctcacgactgctcccatgcccctccggatggctatccaatcatcccaaccagtggatctgtgccagttcagaagcaggcgagcctcttccctgatgaaaaagaagataacttgctgggtaccacatgcctgattgccacagctgtcatcacgttatttaatgaacctagtgctgaagacagtaaaaagggtccattgacagttgcacagaaaaaagcccagaacatcatggagtcctttgaaaatccatttaggatgtttctgccctcactgggacaccgtgctcccgtctctcaggcagcgaagttcgatccatcaaccaaaatctatgaaatcagcaaccgttggaagctggcccaggtacaagtacaaaaagactctaaagaagctgtcaagaagaaggcagctgagcaaacagctgcccgggaacaggcaaaggaggcgtgcaaagctgcagcagaacaggccatctccgtccgacagcaggtcgtgctagaaaatgctgcaaagaagagagagcgagcaacaagcgacccaaggaccacagaacagaaacaagagaagaaacgactcaaaatttccaagaagccaaaggacccagagccaccagaaaaagagtttacgccttacgactacagccagtcagacttcaaggcttttgctggaaacagcaaatccaaagtttcttctcagtttgatccaaataaacagaccccgtctggcaagaaatgcattgcagccaaaaaaattaaacagtcggtgggaaacaaaagcatgtcctttccaactggaaagtcagacagaggcttcaggtacaactggccacagagatagtcctggaagacacgtggcgcctgtggaccggaagcaccaaatgctggtgctgcttttgtacatacatatttttaaaccattaaaattcttcctgaagaaaaaaaaaaaaanaaaaaaaaaaaaaaaaaaaaaaaaanaanaaacaaaaaaaaaaaaaaaaaaaagaaaaaaaaaaa

SEQ ID NO: 356623 - DNA, 2728 bp, Homo sapiens
agcgggtctcctcggccgacaagctctcgcgagacgagccgtgcaggctgaaaaaatggcgccacccagtacccgggagcccagggtcctgtcggcgaccagcgcaaccaaatccgacggagagatggtgctgccaggcttcccggacgccgacagctttgtgaagtttgctcttgggtccgtggtggcagtcaccaaggcatctgggggcctaccacagtttggcgatgagtatgatttttaccgaagttttcctggcttccaagcattttgcgaaacacagggagacaggttgcttcagtgcatgagcagagtaatgcagtaccatgggtgtcgcagcaacattaaggatcgaagtaaagtgactgagctggaagacaagtttgatttactagttgatgccaatgatgtaattctggagagagtgggtattttactggatgaagcctcaggtgtaaacaagaatcaacagcctgtcctccctgccggcttgcaggtccccaaaacggtagtgtccagctggaaccgtaaggcagcagaatatggcaaaaaagcaaaatctgaaactttccggctgcttcatgcaaaaaatatcatccgacctcagctcaagtttcgagagaagattgacaattccaacacaccatttcttcctaaaatcttcatcaaacccaatgctcagaaacctctccctcaagctctctctaaggaaaggcgggaacgcccacaggatcgtcctgaggacttggacgtcccccctgcactggctgatttcatccatcagcagagaacccagcaggttgagcaagacatgtttgcacatccttatcaatatgaactaaatcactttaccccagcagatgcagtgcttcaaaagccacaaccccagttatacagacctatagaagagacaccatgccatttcatatcctccctggatgaactcgtggaactcaacgaaaagctcttgaattgtcaggaatttgcagttgacttggagcaccactcttacaggagcttcctgggactgacctgcctgatgcaaatttctactcggacggaagacttcatcattgacaccctcgagcttcgaagtgacatgtacattctcaatgagagcctcacagacccagccatcgttaaggtctttcatggtgctgattcagacatagaatggctacagaaagactttgggttgtatgtagtaaacatgtttgatactcatcaggcagcacgccttcttaacctgggcaggcactcactcgatcatctcctgaaactctactgcaacgtggactcaaacaagcaatatcagctggctgattggagaatacgccctctgcccgaggagatgctcagctacgcccgggatgacacccattacctgctatatatctatgacaaaatgaggctggagatgtgggagcgcggcaacgggcagcccgtgcagctgcaggtggtgtggcaacggagcagggacatctgcctcaagaaattcatcaaacctatcttcacggatgagtcctaccttgaactctataggaagcagaagaagcaccttaacacacagcagttgacagcctttcagctgctgtttgcctggagggataaaacagctcgcagggaagatgaaagttacggatatgtactgccaaaccacatgatgctgaaaatagctgaagaactgcctaaggaacctcagggcatcatagcttgctgcaacccagtaccgccccttgtgcggcagcagatcaacgaaatgcaccttttaatccagcaggcccgagagatgcccctgctcaagtctgaagttgcagccggagtgaagaagagcggaccgctgcccagtgctgagagattggagaatgttctctttggacctcacgactgctcccatgcccctccggatggctatccaatcatcccaaccagtggatctgtgccagttcagaagcaggcgagcctcttccctgatgaaaaagaagataacttgctgggtaccacatgcctgattgccacagctgtcatcacgttatttaatgaacctagtgctgaagacagtaaaaagggtccattgacagttgcacagaaaaaagcccagaacatcatggagtcctttgaaaatccatttaggatgtttctgccctcactgggacaccgtgctcccgtctctcaggcagcgaagttcgatccatcaaccaaaatctatgaactgcccgggaacaggcaaaggaggcgtgcaaagctgcagcagaacaggccatctccgtccgacagcaggtcgtgctagaaaatgctgcaaagaagagagagcgagcaacaagcgacccaaggaccacagaacagaaacaagagaagaaacgactcaaaatttccaagaagccaaaggacccagagccaccagaaaaagagtttacgccttacgactacagccagtcagacttcaaggcttttgctggaaacagcaaatccaaagtttcttctcagtttgatccaaataaacagaccccgtctggcaagaaatgcattgcagccaaaaaaattaaacagtcggtgggaaacaaaagcatgtcctttccaactggaaagtcagacagaggcttcaggtacaactggccacagagatagtcctggaagacacgtggcgcctgtggaccggaagcaccaaatgctggtgctgcttttgtacatacatatttttaaaccattaaaattcttcctgaagaaa

SEQ ID NO: 356624 - DNA, 2481 bp, Homo sapiens
agcgggtctcctcggccgacaagctctcgcgagacgagccgtgcaggctgaaaaaatggcgccacccagtacccgggagcccagggtcctgtcggcgaccagcgcaaccaaatccgacggagagatggtgctgccaggcttcccggacgccgacagctttgtgaagtttgctcttgggtccgtggtggcagtcaccaaggcatctgggggcctaccacagtttggcgatgagtatgatttttaccgaagttttcctggcttccaagcattttgcgaaacacagggagacaggttgcttcagtgcatgagcagagtaatgcagtaccatgggtgtcgcagcaacattaaggatcgaagtaaagtgactgagctggaagacaagtttgatttactagttgatgccaatgatgtaattctggagagagtgggtattttactggatgaagcctcaggtgtaaacaagaatcaacagcctgtcctccctgccggcttgcaggtccccaaaacggtagtgtccagctggaaccgtaaggcagcagaatatggcaaaaaagcaaaatctgaaactttccggctgcttcatgcaaaaaatatcatccgacctcagctcaagtttcgagagaagattgacaattccaacacaccatttcttcctaaaatcttcatcaaacccaatgctcagaaacctctccctcaagctctctctaaggaaaggcgggaacgcccacaggatcgtcctgaggacttggacgtcccccctgcactggctgatttcatccatcagcagagaacccagcaggttgagcaagacatgtttgcacatccttatcaatatgaactaaatcactttaccccagcagatgcagtgcttcaaaagccacaaccccagttatacagacctatagaagagacaccatgccatttcatatcctccctggatgaactcgtggaactcaacgaaaagctcttgaattgtcaggaatttgcagttgacttggagcaccactcttacaggagcttcctgggactgacctgcctgatgcaaatttctactcggacggaagacttcatcattgacaccctcgagcttcgaagtgacatgtacattctcaatgagagcctcacagacccagccatcgttaaggtctttcatggtgctgattcagacatagaatggctacagaaagactttgggttgtatgtagtaaacatgtttgatactcatcaggcagcacgccttcttaacctgggcaggcactcactcgatcatctcctgaaactctactgcaacgtggactcaaacaagcaatatcagctggctgattggagaatacgccctctgcccgaggagatgctcagctacgcccgggatgacacccattacctgctatatatctatgacaaaatgaggctggagatgtgggagcgcggcaacgggcagcccgtgcagctgcaggtggtgtggcaacggagcagggacatctgcctcaagaaattcatcaaacctatcttcacggatgagtcctaccttgaactctataggaagcagaagaagcaccttaacacacagcagttgacagcctttcagctgctgtttgcctggagggataaaacagctcgcagggaagatgaaagttacggatatgtactgccaaaccacatgatgctgaaaatagctgaagaactgcctaaggaacctcagggcatcatagcttgctgcaacccagtaccgccccttgtgcggcagcagatcaacgaaatgcaccttttaatccagcaggcccgagagatgcccctgctcaagtctgaagttgcagccggagtgaagaagagcggaccgctgcccagtgctgagagattggagaatgttctctttggacctcacgactgctcccatgcccctccggatggctatccaatcatcccaaccagtggatctgtgccagttcagaagcaggcgagcctcttccctgatgaaaaagaagataacttgctgggtaccacatgcctgattgccacagctgtcatcacgttatttaatgaacctagtgctgaagacagtaaaaagggtccattgacagttgcacagaaaaaagcccagaacatcatggagtcctttgaaaatccatttaggatgtttctgccctcactgggacaccgtgctcccgtctctcaggcagcgaagttcgatccatcaaccaaaatctatgaaatcagcaaccgttggaagctggcccaggtacaagtacaaaaagactctaaagaagctgtcaagaagaaggcagctgagcaaacagctgcccggacagcagggctgaacgtgagaaacggccactcgcgacaggtggcacaaatgtgagaggaagcgacagggccggccgaagaacagagaggtcatcagagaggcgggcgaaaatgcttacgcacccggtgggcacactcttccaacggcggtgaaagcggggccggaggcaacgcggg

SEQ ID NO: 356625 - DNA, 2880 bp, Homo sapiens
agcgggtctcctcggccgacaagctctcgcgagacgagccgtgcaggctgaaaaaatggcgccacccagtacccgggagcccagggtcctgtcggcgaccagcgcaaccaaatccgacggagagatggtgctgccaggcttcccggacgccgacagctttgtgaagtttgctcttgggtccgtggtggcagtcaccaaggcatctgggggcctaccacagtttggcgatgagtatgatttttaccgaagttttcctggcttccaagcattttgcgaaacacagggagacaggttgcttcagtgcatgagcagagtaatgcagtaccatgggtgtcgcagcaacattaaggatcgaagtaaagtgactgagctggaagacaagtttgatttactagttgatgccaatgatgtaattctggagagagtgggtattttactggatgaagcctcaggtgtaaacaagaatcaacagcctgtcctccctgccggcttgcaggtccccaaaacggtagtgtccagctggaaccgtaaggcagcagaatatggcaaaaaagcaaaatctgaaactttccggctgcttcatgcaaaaaatatcatccgacctcagctcaagtttcgagagaagattgacaattccaacacaccatttcttcctaaaatcttcatcaaacccaatgctcagaaacctctccctcaagctctctctaaggaaaggcgggaacgcccacaggatcgtcctgaggacttggacgtcccccctgcactggctgatttcatccatcagcagagaacccagcaggttgagcaagacatgtttgcacatccttatcaatatgaactaaatcactttaccccagcagatgcagtgcttcaaaagccacaaccccagttatacagacctatagaagagacaccatgccatttcatatcctccctggatgaactcgtggaactcaacgaaaagctcttgaattgtcaggaatttgcagttgacttggagcaccactcttacaggagcttcctgggactgacctgcctgatgcaaatttctactcggacggaagacttcatcattgacaccctcgagcttcgaagtgacatgtacattctcaatgagagcctcacagacccagccatcgttaaggtctttcatggtgctgattcagacatagaatggctacagaaagactttgggttgtatgtagtaaacatgtttgatactcatcaggcagcacgccttcttaacctgggcaggcactcactcgatcatctcctgaaactctactgcaacgtggactcaaacaagcaatatcagctggctgattggagaatacgccctctgcccgaggagatgctcagctacgcccgggatgacacccattacctgctatatatctatgacaaaatgaggctggagatgtgggagcgcggcaacgggcagcccgtgcagctgcaggtggtgtggcaacggagcagggacatctgcctcaagaaattcatcaaacctatcttcacggatgagtcctaccttgaactctataggaagcagaagaagcaccttaacacacagcagttgacagcctttcagctgctgtttgcctggagggataaaacagctcgcagggaagatgaaagttacggatatgtactgccaaaccacatgatgctgaaaatagctgaagaactgcctaaggaacctcagggcatcatagcttgctgcaacccagtaccgccccttgtgcggcagcagatcaacgaaatgcaccttttaatccagcaggcccgagagatgcccctgctcaagtctgaagttgcagccggagtgaagaagagcggaccgctgcccagtgctgagagattggagaatgttctctttggacctcacgactgctcccatgcccctccggatggctatccaatcatcccaaccagtggatctgtgccagttcagaagcaggcgagcctcttccctgatgaaaaagaagataacttgctgggtaccacatgcctgattgccacagctgtcatcacgttatttaatgaacctagtgctgaagacagtaaaaagggtccattgacagttgcacagaaaaaagcccagaacatcatggagtcctttgaaaatccatttaggatgtttctgccctcactgggacaccgtgctcccgtctctcaggcagcgaagttcgatccatcaaccaaaatctatgaaatcagcaaccgttggaagctggcccaggtacaagtacaaaaagactctaaagaagctgtcaagaagaaggcagctgagcaaacaggtaacactcacttccttgcaactcagtcggctgttaaagaatggctgttgcacacccgctgtttcagccaagtgccagatacggcgatgaatgaagcccctgtggggcttcccttctgctgagggatggtgggcaatcagtatctatcctggcagatggcagcaggtgctgtgcagagagattggtggggagtgctggaggtgctgtagctgtctcggtggttggagaaggcagtctaatgaatgcgacattgacgagacctgcagtgacctagagaagagttctggagccacagcacagcgagcccagaggccctggggctagttcactgggcatgctgagcagcagcaagtgggcctgcatgagcagaggcgggtagagaagagcaggagatggggaaggagccagcagaggcccacgggatgacgctgccttttactctgagttcagaagccaggagggtgctgagcagacaggggggaagtgactgacatgtggcactctggctgctgtgtcaacagtagactatagaggacaggatgggagtccaggaagggataggagacatggcagtggctcaggc

SEQ ID NO: 356626 - DNA, 1550 bp, Homo sapiens
gagtcaaagcaagtaatatcacgcttggatgcttggggtaatacagccctgctggtccgacgagaatggctcacgctagcgcacgggatgaggatccgaatgcacgcgtggcgtactatatcgatgggacatgacatgagggctgcgagatcgtgggagcgcggaaaagggcacggcgtgtgcgaggtgcacgttggtgtggcgacgggggcaggagatctgcctcaagaaattcatcaaacctatcttcacggatgagtcctaccttgaactctataggaagcagaagaagcaccttaacacacagcagttgacagcctttcagctgctgtttgcctggagggataaaacagctcgcagggaagatgaaagttacggatatgtactgccaaaccacatgatgctgaaaatagctgaagaactgcctaaggaacctcagggcatcatagcttgctgcaacccagtaccgccccttgtgcggcagcagatcaacgaaatgcaccttttaatccagcaggcccgagagatgcccctgctcaagtctgaagttgcagccggagtgaagaagagcggaccgctgcccagtgctgagagattggagaatgttctctttggacctcacgactgctcccatgcccctccggatggctatccaatcatcccaaccagtggatctgtgccagttcagaagcaggcgagcctcttccctgatgaaaaagaagataacttgctgggtaccacatgcctgattgccacagctgtcatcacgttatttaatgaacctagtgctgaagacagtaaaaagggtccattgacagttgcacagaaaaaagcccagaacatcatggagtcctttgaaaatccatttaggatgtttctgccctcactgggacaccgtgctcccgtctctcaggcagcgaagttcgatccatcaaccaaaatctatgaaatcagcaaccgttggaagctggcccaggtacaagtacaaaaagactctaaagaagctgtcaagaagaaggcagctgagcaaacagctgcccgggaacaggcaaaggaggcgtgcaaagctgcagcagaacaggccatctccgtccgacagcaggtcgtgctagaaaatgctgcaaagaagagagagcgagcaacaagcgacccaaggaccacagaacagaaacaagagaagaaacgactcaaaatttccaagaagccaaaggacccagagccaccagaaaaagagtttacgccttacgactacagccagtcagacttcaaggcttttgctggaaacagcaaatccaaagtttcttctcagtttgatccaaataaacagaccccgtctggcaagaaatgcattgcagccaaaaaaattaaacagtcggtgggaaacaaaagcatgtcctttccaactggaaagtcagacagaggcttcaggtacaactggccacagagatagtcctggaagacacgtggcgcctgtggaccggaagcaccaaatgctggtgctgcttttgtacatacatatttttaaaccattaaaattcttcctgaagaaa

SEQ ID NO: 356627 - DNA, 1073 bp, Homo sapiens
tgtggagtaaaatttatccatttaaagtccatgtatgtctcgatgagatgccccgtacttcgggtctgaagttgcagccggagtgaagaagagcggaccgctgcccagtgctgagagattggagaatgttctctttggacctcacgactgctcccatgcccctccggatggctatccaatcatcccaaccagtggatctgtgccagttcagaagcaggcgagcctcttccctgatgaaaaagaagataacttgctgggtaccacatgcctgattgccacagctgtcatcacgttatttaatgaacctagtgctgaagacagtaaaaagggtccattgacagttgcacagaaaaaagcccagaacatcatggagtcctttgaaaatccatttaggatgtttctgccctcactgggacaccgtgctcccgtctctcaggcagcgaagttcgatccatcaaccaaaatctatgaaatcagcaaccgttggaagctggcccaggtacaagtacaaaaagactctaaagaagctgtcaagaagaaggcagctgagcaaacagctgcccgggaacaggcaaaggaggcgtgcaaagctgcagcagaacaggccatctccgtccgacagcaggtcgtgctagaaaatgctgcaaagaagagagagcgagcaacaagcgacccaaggaccacagaacagaaacaagagaagaaacgactcaaaatttccaagaagccaaaggacccagagccaccagaaaaagagtttacgccttacgactacagccagtcagacttcaaggcttttgctggaaacagcaaatccaaagtttcttctcagtttgatccaaataaacagaccccgtctggcaagaaatgcattgcagccaaaaaaattaaacagtcggtgggaaacaaaagcatgtcctttccaactggaaagtcagacagaggcttcaggtacaactggccacagagatagtcctggaagacacgtggcgcctgtggaccggaagcaccaaatgctggtgctgcttttgtacatacatatttttaaaccattaaaattcttcctgaagaaa

SEQ ID NO: 356628 - DNA, 2416 bp, Homo sapiens
agcgggtctcctcggccgacaagctctcgcgagacgagccgtgcaggctgaaaaaatggcgccacccagtacccgggagcccagggtcctgtcggcgaccagcgcaaccaaatccgacggagagatggtgctgccaggcttcccggacgccgacagctttgtgaagtttgctcttgggtccgtggtggcagtcaccaaggcatctgggggcctaccacagtttggcgatgagtatgatttttaccgaagttttcctggcttccaagcattttgcgaaacacagggagacaggttgcttcagtgcatgagcagagtaatgcagtaccatgggtgtcgcagcaacattaaggatcgaagtaaagtgactgagctggaagacaagtttgatttactagttgatgccaatgatgtaattctggagagagtgggtattttactggatgaagcctcaggtgtaaacaagaatcaacagcctgtcctccctgccggcttgcaggtccccaaaacggtagtgtccagctggaaccgtaaggcagcagaatatggcaaaaaagcaaaatctgaaactttccggctgcttcatgcaaaaaatatcatccgacctcagctcaagtttcgagagaagattgacaattccaacacaccatttcttcctaaaatcttcatcaaacccaatgctcagaaacctctccctcaagctctctctaaggaaaggcgggaacgcccacaggatcgtcctgaggacttggacgtcccccctgcactggctgatttcatccatcagcagagaacccagcaggttgagcaagacatgtttgcacatccttatcaatatgaactaaatcactttaccccagcagatgcagtgcttcaaaagccacaaccccagttatacagacctatagaagagacaccatgccatttcatatcctccctggatgaactcgtggaactcaacgaaaagctcttgaattgtcaggaatttgcagttgacttggagcaccactcttacaggagcttcctgggactgacctgcctgatgcaaatttctactcggacggaagacttcatcattgacaccctcgagcttcgaagtgacatgtacattctcaatgagagcctcacagacccagccatcgttaaggtctttcatggtgctgattcagacatagaatggctacagaaagactttgggttgtatgtagtaaacatgtttgatactcatcaggcagcacgccttcttaacctgggcaggcactcactcgatcatctcctgaaactctactgcaacgtggactcaaacaagcaatatcagctggctgattggagaatacgccctctgcccgaggagatgctcagctacgcccgggatgacacccattacctgctatatatctatgacaaaatgaggctggagatgtgggagcgcggcaacgggcagcccgtgcagctgcaggtggtgtggcaacggagcagggacatctgcctcaagaaattcatcaaacctatcttcacggatgagtcctaccttgaactctataggaagcagaagaagcaccttaacacacagcagttgacagcctttcagctgctgtttgcctggagggataaaacagctcgcagggaagatgaaagttacgggtaagggattagaggttcttttaatacttgtttccagactgaggagatctaataacaagtaaataatgggcttttttcttttgctatgaaagctggttatttcccctatgtgacagcatctaatggaacttactggctgaatgtaatgtgtccccactgtgtgtgtgtgtgtgtgtgtgtgtgtgtgtgtttttttccagatatgtactgccaaaccacatgatgctgaaaatagctgaagaactgcctaagtgagtttcaaatctgattaatatgttctgactttctcagtagatctgatgttcttcaaaatcaagcttttctggttgctattacccaaggctgcttactcagagattaatgctccaagcttggaaggtagcaagttgaaggaatatagaatttctgccctcaggctgccatttaagcactaaaacttctgaactggaatcatttcaatgattatgccttagtttgagtttattttaagtctctgagccttatagcatctacttgcaagggaagaaaatgtcccagattctcatctgtactttcttccaaattaaagcagctcatgatcttaaacgttttgtgatcttgattgaagtataagcaagaatgaaaatccaccacgcccggccaagataaagtcagtttttccattgattatgcatgtttcttttaatttggatctcctaaatgtaaggtagaaggtttaggttcaatcttgatatcttttcattatttttcagctcacttgcaaatgtcgctggta

SEQ ID NO: 356629 - DNA, 653 bp, Homo sapiens
tgggtggctgctctagagcgatccctttgatccatcagccaaaatctataaaatcagcaaccgttggaagctggcccaggtacaagtacaaaaagactctaaagaagctgtcaagaagaaggcagctgagcaaacagctgcccgggaacaggcaaaggaggcgtgcaaagctgcagcagaacaggccatctccgtccgacagcaggtcgtgctagaaaatgctgcaaagaagagagagcgagcaacaagcgacccaaggaccacagaacagaaacaagagaagaaacgactcaaaatttccaagaagccaaaggacccagagccaccagaaaaagagtttacgccttacgactacagccagtcagacttcaaggcttttgctggaaacagcaaatccaaagtttcttctcagtttgatccaaataaacagaccccgtctggcaagaaatgcattgcagccaaaaaaattaaacagtcggtgggaaacaaaagcatgtcctttccaactggaaagtcagacagaggcttcaggtacaactggccacagagatagtcctggaagacacgtggcgcctgtggaccggaagcaccaaatgctggtgctgcttttgtacatacatatttttaaaccattaaaattcttcctgaagaaa

SEQ ID NO: 356630 - DNA, 1078 bp, Homo sapiens
acactgaacaactgcacgtcctgtgtgttatgcccagtgtcacctccatgtgttgtaacgccataggtccgtggggtgtcataaagaaacacagcagacttgcggaagcccagccttgagtctgcttctgtcatttactgaccatgccccttggacaagttatttagtctcccggagtctgtttgctcatctctaaagagagggtgatgacagtacctttttcccagggttacagagggattgaatgagatgatggatggcccagtgcctggaggacagtagcactttgtccttaatagggattttagcaataaagccagcatgaaatttatttttcatgcccttagatttgaaaatttatgacttagaatgtgtgtacttcttaggttaacctgcccttcgtcacctcatgaaaagtaagacagacttaggtggctgactttggagggttttttttgttatatttgctttcattatatcagcaaccgttggaagctggcccaggtacaagtacaaaaagactctaaagaagctgtcaagaagaaggcagctgagcaaacagctgcccgggaacaggcaaaggaggcgtgcaaagctgcagcagaacaggccatctccgtccgacagcaggtcgtgctagaaaatgctgcaaagaagagagagcgagcaacaagcgacccaaggaccacagaacagaaacaagagaagaaacgactcaaaatttccaagaagccaaaggacccagagccaccagaaaaagagtttacgccttacgactacagccagtcagacttcaaggcttttgctggaaacagcaaatccaaagtttcttctcagtttgatccaaataaacagaccccgtctggcaagaaatgcattgcagccaaaaaaattaaacagtcggtgggaaacaaaagcatgtcctttccaactggaaagtcagacagaggcttcaggtacaactggccacagagatagtcctggaagacacgtggcgcctgtggaccggaagcaccaaatgctggtgctgcttttgtacatacatatttttaaaccattaaaattcttcctgaagaaa

SEQ ID NO: 356631 - DNA, 1068 bp, Homo sapiens
agcgggtctcctcggccgacaagctctcgcgagacgagccgtgcaggctgaaaaaatggcgccacccagtacccgggagcccagggtcctgtcggcgaccagcgcaaccaaatccgacggagagatggtgctgccaggcttcccggacgccgacagctttgtgaagtttgctcttgggtccgtggtggcagtcaccaaggcatctgggggcctaccacagtttggcgatgagtatgatttttaccgaagttttcctggcttccaagcattttgcgaaacacagggagacaggttgcttcagtgcatgagcagagtaatgcagtaccatgggtgtcgcagcaacattaaggatcgaagtaaagtgactgagctggaagacaagtttgatttactagttgatgccaatgatgtaattctggagagagtgggtattttactggatgaagcctcaggtgtaaacaagaatcaacagcctgtcctccctgccggcttgcaggtccccaaaacggtagtgtccagctggaaccgtaaggcagcagaatatggcaaaaaagcaaaatctgaaactttccggctgcttcatgcaaaaaatatcatccgacctcagctcaagtttcgagagaagattgacaattccaacacaccattcataatgtattgatatgacgttggagagctggggcttaggatctaagccgatgaggaagaggtgggctgaggagcctgtaggtgtgtgatgagaactgaaacaatttccctccacacagctggctttctacattgacatcattttactattgcgctgtcttcattaacatgactttactattccaggaaactctttcccagaaagatatatgttacaaataccttgtggttcatttcaggaatttcccaaactcatttaaatgaatatcaaatggttaaacttttcagtagaaagtgtgaaacaacagtttgctccccagaatcttttgaaccctttgcctcaaaatccccacctcactgtgtactccaatcctaaactcatatcaagatcattatcaacccaatcagccctccgtgaat

SEQ ID NO: 356632 - DNA, 531 bp, Homo sapiens
tgaggaagtaatggggccccatacagggacatctgtgcgcgtcagctgagagaaatgggcctggttttcagactgcccacagggaccaggatcgctatgtattcatttatgtgagccatgagccctagcccctcatcgtgacaggggtgctctcacagccaaggcttccctgagtgtcatggtcccggcctcgctgtgagcctgtgatgtgtggtaactcattgacctgaccgcaggtctctctcatctcttacctttcaggaaacagcaaatccaaagtttcttctcagtttgatccaaataaacagaccccgtctggcaagaaatgcattgcagccaaaaaaattaaacagtcggtgggaaacaaaagcatgtcctttccaactggaaagtcagacagaggcttcaggtacaactggccacagagatagtcctggaagacacgtggcgcctgtggaccggaagcaccaaatgctggtgctgcttttgtacatacatatttttaaaccattaaaattcttcctgaagaaa

SEQ ID NO: 356633 - DNA, 287 bp, Homo sapiens
ccggactgaagaactgaaccgggaggtcgctggccacacggagcagctccagatgagcaggtccgaggttactgacctgcggcgcacccttcagggtcttgagattgagctgcagtcacagctgagcatgtcctttccaactggaaagtcagacagaggcttcaggtacaactggccacagagatagtcctggaagacacgtggcgcctgtggaccggaagcaccaaatgctggtgctgcttttgtacatacatatttttaaaccattaaaattcttcctgaagaaa

SEQ ID NO: 356634 - DNA, 328 bp, Homo sapiens
gaagttggcctaggctggcctgacatcagtgtttccttagtcacctacctgtagcttcagcttaggtggcagcctggctttacccagtcattattcttatctggaagcctttaagggctgcgtttctgagtgacaagttgagtgtgttcttacttgtcttcagggaacctcagggcatcatagcttgctgcaacccagtaccgccccttgtgcggcagcagatcaacgaaatgcaccttttaatccagcaggcccgagagatgcccctgctcaaggtaagaagcttttctgcggctgggcacagtggctcacgcctataatctcagca

SEQ ID NO: 356635 - DNA, 729 bp, Homo sapiens
taatttcagtgttctaataaactagaggcagagttaatttctgagcatgagtggcctgctaccagtgtactgcatgactttggttctgttttcaggtctttcatggtgctgattcagacatagaatggctacagaaagactttgggttgtatgtagtaaacatgtttgatactcatcaggcagcacgccttcttaacctgggcaggcactcactcgatcatctcctgaaactctactgcaacgtggactcaaacaagcaatatcagctggctgattggagaatacggtcagtttgctcttactgaggaaatgtgggtggcagaagaaagtgattattcattaacctgtcgtccagagagacctgggtttgagccctaccacgctcattgagatgaatggcatcaggcttttcgccaggcatcttcagcagcgtaaaagtggtaggaaattttttaatgctaaggtggactttatgatgggctgatgcagttacactgtgttccatggaaatagtggttgaaaaagaggtgccgcaccagtatttgcccatgctggtcttttgtttgaaactgggatctttctaccagatgattttgtgtgtgtgtaagatcttctgtagggatgattgtgtgtgtgtgtgtgtgtgcaagatgaccttccataggtgggaaagaattctaagggacactgttgtttagctttacactgagcgtttttttgtggcataag

SEQ ID NO: 356636 - DNA, 2813 bp, Homo sapiens
agcgggtctcctcggccgacaagctctcgcgagacgagccgtgcaggctgaaaaaatggcgccacccagtacccgggagcccagggtcctgtcggcgaccagcgcaaccaaatccgacggagagatggtgctgccaggcttcccggacgccgacagctttgtgaagtttgctcttgggtccgtggtggcagtcaccaaggcatctgggggcctaccacagtttggcgatgagtatgatttttaccgaagttttcctggcttccaagcattttgcgaaacacagggagacaggttgcttcagtgcatgagcagagtaatgcagtaccatgggtgtcgcagcaacattaaggatcgaagtaaagtgactgagctggaagacaagtttgatttactagttgatgccaatgatgtaattctggagagagtgggtattttactggatgaagcctcaggtgtaaacaagaatcaacagcctgtcctccctgccggcttgcaggtccccaaaacggtagtgtccagctggaaccgtaaggcagcagaatatggcaaaaaagcaaaatctgaaactttccggctgcttcatgcaaaaaatatcatccgacctcagctcaagtttcgagagaagattgacaattccaacacaccatttcttcctaaaatcttcatcaaacccaatgctcagaaacctctccctcaagctctctctaaggaaaggcgggaacgcccacaggatcgtcctgaggacttggacgtcccccctgcactggctgatttcatccatcagcagagaacccagcaggttgagcaagacatgtttgcacatccttatcaatatgaactaaatcactttaccccagcagatgcagtgcttcaaaagccacaaccccagttatacagacctatagaagagacaccatgccatttcatatcctccctggatgaactcgtggaactcaacgaaaagctcttgaattgtcaggaatttgcagttgacttggagcaccactcttacaggagcttcctgggactgacctgcctgatgcaaatttctactcggacggaagacttcatcattgacaccctcgagcttcgaagtgacatgtacattctcaatgagagcctcacagacccagccatcgttaaggtctttcatggtgctgattcagacatagaatggctacagaaagactttgggttgtatgtagtaaacatgtttgatactcatcaggcagcacgccttcttaacctgggcaggcactcactcgatcatctcctgaaactctactgcaacgtggactcaaacaagcaatatcagctggctgattggagaatacgccctctgcccgaggagatgctcagctacgcccgggatgacacccattacctgctatatatctatgacaaaatgaggctggagatgtgggagcgcggcaacgggcagcccgtgcagctgcaggtggtgtggcaacggagcagggacatctgcctcaagaaattcatcaaacctatcttcacggatgagtcctaccttgaactctataggaagcagaagaagcaccttaacacacagcagttgacagcctttcagctgctgtttgcctggagggataaaacagctcgcagggaagatgaaagttacggatatgtactgccaaaccacatgatgctgaaaatagctgaagaactgcctaaggaacctcagggcatcatagcttgctgcaacccagtaccgccccttgtgcggcagcagatcaacgaaatgcaccttttaatccagcaggcccgagagatgcccctgctcaagtctgaagttgcagccggagtgaagaagagcggaccgctgcccagtgctgagagattggagaatgttctctttggacctcacgactgctcccatgcccctccggatggctatccaatcatcccaaccagtggatctgtgccagttcagaagcaggcgagcctcttccctgatgaaaaagaagataacttgctgggtaccacatgcctgattgccacagctgtcatcacgttatttaatgaacctagtgctgaagacagtaaaaagggtccattgacagttgcacagaaaaaagcccagaacatcatggagtcctttgaaaatccatttaggatgtttctgccctcactgggacaccgtgctcccgtctctcaggcagcgaagttcgatccatcaaccaaaatctatgaaatcagcaaccgttggaagctggcccaggtacaagtacaaaaagactctaaagaagctgtcaagaagaaggcagctgagcaaacagctgcccgggaacaggcaaaggaggcgtgcaaagctgcagcagaacaggccatctccgtccgacagcaggtcgtgctagaaaatgctgcaaagaagagagagcgagcaacaagcgacccaaggaccacagaacagaaacaagagaagaaacgactcaaaatttccaagaagccaaaggacccagagccaccagaaaaagagtttacgccttacgactacagccagtcagacttcaaggcttttgctggaaacagcaaatccaaagtttcttctcagtttgatccaaataaacagaccccgtctggcaagaaatgcattgcagccaaaaaaattaaacagtcggtgggaaacaaaagcatgtcctttccaactggaaagtcagacagaggcttcaggtacaactggccacagagatagtcctggaagacacgtggcgcctgtggaccggaagcaccaaatgctggtgctgcttttgtacatacatatttttaaaccattaaaattcttcctgaagaaa

SEQ ID NO: 356637 - DNA, 2848 bp, Homo sapiens
agcgggtctcctcggccgacaagctctcgcgagacgagccgtgcaggctgaaaaaatggcgccacccagtacccgggagcccagggtcctgtcggcgaccagcgcaaccaaatccgacggagagatggtgctgccaggcttcccggacgccgacagctttgtgaagtttgctcttgggtccgtggtggcagtcaccaaggcatctgggggcctaccacagtttggcgatgagtatgatttttaccgaagttttcctggcttccaagcattttgcgaaacacagggagacaggttgcttcagtgcatgagcagagtaatgcagtaccatgggtgtcgcagcaacattaaggatcgaagtaaagtgactgagctggaagacaagtttgatttactagttgatgccaatgatgtaattctggagagagtgggtattttactggatgaagcctcaggtgtaaacaagaatcaacagcctgtcctccctgccggcttgcaggtccccaaaacggtagtgtccagctggaaccgtaaggcagcagaatatggcaaaaaagcaaaatctgaaactttccggctgcttcatgcaaaaaatatcatccgacctcagctcaagtttcgagagaagattgacaattccaacacaccatttcttcctaaaatcttcatcaaacccaatgctcagaaacctctccctcaagctctctctaaggaaaggcgggaacgcccacaggatcgtcctgaggacttggacgtcccccctgcactggctgatttcatccatcagcagagaacccagcaggttgagcaagacatgtttgcacatccttatcaatatgaactaaatcactttaccccagcagatgcagtgcttcaaaagccacaaccccagttatacagacctatagaagagacaccatgccatttcatatcctccctggatgaactcgtggaactcaacgaaaagctcttgaattgtcaggaatttgcagttgacttggagcaccactcttacaggagcttcctgggactgacctgcctgatgcaaatttctactcggacggaagacttcatcattgacaccctcgagcttcgaagtgacatgtacattctcaatgagagcctcacagacccagccatcgttaaggtctttcatggtgctgattcagacatagaatggctacagaaagactttgggttgtatgtagtaaacatgtttgatactcatcaggcagcacgccttcttaacctgggcaggcactcactcgatcatctcctgaaactctactgcaacgtggactcaaacaagcaatatcagctggctgattggagaatacgccctctgcccgaggagatgctcagctacgcccgggatgacacccattacctgctatatatctatgacaaaatgaggctggagatgtgggagcgcggcaacgggcagcccgtgcagctgcaggtggtgtggcaacggagcagggacatctgcctcaagaaattcatcaaacctatcttcacggatgagtcctaccttgaactctataggaagcagaagaagcaccttaacacacagcagttgacagcctttcagctgctgtttgcctggagggataaaacagctcgcagggaagatgaaagttacggatatgtactgccaaaccacatgatgctgaaaatagctgaagaactgcctaaggaacctcagggcatcatagcttgctgcaacccagtaccgccccttgtgcggcagcagatcaacgaaatgcaccttttaatccagcaggcccgagagatgcccctgctcaagtctgaagttgcagccggagtgaagaagagcggaccgctgcccagtgctgagagattggagaatgttctctttggacctcacgactgctcccatgcccctccggatggctatccaatcatcccaaccagtggtaaagtcgagagccctcctgactgtcccgaagaggatctgtgccagttcagaagcaggcgagcctcttccctgatgaaaaagaagataacttgctgggtaccacatgcctgattgccacagctgtcatcacgttatttaatgaacctagtgctgaagacagtaaaaagggtccattgacagttgcacagaaaaaagcccagaacatcatggagtcctttgaaaatccatttaggatgtttctgccctcactgggacaccgtgctcccgtctctcaggcagcgaagttcgatccatcaaccaaaatctatgaaatcagcaaccgttggaagctggcccaggtacaagtacaaaaagactctaaagaagctgtcaagaagaaggcagctgagcaaacagctgcccgggaacaggcaaaggaggcgtgcaaagctgcagcagaacaggccatctccgtccgacagcaggtcgtgctagaaaatgctgcaaagaagagagagcgagcaacaagcgacccaaggaccacagaacagaaacaagagaagaaacgactcaaaatttccaagaagccaaaggacccagagccaccagaaaaagagtttacgccttacgactacagccagtcagacttcaaggcttttgctggaaacagcaaatccaaagtttcttctcagtttgatccaaataaacagaccccgtctggcaagaaatgcattgcagccaaaaaaattaaacagtcggtgggaaacaaaagcatgtcctttccaactggaaagtcagacagaggcttcaggtacaactggccacagagatagtcctggaagacacgtggcgcctgtggaccggaagcaccaaatgctggtgctgcttttgtacatacatatttttaaaccattaaaattcttcctgaagaaa

SEQ ID NO: 356638 - DNA, 2762 bp, Homo sapiens
agcgggtctcctcggccgacaagctctcgcgagacgagccgtgcaggctgaaaaaatggcgccacccagtacccgggagcccagggtcctgtcggcgaccagcgcaaccaaatccgacggagagatggtgctgccaggcttcccggacgccgacagctttgtgaagtttgctcttgggtccgtggtggcagtcaccaaggcatctgggggcctaccacagtttggcgatgagtatgatttttaccgaagttttcctggcttccaagcattttgcgaaacacagggagacaggttgcttcagtgcatgagcagagtaatgcagtaccatgggtgtcgcagcaacattaaggatcgaagtaaagtgactgagctggaagacaagtttgatttactagttgatgccaatgatgtaattctggagagagtgggtattttactggatgaagcctcaggtgtaaacaagaatcaacagcctgtcctccctgccggcttgcaggtccccaaaacggtagtgtccagctggaaccgtaaggcagcagaatatggcaaaaaagcaaaatctgaaactttccggctgcttcatgcaaaaaatatcatccgacctcagctcaagtttcgagagaagattgacaattccaacacaccatctctctctaaggaaaggcgggaacgcccacaggatcgtcctgaggacttggacgtcccccctgcactggctgatttcatccatcagcagagaacccagcaggttgagcaagacatgtttgcacatccttatcaatatgaactaaatcactttaccccagcagatgcagtgcttcaaaagccacaaccccagttatacagacctatagaagagacaccatgccatttcatatcctccctggatgaactcgtggaactcaacgaaaagctcttgaattgtcaggaatttgcagttgacttggagcaccactcttacaggagcttcctgggactgacctgcctgatgcaaatttctactcggacggaagacttcatcattgacaccctcgagcttcgaagtgacatgtacattctcaatgagagcctcacagacccagccatcgttaaggtctttcatggtgctgattcagacatagaatggctacagaaagactttgggttgtatgtagtaaacatgtttgatactcatcaggcagcacgccttcttaacctgggcaggcactcactcgatcatctcctgaaactctactgcaacgtggactcaaacaagcaatatcagctggctgattggagaatacgccctctgcccgaggagatgctcagctacgcccgggatgacacccattacctgctatatatctatgacaaaatgaggctggagatgtgggagcgcggcaacgggcagcccgtgcagctgcaggtggtgtggcaacggagcagggacatctgcctcaagaaattcatcaaacctatcttcacggatgagtcctaccttgaactctataggaagcagaagaagcaccttaacacacagcagttgacagcctttcagctgctgtttgcctggagggataaaacagctcgcagggaagatgaaagttacggatatgtactgccaaaccacatgatgctgaaaatagctgaagaactgcctaaggaacctcagggcatcatagcttgctgcaacccagtaccgccccttgtgcggcagcagatcaacgaaatgcaccttttaatccagcaggcccgagagatgcccctgctcaagtctgaagttgcagccggagtgaagaagagcggaccgctgcccagtgctgagagattggagaatgttctctttggacctcacgactgctcccatgcccctccggatggctatccaatcatcccaaccagtggatctgtgccagttcagaagcaggcgagcctcttccctgatgaaaaagaagataacttgctgggtaccacatgcctgattgccacagctgtcatcacgttatttaatgaacctagtgctgaagacagtaaaaagggtccattgacagttgcacagaaaaaagcccagaacatcatggagtcctttgaaaatccatttaggatgtttctgccctcactgggacaccgtgctcccgtctctcaggcagcgaagttcgatccatcaaccaaaatctatgaaatcagcaaccgttggaagctggcccaggtacaagtacaaaaagactctaaagaagctgtcaagaagaaggcagctgagcaaacagctgcccgggaacaggcaaaggaggcgtgcaaagctgcagcagaacaggccatctccgtccgacagcaggtcgtgctagaaaatgctgcaaagaagagagagcgagcaacaagcgacccaaggaccacagaacagaaacaagagaagaaacgactcaaaatttccaagaagccaaaggacccagagccaccagaaaaagagtttacgccttacgactacagccagtcagacttcaaggcttttgctggaaacagcaaatccaaagtttcttctcagtttgatccaaataaacagaccccgtctggcaagaaatgcattgcagccaaaaaaattaaacagtcggtgggaaacaaaagcatgtcctttccaactggaaagtcagacagaggcttcaggtacaactggccacagagatagtcctggaagacacgtggcgcctgtggaccggaagcaccaaatgctggtgctgcttttgtacatacatatttttaaaccattaaaattcttcctgaagaaa

SEQ ID NO: 356639 - DNA, 1790 bp, Homo sapiens
gtgattattcattaacctgtcgtccagagagacctgggtttgagccctaccacgctcattgagatgaatggcatcaggcttttcgccaggcatcttcagcagcgtaaaagtgccctctgcccgaggagatgctcagctacgcccgggatgacacccattacctgctatatatctatgacaaaatgaggctggagatgtgggagcgcggcaacgggcagcccgtgcagctgcaggtggtgtggcaacggagcagggacatctgcctcaagaaattcatcaaacctatcttcacggatgagtcctaccttgaactctataggaagcagaagaagcaccttaacacacagcagttgacagcctttcagctgctgtttgcctggagggataaaacagctcgcagggaagatgaaagttacgggtaagggattagaggttcttttaatacttgtttccagactgaggagatctaataacaagtaaataatgggcttttttcttttgctatgaaagctggttatttcccctatgtgacagcatctaatggaacttactggctgaatgtaatgtgtccccactgtgtgtgtgtgtgtgtgtgtgtgtgtgtgtgtttttttccagatatgtactgccaaaccacatgatgctgaaaatagctgaagaactgcctaaggaacctcagggcatcatagcttgctgcaacccagtaccgccccttgtgcggcagcagatcaacgaaatgcaccttttaatccagcaggcccgagagatgcccctgctcaagtctgaagttgcagccggagtgaagaagagcggaccgctgcccagtgctgagagattggagaatgttctctttggacctcacgactgctcccatgcccctccggatggctatccaatcatcccaaccagtggatctgtgccagttcagaagcaggcgagcctcttccctgatgaaaaagaagataacttgctgggtaccacatgcctgattgccacagctgtcatcacgttatttaatgaacctagtgctgaagacagtaaaaagggtccattgacagttgcacagaaaaaagcccagaacatcatggagtcctttgaaaatccatttaggatgtttctgccctcactgggacaccgtgctcccgtctctcaggcagcgaagttcgatccatcaaccaaaatctatgaaatcagcaaccgttggaagctggcccaggtacaagtacaaaaagactctaaagaagctgtcaagaagaaggcagctgagcaaacagctgcccgggaacaggcaaaggaggcgtgcaaagctgcagcagaacaggccatctccgtccgacagcaggtcgtgctagaaaatgctgcaaagaagagagagcgagcaacaagcgacccaaggaccacagaacagaaacaagagaagaaacgactcaaaatttccaagaagccaaaggacccagagccaccagaaaaagagtttacgccttacgactacagccagtcagacttcaaggcttttgctggaaacagcaaatccaaagtttcttctcagtttgatccaaataaacagaccccgtctggcaagaaatgcattgcagccaaaaaaattaaacagtcggtgggaaacaaaagcatgtcctttccaactggaaagtcagacagaggcttcaggtacaactggccacagagatagtcctggaagacacgtggcgcctgtggaccggaagcaccaaatgctggtgctgcttttgtacatacatatttttaaaccattaaaattcttcctgaagaaa

SEQ ID NO: 356640 - DNA, 2187 bp, Homo sapiens
agcgggtctcctcggccgacaagctctcgcgagacgagccgtgcaggctgaaaaaatggcgccacccagtacccgggagcccagggtcctgtcggcgaccagcgcaaccaaatccgacggagagatggtgctgccaggcttcccggacgccgacagctttgtgaagtttgctcttgggtccgtggtggcagtcaccaaggcatctgggggcctaccacagtttggcgatgagtatgatttttaccgaagttttcctggcttccaagcattttgcgaaacacagggagacaggttgcttcagtgcatgagcagagtaatgcagtaccatgggtgtcgcagcaacattaaggatcgaagtaaagtgactgagctggaagacaagtttgatttactagttgatgccaatgatgtaattctggagagagtgggtattttactggatgaagcctcaggtgtaaacaagaatcaacagcctgtcctccctgccggcttgcaggtccccaaaacggtagtgtccagctggaaccgtaaggcagcagaatatggcaaaaaagcaaaatctgaaactttccggctgcttcatgcaaaaaatatcatccgacctcagctcaagtttcgagagaagattgacaattccaacacaccatttcttcctaaaatcttcatcaaacccaatgctcagaaacctctccctcaagctctctctaaggaaaggcgggaacgcccacaggatcgtcctgaggacttggacgtcccccctgcactggctgatttcatccatcagcagagaacccagcaggttgagcaagacatgtttgcacatccttatcaatatgaactaaatcactttaccccagcagatgcagtgcttcaaaagccacaaccccagttatacagacctatagaagagacaccatgccatttcatatcctccctggatgaactcgtggaactcaacgaaaagctcttgaattgtcaggaatttgcagttgacttggagcaccactcttacaggagcttcctgggactgacctgcctgatgcaaatttctactcggacggaagacttcatcattgacaccctcgagcttcgaagtgacatgtacattctcaatgagagcctcacagacccagccatcgttaaggtctttcatggtgctgattcagacatagaatggctacagaaagactttgggttgtatgtagtaaacatgtttgatactcatcaggcagcacgccttcttaacctgggcaggcactcactcgatcatctcctgaaactctactgcaacgtggactcaaacaagcaatatcagctggctgattggagaatacgccctctgcccgaggagatgctcagctacgcccgggatgacacccattacctgctatatatctatgacaaaatgaggctggagatgtgggagcgcggcaacgggcagcccgtgcagctgcaggtggtgtggcaacggagcagggacatctgcctcaagaaattcatcaaacctatcttcacggatgagtcctaccttgaactctataggaagcagaagaagcaccttaacacacagcagttgacagcctttcagctgctgtttgcctggagggataaaacagctcgcagggaagatgaaagttacggatatgtactgccaaaccacatgatgctgaaaatagctgaagaactgcctaaggaacctcagggcatcatagcttgctgcaacccagtaccgccccttgtgcggcagcagatcaacgaaatgcaccttttaatccagcaggcccgagagatgcccctgctcaagtctgaagttgcagccggagtgaagaagagcggaccgctgcccagtgctgagagattggagaatgttctctttggacctcacgactgctcccatgcccctccggatggctatccaatcatcccaaccagtggatctgtgccagttcagaagcaggcgagcctcttccctgatgaaaaagaagataacttgctgggtaccacatgcctgattgccacagctgtcatcacgttatttaatgaacctagtgctgaagacagtaaaaagggtccattgacagttgcacagaaaaaagcccagaacatcatggagtcctttgaaaatccatttaggatgtttctgccctctactggacaccgcactccctaagaccctagtgatcctgg

SEQ ID NO: 356641 - DNA, 984 bp, Homo sapiens
cagcctgctggtgtcttttaatgcagagattggagaatgttctctttggacctcacgactgctcccatgcccctccggatggctatccaatcatcccaaccagtggatctgtgccagttcagaagcaggcgagcctcttccctgatgaaaaagaagataacttgctgggtaccacatgcctgattgccacagctgtcatcacgttatttaatgaacctagtgctgaagacagtaaaaagggtccattgacagttgcacagaaaaaagcccagaacatcatggagtcctttgaaaatccatttaggatgtttctgccctcactgggacaccgtgctcccgtctctcaggcagcgaagttcgatccatcaaccaaaatctatgaaatcagcaaccgttggaagctggcccaggtacaagtacaaaaagactctaaagaagctgtcaagaagaaggcagctgagcaaacagctgcccgggaacaggcaaaggaggcgtgcaaagctgcagcagaacaggccatctccgtccgacagcaggtcgtgctagaaaatgctgcaaagaagagagagcgagcaacaagcgacccaaggaccacagaacagaaacaagagaagaaacgactcaaaatttccaagaagccaaaggacccagagccaccagaaaaagagtttacgccttacgactacagccagtcagacttcaaggcttttgctggaaacagcaaatccaaagtttcttctcagtttgatccaaataaacagaccccgtctggcaagaaatgcattgcagccaaaaaaattaaacagtcggtgggaaacaaaagcatgtcctttccaactggaaagtcagacagaggcttcaggtacaactggccacagagatagtcctggaagacacgtggcgcctgtggaccggaagcaccaaatgctggtgctgcttttgtacatacatatttttaaaccattaaaattcttcctgaagaaa

SEQ ID NO: 356642 - DNA, 807 bp, Homo sapiens
gatcctgttaaacgccctcaggtccacaggccactgagcatttaggttcacagaagaggagcaggcagggctggggaggatcagctcacgtgtagctgaaggtgggcagagcacctgagcctgagctctgaggcagcctgtcctgcagagatgggggaccggggacctgagagggaggaggaatcagccgtgacaacccctgtggctaggccaagtcggagggggatggagatggaggggagggtggttgctggattcaccaactccagagacaagttctctcccttgcagctgcccgggaacaggcaaaggaggcgtgcaaagctgcagcagaacaggccatctccgtccgacagcaggtcgtgctagaaaatgctgcaaagaagagagagcgagcaacaagcgacccaaggaccacagaacagaaacaagagaagaaacgactcaaaatttccaagaagccaaaggacccagagccaccagaaaaagagtttacgccttacgactacagccagtcagacttcaaggcttttgctggaaacagcaaatccaaagtttcttctcagtttgatccaaataaacagaccccgtctggcaagaaatgcattgcagccaaaaaaattaaacagtcggtgggaaacaaaagcatgtcctttccaactggaaagtcagacagaggcttcaggtacaactggccacagagatagtcctggaagacacgtggcgcctgtggaccggaagcaccaaatgctggtgctgcttttgtacatacatatttttaaaccattaaaattcttcctgaagaaa

SEQ ID NO: 356643 - DNA, 1912 bp, Homo sapiens
gaattctagcggcgctttctcccgctctcgcctccgcgctagcgccctgctgcttcggggcggaagtagcggagccgggctcggcccccttaaagggacagggactgctgcaacctacggggtgtacttgggaacgaggggtgaagcggcccaggtgaggctcgccatggccaaacagctgcaggcccgaaggctagacgggatcgactacaacccctgggtggagtttgtgaaactggccagtgagcatgacgtcgtgaacttgggccagggcttcccggatttcccaccaccagactttgccgtggaagcctttcagcacgctgtcagtggagacttcatgcttaaccagtacaccaagacatttggttacccaccactgacgaagatcctggcaagtttctttggggagctgctgggtcaggagatagacccgctcaggaatgtgctggtgactgttggtggctatggggccctgttcacagccttccaggccctggtggacgaaggagacgaggtcatcatcatcgaacccttttttgactgctacgagcccatgacaatgatggcagggggtcgtcctgtgtttgtgtccctgaagccgggtcccatccagaatggagaactgggttccagcagcaactggcagctggaccccatggagctggccggcaaattcacatcacgcaccaaagccctggtcctcaacacccccaacaaccccctgggcaaggtgttctccagggaagagctggagctggtggccagcctttgccagcagcatgacgtggtgtgtatcactgatgaagtctaccagtggatggtctacgacgggcaccagcacatcagcattgccagcctccctggcatgtgggaacggaccctgaccatcggcagcgccggcaagaccttcagcgccactggctggaaggtgggctgggtcctgggtccagatcacatcatgaagcacctgcggaccgtgcaccagaactccgtcttccactgccccacgcagagccaggctgcagtagccgagagctttgaacgggagcagctgctcttccgccaacccagcagctactttgtgcagttcccgcaggccatgcagcgctgccgtgaccacatgatacgtagcctacagtcagtgggcctgaagcccatcatccctcagggcagctacttcctcatcacagacatctcagacttcaagaggaagatgcctgacttgcctggagctgtggatgagccctatgacagacgcttcgtcaagtggatgatcaagaacaagggcttggtggccatccctgtctccatcttctatagtgtgccacatcagaagcactttgaccactatatccgcttctgttttgtgaaggatgaagccacgctccaggccatggacgagaagctgcggaagtggaaggtggaactctagccctgaagtcacgccttggccctgacatccccacatgcccgcagagatcctctttgagtgtctgtctttgtccaggtttcagacatttctaggttggggaagatgctattgggaaacctcttctccgtgacacagaatgttctgggtgggagccgcccttcttcatcttagagaaccaagtgcctcctgtctgaaaggtgagggtggcctgacctgggcctctccctgcccctccataggtgggtttgtagggtcttgtgttgcttctggtctctccaggcttggctgagacggacggtagacttccaccatgtaccgatcacatcccagctctgcatggcccctgctaaggctcaggtataacctcaccttccctggctcatcttggccttggggagttgcctttaggcttgagtcctcaagcctctccttttcgtccataataaaatgtttaagttattaagatccttaatgacg

SEQ ID NO: 356644 - DNA, 1762 bp, Homo sapiens
gaattctagcggcgctttctcccgctctcgcctccgcgctagcgccctgctgcttcggggcggaagtagcggagccgggctcggcccccttaaagggacagggactgctgcaacctacggggtgtacttgggaacgaggggtgaagcggcccaggtgaggctcgccatggccaaacagctgcaggcccgaaggctagacgggatcgactacaacccctgggtggagtttgtgaaactggccagtgagcatgacgtcgtgaacttgggccagggcttcccggatttcccaccaccagactttgccgtggaagcctttcagcacgctgtcagtggagacttcatgcttaaccagtacaccaagacatttgtcatcatcatcgaacccttttttgactgctacgagcccatgacaatgatggcagggggtcgtcctgtgtttgtgtccctgaagccgggtcccatccagaatggagaactgggttccagcagcaactggcagctggaccccatggagctggccggcaaattcacatcacgcaccaaagccctggtcctcaacacccccaacaaccccctgggcaaggtgttctccagggaagagctggagctggtggccagcctttgccagcagcatgacgtggtgtgtatcactgatgaagtctaccagtggatggtctacgacgggcaccagcacatcagcattgccagcctccctggcatgtgggaacggaccctgaccatcggcagcgccggcaagaccttcagcgccactggctggaaggtgggctgggtcctgggtccagatcacatcatgaagcacctgcggaccgtgcaccagaactccgtcttccactgccccacgcagagccaggctgcagtagccgagagctttgaacgggagcagctgctcttccgccaacccagcagctactttgtgcagttcccgcaggccatgcagcgctgccgtgaccacatgatacgtagcctacagtcagtgggcctgaagcccatcatccctcagggcagctacttcctcatcacagacatctcagacttcaagaggaagatgcctgacttgcctggagctgtggatgagccctatgacagacgcttcgtcaagtggatgatcaagaacaagggcttggtggccatccctgtctccatcttctatagtgtgccacatcagaagcactttgaccactatatccgcttctgttttgtgaaggatgaagccacgctccaggccatggacgagaagctgcggaagtggaaggtggaactctagccctgaagtcacgccttggccctgacatccccacatgcccgcagagatcctctttgagtgtctgtctttgtccaggtttcagacatttctaggttggggaagatgctattgggaaacctcttctccgtgacacagaatgttctgggtgggagccgcccttcttcatcttagagaaccaagtgcctcctgtctgaaaggtgagggtggcctgacctgggcctctccctgcccctccataggtgggtttgtagggtcttgtgttgcttctggtctctccaggcttggctgagacggacggtagacttccaccatgtaccgatcacatcccagctctgcatggcccctgctaaggctcaggtataacctcaccttccctggctcatcttggccttggggagttgcctttaggcttgagtcctcaagcctctccttttcgtccataataaaatgtttaagttattaagatccttaatgacg

SEQ ID NO: 356645 - DNA, 1445 bp, Homo sapiens
gaattctagcggcgctttctcccgctctcgcctccgcgctagcgccctgctgcttcggggcggaagtagcggagccgggctcggcccccttaaagggacagggactgctgcaacctacggggtgtacttgggaacgaggggtgaagcggcccaggtgaggctcgccatggccaaacagctgcaggcccgaaggctagacgggatcgactacaacccctgggtggagtttgtgaaactggccagtgagcatgacgtcgtgaacttgggccagggcttcccggatttcccaccaccagactttgccgtggaagcctttcagcacgctgtcagtggagacttcatgcttaaccagtacaccaagacatttggttacccaccactgacgaagatcctggcaagtttctttggggagctgctgggtcaggagatagacccgctcaggaatgtgctggtgactgttggtggctatggggccctgttcacagccttccaggccctggtggacgaaggagacgaggtcatcatcatcgaacccttttttgactgctacgagcccatgacaatgatggcagggggtcgtcctgtgtttgtgtccctgaagccgggtcccatccagaatggagaactgggttccagcagcaactggcagctggaccccatggagctggccggcaaattcacatcacgcaccaaagccctggtcctcaacacccccaacaaccccctgggcaaggtgttctccagggaagagctggagctggtggccagcctttgccagcagcatgacgtggtgtgtatcactgatgaagtctaccagtggatggtctacgacgggcaccagcacatcagcattgccagcctccctggcatgtgggaacggaccctgaccatcggcagcgccggcaagaccttcagcgccactggctggaaggtgggctgggtcctgggtccagatcacatcatgaagcacctgcggaccgtgcaccagaactccgtcttccactgccccacgcagagccaggctgcagtagccgagagctttgaacgggagcagctgctcttccgccaacccagcagctactttgtgcagttcccgcaggccatgcagcgctgccgtgaccacatgatacgtagcctacagtcagtgggcctgaagcccatcatccctcagggcagctacttcctcatcacagacatctcagacttcaagaggaagatgcctgacttgcctggagctgtggatgagccctatgacagacgcttcgtcaagtggatgatcaagaacaaggtgggctgggcctctgccaggcagccatgtatggtttcacaggttgtgtgctgctcaagggtgcccaggcaagaggctcctgggctagatcttagtccagcctctgccgtcaaccttggggcagggttgtatccacttcagagaaagtacggttgca

SEQ ID NO: 356646 - DNA, 638 bp, Homo sapiens
accacagtgcttctgatgtggcacactatagaagatggagacagggatggccaccaagcccttgttcttgatcatccacctgacgaagcgtctgtcatagggatgaagccacgctccaggccatggacgagaagctgcggaagtggaaggtggaactctagccctgaagtcacgccttggccctgacatccccacatgcccgcagagatcctctttgagtgtctgtctttgtccaggtttcagacatttctaggttggggaagatgctattgggaaacctcttctccgtgacacagaatgttctgggtgggagccgcccttcttcatcttagagaaccaagtgcctcctgtctgaaaggtgagggtggcctgacctgggcctctccctgcccctccataggtgggtttgtagggtcttgtgttgcttctggtctctccaggcttggctgagacggacggtagacttccaccatgtaccgatcacatcccagctctgcatggcccctgctaaggctcaggtataacctcaccttccctggctcatcttggccttggggagttgcctttaggcttgagtcctcaagcctctccttttcgtccataataaaatgtttaagttattaagatccttaatgacg

SEQ ID NO: 356647 - DNA, 185 bp, Homo sapiens
tgcaaactctatctcttccccctcctgggagcagacaggatggcgctgtggcctgaaagcagctgtccctcctgtgtgcaagctcggactgctgcacccagacagattccatctctgaccttccacttgttcgtctccagctcgccatggccaaacagctgcaggcccgaaggctagacgggatc

SEQ ID NO: 356648 - DNA, 1037 bp, Homo sapiens
  misc_feature (1)..(1): n is a, c, g, or t
ngggattacaggcatgcgccaccacacccggccaatttttgtatttttggtagagacggggtttagccatgttggccaggctggtcttgaactcctgacctcaggtgatccacccgtctcagcctcccaaagtgctgggattataggcgtgagccaccgcacctggccttgttcctctgactttgatgcagctctaggtgctggattggagctaactctccttccccgcctggtcgtgggaacctctctgtcccctccggagccaaggcctgctgggccacgaggccgtgttgagacatgtccttcctcctccccagggcttggtggccatccctgtctccatcttctatagtgtgccacatcagaagcactttgaccactatatccgcttctgttttgtgaaggtaaagggcagggctgggggaggaaagacctcacagagcttcccaaggccggctgggcacatggggagagtgtaggactaatctgtgctggcgcaggatgaagccacgctccaggccatggacgagaagctgcggaagtggaaggtggaactctagccctgaagtcacgccttggccctgacatccccacatgcccgcagagatcctctttgagtgtctgtctttgtccaggtttcagacatttctaggttggggaagatgctattgggaaacctcttctccgtgacacagaatgttctgggtgggagccgcccttcttcatcttagagaaccaagtgcctcctgtctgaaaggtgagggtggcctgacctgggcctctccctgcccctccataggtgggtttgtagggtcttgtgttgcttctggtctctccaggcttggctgagacggacggtagacttccaccatgtaccgatcacatcccagctctgcatggcccctgctaaggctcaggtataacctcaccttccctggctcatcttggccttggggagttgcctttaggcttgagtcctcaagcctctccttttcgtccataataaaatgtttaagttattaagatccttaatgacg

SEQ ID NO: 356649 - DNA, 798 bp, Homo sapiens
aggtggctgagaagaatgttggatccccagctccacggcccaccagccatctgggactggcaaacccacaggaacggaaggttcctcagggaccacaaagcccatgtgaggtccctgctgctgaagggattctgaggacaggaggagccaaattacctatccagggtcacccagccaagctcgccatggccaaacagctgcaggcccgaaggctagacgggatcgactacaacccctgggtggagtttgtgaaactggccagtgagcatgacgtcgtgaacttgggccagggcttcccggatttcccaccaccagactttgccgtggaagcctttcagcacgctgtcagtggagacttcatgcttaaccagtacaccaagacatttggttacccaccactgacgaagatcctggcaagtttctttggggagctgctgggtcaggagatagacccgctcaggaatgtgctggtgactgttggtggctatggggccctgttcacagccttccaggccctggtggacgaaggagacgaggtcatcatcatcgaacccttttttgactgctacgagcccatgacaatgatggcagggggtcgtcctgtgtttgtgtccctgaagccgggtcccatccagaatggagaactgggttccagcagcaactggcagctggaccccatggagctggccggcaaattcacatcacgcaccaaagccctggtcctcaacacccccaacaaccccctgggcaaggtgtctccgggaaaagctcggaagttggtggcaaccatttgcacag

SEQ ID NO: 356650 - DNA, 1840 bp, Homo sapiens
cacaggggtgcctgggagggggctcgcgcgccgcggagccggcgagaaggtggtgccccggagactccgggcactggggagcccatagctcgccatggccaaacagctgcaggcccgaaggctagacgggatcgactacaacccctgggtggagtttgtgaaactggccagtgagcatgacgtcgtgaacttgggccagggcttcccggatttcccaccaccagactttgccgtggaagcctttcagcacgctgtcagtggagacttcatgcttaaccagtacaccaagacatttggttacccaccactgacgaagatcctggcaagtttctttggggagctgctgggtcaggagatagacccgctcaggaatgtgctggtgactgttggtggctatggggccctgttcacagccttccaggccctggtggacgaaggagacgaggtcatcatcatcgaacccttttttgactgctacgagcccatgacaatgatggcagggggtcgtcctgtgtttgtgtccctgaagccgggtcccatccagaatggagaactgggttccagcagcaactggcagctggaccccatggagctggccggcaaattcacatcacgcaccaaagccctggtcctcaacacccccaacaaccccctgggcaaggtgttctccagggaagagctggagctggtggccagcctttgccagcagcatgacgtggtgtgtatcactgatgaagtctaccagtggatggtctacgacgggcaccagcacatcagcattgccagcctccctggcatgtgggaacggaccctgaccatcggcagcgccggcaagaccttcagcgccactggctggaaggtgggctgggtcctgggtccagatcacatcatgaagcacctgcggaccgtgcaccagaactccgtcttccactgccccacgcagagccaggctgcagtagccgagagctttgaacgggagcagctgctcttccgccaacccagcagctactttgtgcagttcccgcaggccatgcagcgctgccgtgaccacatgatacgtagcctacagtcagtgggcctgaagcccatcatccctcagggcagctacttcctcatcacagacatctcagacttcaagaggaagatgcctgacttgcctggagctgtggatgagccctatgacagacgcttcgtcaagtggatgatcaagaacaagggcttggtggccatccctgtctccatcttctatagtgtgccacatcagaagcactttgaccactatatccgcttctgttttgtgaaggatgaagccacgctccaggccatggacgagaagctgcggaagtggaaggtggaactctagccctgaagtcacgccttggccctgacatccccacatgcccgcagagatcctctttgagtgtctgtctttgtccaggtttcagacatttctaggttggggaagatgctattgggaaacctcttctccgtgacacagaatgttctgggtgggagccgcccttcttcatcttagagaaccaagtgcctcctgtctgaaaggtgagggtggcctgacctgggcctctccctgcccctccataggtgggtttgtagggtcttgtgttgcttctggtctctccaggcttggctgagacggacggtagacttccaccatgtaccgatcacatcccagctctgcatggcccctgctaaggctcaggtataacctcaccttccctggctcatcttggccttggggagttgcctttaggcttgagtcctcaagcctctccttttcgtccataataaaatgtttaagttattaagatccttaatgacg

SEQ ID NO: 356651 - DNA, 805 bp, Homo sapiens
cacaggggtgcctgggagggggctcgcgcgccgcggagccggcgagaaggtggtgccccggagactccgggcactggggagcccatagctcgccatggccaaacagctgcaggcccgaaggctagacgggatcgactacaacccctgggtggagtttgtgaaactggccagtgagcatgacgtcgtgaacttgggccagggcttcccggatttcccaccaccagactttgccgtggaagcctttcagcacgctgtcagtggagacttcatgcttaaccagtacaccaagacatttggttacccaccactgacgaagatcctggcaagtttctttggggagctgctgggtcaggagatagacccgctcaggaatgtgctggtgactgttggtggctatggggccctgttcacagccttccaggccctggtggacgaaggagacgaggtcatcatcatcgaacccttttttgactgctacgaccgcccttcttcatcttagagaaccaagtgcctcctgtctgaaaggtgagggtggcctgacctgggcctctccctgcccctccataggtgggtttgtagggtcttgtgttgcttctggtctctccaggcttggctgagacggacggtagacttccaccatgtaccgatcacatcccagctctgcatggcccctgctaaggctcaggtataacctcaccttccctggctcatcttggccttggggagttgcctttaggcttgagtcctcaagcctctccttttcgtccataataaaatgtttaagttattaagatccttaatgacg

SEQ ID NO: 356652 - DNA, 589 bp, Homo sapiens
attaaacaatgggcaaattattggaatagacctttttccagagggcatacaggtggtcagtaaccacatggaaagctgctcaaaatcagtacttatcagggaaaagcaaatcaaaaccccttcaaatctgctaagcactaggatcatcagagtcaataaaatacagaaaataacaagtgttgagggtttggagaaatgggagacttaggacaccgccattgagactgtaaaacggtggcaaccattttggaaaacattctggcagtttttcaaaagattaagcatttatgtgacccagaaatttcactccctaggtatacctagaagaaatgaggctgggcgcagtgtctcacgtctgtaatcctagcactttgggaggccgagatgggcagatcacctgaggtcaggagttcaagaccagcctggccaacatggtgaaactccatctctactaaaaatacaaaaattagccaggcgtggtggcacacacctgtaatcccaactacttgggaggctgaggcaggagaagcgcttgaacctgggaggcggaggttgctgtgagccgaaatcttgccgcagcactccagcc

SEQ ID NO: 356653 - DNA, 1356 bp, Homo sapiens
agtgatgtcgagcgtcgagctcccaaaaccgagctggtgaggggctgcaggtggcggcgcagtctcggtaggcggtatgagtttggctgggggccgggcaccccggaagaccgctgggaaccggctttctgggcttttggaggcagaggaggaagatgagttctaccagacgacttatgggggtttcacagaggaatccggagatgatgagtatcaaggggaccagtcagacacagaggacgaagtggactctgactttgacattgatgaaggggatgaaccatccagtgatggagaagcagaagagccaagaaggaagcgccgagtagtcaccaaggcctataaggaacctctcaagagcttaaggcctcgaaaggtcaacaccccggctggtagctctcagaaggcgcgagaagagaaggcactactgccattagaactacaagatgacggctctgacagtcggaagtctatgcgtcagtctacagctgagcatacacgacaaacgttccttcgggtacaggagaggcagggccagtcaagacggcgaaaggggccccactgtgagcggccactaacccaggaggaactgctccgggaggccaagatcacagaagagcttaatttacggtcactggagacatatgagcggctcgaggctgataaaaagaagcaggttcataagaagcggaagtgccccgggcccataatcacctatcattcagtgacagtgccacttgttggggagccaggccccaaggaagagaacgttgacatagaaggacttgatcctgctccctcggtgtctgcattgactcctcatgctgggactggacccgtcaacccccctgctcgctgctcacgtaccttcatcacttttagtgatgatgcaactttcgaggaatggttcccccaagggcggcccccaaaagtccctgttcgtgaggtctgtccagtgacccatcgtccagccctataccgggaccctgttacagacataccctatgccactgctcgagccttcaagatcattcgtgaggcttacaagaagtacattactgcccatggactgccgcccactgcctcagccctgggccccggcccgccacctcctgagcccctccctggctctgggccccgagccttgcgccagaaaattgtcattaaatgaagagatgtctagtcctcagaaacttctttcctgccctgattggggctcttgctgttccgtttcttctccctgcttctcccctttgtcatctctgatctttgcctaatctgtttctttttccttttcccctagttcttacaggtttcgttgtgttttttaatctaataaaatagaaagatcccttt

SEQ ID NO: 356654 - DNA, 613 bp, Homo sapiens
gtgtctagccgatcccttctttggtcaggacatagaaggcacttgatcctgctccctcggtgtctgcattgactcctcatgctgggactggacccgtcaacccccctgctcgctgctcacgtaccttcatcacttttagtgatgatgcaactttcgaggaatggttcccccaagggcggcccccaaaagtccctgttcgtgaggtctgtccagtgacccatcgtccagccctataccgggaccctgttacagacataccctatgccactgctcgagccttcaagatcattcgtgaggcttacaagaagtacattactgcccatggactgccgcccactgcctcagccctgggccccggcccgccacctcctgagcccctccctggctctgggccccgagccttgcgccagaaaattgtcattaaatgaagagatgtctagtcctcagaaacttctttcctgccctgattggggctcttgctgttccgtttcttctccctgcttctcccctttgtcatctctgatctttgcctaatctgtttctttttccttttcccctagttcttacaggtttcgttgtgttttttaatctaataaaatagaaagatcccttt

SEQ ID NO: 356655 - DNA, 3609 bp, Homo sapiens
  misc_feature (1636)..(1636): n is a, c, g, or t
aaaaaaaaaggtctttagtttcaagggtttaagttaaataaggtgaaacaaatttaaagaaaatgtcttcctttttttaaaaaaacttctaaaagaggatattggttaaattgacagtttattatttctctggtttagtagtgactgttctttaaaaaaaatttaaaaaaactttattgagataatttatgtattaacctattttaaatgtacagttcaatgatttttagtaaatttaattgtgactcttgagtcaaattttactactttttagaattcctctgaaggatagatcaaagattaggaaacatctaaggtcagttagttgaaatttctttcctgtggcttcgtaaccctattgggatttctcctgtgtccttgagttctcactagggtggggctcactttgggctcactttggctcacattgagccatggctttgtcatgatttttttgtgaaactcagtgcttcctaagatgaaaatgtgttcatgctaagactggtttcttccttagcactttgtctggcttagtggagtttgatggctattacctggagagcgatccctgcctggtgtgtaataacccggaagtaccgttctgttatatcaagctgtcttccattaaagtggacacgcggtacaccaccacccagcaggttgtgaagctcattggcagtcacaccatcagcaaagtgacagtgaaaatcggggatctgaaacggaccaagatggtgcggaccatcaacctgtattataacaaccgaaccgtgcaggccatcgtggagttgaaaaacaagccagctcgctggcacaaagccaagaaggttcagctgacccctggacagacagaggtgaagattgacctgccgttgcccattgtggcctccaatctgatgattgagtttgcagacttctatgaaaactaccaggcctccacagagaccctgcagtgccctcgctgtagtgcctcggtccctgccaacccaggagtctgtggcaactgtggagagaatgtgtaccagtgtcacaaatgcagatccatcaactacgatgaaaaggatcccttcctctgcaatgcctgtggcttctgtaaatatgcccgcttcgacttcatgctctatgccaagccttgctgtgcagtggatcccattgagaatgaagaagaccggaagaaggctgtatccaacatcaatacacttttggacaaagctgatcgagtgtatcatcagctgatgggacaccggccacagctggagaacctgctctgcaaagtgaatgaggcagctccagaaaagccacaggtagtcccacgctgcaaagggcatttggataagggcttgggtcttgatcagaagactgcctcctaggtgagatcaccttaggtggggagcctgacagcttacctcttggggttgcaggatgactcaggaacagcagggggcatcagctccacttctgccagtgtgaatcgttacatcctgcagttggctcaggagtattgtggagactgcaagaactcttttgatgaactctccaaaatcatccaggtagagagcggggagcagcttttgggtgtgttttgtccaagtgttactggtgttgttttcacagcagtcctgctgctctctcatcnagcagtccaggtcttggtgttgtccctgcccaatctagctgaaaaggcaggcagatggctgcaccaaacggcatctcccccaccgtgatttatggcgctggtcagaatgctgagttcatgctagataactgaacatactggtgatgggaaggtaacacagataagggttttttttagccattaacaacccatctcttagtagaggggttactggtcttaaaaaatttgatgccaagattctgttccctcttctgataacgccgtgtttgcaggctgtagggtaagggcataccaactgcaatcaaccagggtgggccttgtgtcagttgcaatgtcacagacctaatctccatgagatgggaggctggccatagacagaggtacctcatataaggagagcatccagtttaccttccccctcaaccccaaattgctggagtgccatctttgctacacgtgtattagcttctgacctttgtctttgttacatgggagttaagagcataagcctgccatctgagtctgagttctgactctgccacttatcttggtcaagccactttctccaagcttcagtttccttctctgtaaaatggagataaagcatctaaccagttgggttattgagaagattaagttatataatgcatgtaaagttttttctaaagcaaaactaattttctaattaacatcctcttcttattttaattgctaattcccattattgttgcctttttgttcttagaaagtctttgcttcgcgcaaagagttgttggaatatgacctacagcagagggaagcagccactaaatcatcccggacctccgtgcagcccacattcactgccagccagtaccgtgccttatccgtcctgggctgtggccacacatcctccaccaagtgctatggctgcgcctcggctgtcacagaacattgtatcacactacttcgggccctggccaccaacccagccttgaggcacatccttgtctcccagggccttatccgggagctctttgattataatcttcgccgaggggctgcggccatgcgggaggaggtccgccagctcatgtgcctcctaactcggtcagtacctacaccatggttatgggcctagtggttcctactgacactggcagccatgccaggagcgttagagagtgcacagaatagtgcttctgaccacccagcaagttaggtagcttataacaaaggaaagatggaaagagacacagggtgtaggtgagcgagcttggggagcattgaaacccaggtttccttgtaaatggcatgattggcttgtgcttttttggttccagtacagtgtcttgaggaaactctccctgaggccttgtgagggaagggaagggagacacttgaactcgagaaagactcacatgaaagaagcagagcagtggggcctggagattaagagcttggactctggattggaaaggctcagtttcagtatctgataccttgtactatacgccttggacagattccttaatttctctgagtctgtgttttcctcatctgaaaaatactgacagtaggctgggcacagtggctcttgcccgtaatcccagcactttggcacctgaggctggcagatcacttgaggtcaggagttcaagaccagcctggccaacatggtaaaacctcgtctccattaaaaatacaaaaatagggccaggtgctgtggctcatgcctgtaatcccagcactttggcaggccaaggcgggtggatcacctgaggtcgggagttcaagaccagcctgaccaacatggagaaaccccatctccactgaaaatacaaaattagacaggtgtagtggtgcatgcctgtaatctcagctacttgggaggctgagacaggagaatcgcttgaacctgggaggcggagattgtggtgagtcgaaatcgtgccattgcactccagcctgggcaacaagcgagactccgtctc

SEQ ID NO: 356656 - DNA, 715 bp, Homo sapiens
tgccttccactcctaggtcaggttttgacagcaccactttattactttgtttaagctgttagaaaatttcagaacatcagacacaccctattcaaatgtgagaacaaaaacaccttccagcagtgcctgcttctggaacaggactcctcctgcggaacagggttttgctcaatgactacctccccggtcatgctgctgtccagtgagcagccgggccagagcttgtcggaccgcagtgtgttctctgctagatgcggcagctgtgactcagggggaatgggggctgtatgcctgctcctgacacacctctgcccgttgtgctttgcaggtcttttatcagaaatcaccgatccagagagcttcctgaaggacctgttgaactcagtcccctgaccaccacacagcagctgcggcggcgaagacgaagctggcttgccttccaccctctgttctccctccttgtgcattaagttccctccgcgggatgctgcattgttaccccgccctcccctctctcatttttcttggtgtggcttggggtttttaggcttcctgttttatctcgtgtgtgtggtgcaccagctatgaggttgtctgtaacccaagccatcaaagggcctgtacatacctaggagccatgagttgtcccggccagcttcatacttgagtgtgcacatcttgagaaataaacaagtgacttaacacacattgaaaa

SEQ ID NO: 356657 - DNA, 1533 bp, Homo sapiens
cactgagtctggtgtggtcatcatcatcatcatcattgcaacttaggacgcatgaggacaagaagcagcgctcatctggaagaggctgttctaacgaaggcgggaggatcctagatcagaagaagacaaaccggaagagggagcctaggaaaggaaccacatgcacatttagtgcaaaccatgtaaacataacataacaagactatgtggagcaagggggagtcaggctgtggacccaccagggaatcttgattcatgtttttggccccatcactcactagcttgctgactttgggcaagtcacttcacttttctgggcctctggagttactagcacagttccatgttggggagattgtgaacgtccctgatatatggtgctcaggaaccagtagttgcttggaattgtattagagctggggtaggagctagacatggggccagggaagaagggaagatgccgcgaagaagggcctggaaggggacgaagggcgtggattatcagaggaagtgggagtagtcggcaaggatgggtggggagtgttgagtcatccaagcgttcagcaaatgtcacaagacaacgacaaattgagcaaattcttcctgctcttgctgccgggtcctgcttccaccctgcttttattttatcatgccgcttttcttctagaacccgagcaacttcccgagaagagaagaacctccaaggctttctggaacagcccaaggagaagtgggtggagagtgcctttgaagtggacgggccctactatttcacagtcttggcccttcacatcctgccccctgagcagtggagagccacacgtgtggaaatcttgcggaggctgttggtgacctcgcaggctcgggcagtggctccaggtggagccaccaggctgacagataaggcagtgaaggactattccgcttaccgttcttcccttctcttttgggccctcgtcgatctcatttacaacatgtttaagaaggtgcctaccagtaacacagagggaggctggtcctgctctctcgctgagtacatccgccacaacgacatgcccatctacgaagctgccgacaaagccctgaaaaccttccaggaggagttcatgccagtggagaccttctcagagttcctcgatgtggccggtcttttatcagaaatcaccgatccagagagcttcctgaaggacctgttgaactcagtcccctgaccaccacacagcagctgcggcggcgaagacgaagctggcttgccttccaccctctgttctccctccttgtgcattaagttccctccgcgggatgctgcattgttaccccgccctcccctctctcatttttcttggtgtggcttggggtttttaggcttcctgttttatctcgtgtgtgtggtgcaccagctatgaggttgtctgtaacccaagccatcaaagggcctgtacatacctaggagccatgagttgtcccggccagcttcatacttgagtgtgcacatcttgagaaataaacaagtgacttaacacacattgaaaa

SEQ ID NO: 356658 - DNA, 12589 bp, Homo sapiens
gtgacctagaggttccgccacaagcgcgatctcaaaggtccaggtctctttggatgagcatttttctaagatggctgctgagactgatcctcataagtcgtctgagattaccaagaacctacttccagccacgctgcaactcattgacacctatgcatcgttcaccagagcctatttgctgcaaaactttaatgaagagggaacaactgagaaaccttccaaggagaaactgcaaggctttgctgctgttttggctattggctctagcaggtgcaaggcaaatactctgggtccgacactggttcagaatttgccatcgtcagtgcagactgtgtgtgagtcctggaacaacatcaataccaatgaatttcccaatattggatcctggcgcaatgcctttgccaatgacaccatcccttcagagagttatattagtgcagtgcaggctgcacacctggggactctctgtagccaaagtctgcccctggctgcttccctgaagcataccctcctctcactggtcaggttgactggagatcttattgtttggtcagatgagatgaacccaccacaggtaattcggacactgctacctcttcttttggaatcaagcactgagagtgttgccgagatcagtagcaactccctggaacgcatcttgggccctgctgagtctgatgagttcttggctcgtgtttatgagaagctgatcactggttgttacaacattctggccaatcatgcagatcctaacagtggactggatgaatccatcctggaggaatgtctccagtacttggaaaagcagctggaaagtagccaggctcgtaaagctatggaggagtttttctctgacagtggagaacttgtacagatcatgatggcaacagccaatgagaacctctctgctaaattctgtaaccgagttttgaaattcttcaccaaactcttccagctgactgagaagagccctaacccgagcctgttgcatctctgtggctccctggcacaactggcctgtgtggaacctgtgcgcctgcaggcctggctcacccgcatgactacatcgcccccaaaagattctgatcagctggatgtaattcaggagaaccggcagctgctgcagttactgaccacatacattgttcgggaaaacagccaagttggggaaggtgtgtgtgctgttcttctgggcaccctgactcccatggcaacagagatgctggccaacggtgatgggactggcttccctgaacttatggttgtgatggccactctggccagtgcaggtcaaggtgctggtcaccttcagcttcataatgctgctgtggattggctgagcagatgcaagaaatacctgtcacagaagaatgtagttgaaaaactgaatgccaatgtaatgcatggaaagcatgtgatgatcttggagtgcacatgccatatcatgtcttacttggctgatgtcacgaatgccctgagccagagtaatggtcaaggcccaagtcatctctcagtggatggggaagagcgggccattgaagtagactcagactgggtggaggagttggcggtggaagaggaagattcccaggctgaggattcagatgaagattctctttgcaataaactctgcacttttacgatcacacagaaagaattcatgaaccagcattggtaccactgtcacacctgtaaaatggtggatggcgtgggtgtctgcacagtgtgtgctaaggtgtgccacaaggatcatgagatttcctatgccaagtatggatccttcttctgtgactgtggagccaaggaagatggcagctgtttggctctggtgaagagaactcctagcagtggcatgagctctaccatgaaggagtcggcatttcagagtgaacccaggatttcagagagtctagtgcgtcatgccagcacctcctcgccagctgacaaagccaaggttaccatcagtgatggaaaggttgctgacgaagagaagcccaagaagagcagcctctgccgcacagtagagggctgccgggaggaattacagaaccaggccaatttctccttcgctcctctcgtgttagacatgcttaatttccttatggatgccattcagaccaacttccagcaagcttcagccgtcgggagcagcagccgtgctcagcaagccctcagtgagctacacactgtggagaaggcagtggagatgacagaccagctgatggttcccaccttagggtcccaggaaggtgcctttgagaatgtgcggatgaattacagtggagaccagggccagaccatccggcagctgatcagtgctcatgtgctcaggcgggtggctatgtgtgtgctctcctctccccatgggcgccgccaacatttggctgtcagccatgagaagggcaagatcaccgttctgcagctctctgcactcctgaagcaagcagattccagcaaaaggaagttaactctgacccgcttggcttctgccccagttccttttactgtgttgagcctcacaggaaatccctgcaaggaagactacttggcggtttgtgggctaaaggactgtcatgtgctcacctttagtagctcaggctctgtttcggatcacttggttttgcaccctcagttggcaacggggaacttcatcatcaaagccgtgtggttacctggttcacagaccgagttagcaattgtcaccgcagactttgttaagatttatgacctgtgtgttgatgccttgagtccaaccttctattttctcctgccaagctcaaagataagagatgttaccttccttttcaatgaggagggaaagaacatcattgttataatgtcttcggctgggtacatctatactcagcttatggaagaggccagcagtgcccagcagggacccttctatgtcactaatgtgttggaaatcaatcatgaggacctgaaggacagtaacagccaggtggcgggcggtggtgtgtccgtgtactactcccacgtgttgcagatgttgttcttcagctattgtcaaggcaaatcattcgcagccaccatcagcaggacaaccctggaggtgttgcaactcttccccatcaacatcaaaagttccaatggtggcagtaagacttctcctgctctttgccagtggtctgaggtgatgaaccaccctggcttggtgtgctgtgtccagcaaactacaggggtgccgctggtagttatggtgaaaccagacacttttcttatccaggagattaagactcttcctgctaaagcgaagatccaagacatggttgctattaggcacacggcctgcaatgagcagcagcggacaacaatgattctgctgtgtgaggatggcagcctgcgcatttacatggccaacgtggagaacacctcctactggctgcagccatccctgcagcccagcagtgtcatcagcatcatgaagcctgttcgaaagcgcaaaacagctacaatcacaacccgcacgtctagccaggtgactttccccattgacttttttgaacacaaccagcagctgacagatgtggagtttggtggtaacgacctcctacaggtctataatgcacaacagataaaacaccggctgaattccactggcatgtatgtggccaacaccaagcccggaggcttcaccattgagattagtaacaacaatagcactatggtgatgacaggcatgcggatccagattgggactcaagcaatagaacgggccccgtcatatatcgagatcttcggcagaactatgcagctcaacctgagtcgctcacgctggtttgacttccccttcaccagagaagaagccctgcaggctgataagaagctgaacctcttcattggggcctcggtggatccagcaggtgtcaccatgatagatgctgtaaaaatttatggcaagactaaggagcagtttggctggcctgatgagcccccagaagaattcccttctgcctctgtcagcaacatctgcccttcaaatctgaaccagagcaacggcactggagatagcgactcagctgcccccactacgaccagtggaactgtcctggagaggctggttgtgagttctttagaagccctggaaagctgctttgccgttggcccaatcatcgagaaggagagaaacaagaatgctgctcaggagctggccactttgctgttgtccctgccagcacctgccagtgtccagcagcagtccaagagccttctggccagcctgcacaccagccgctcggcctaccacagccacaaggatcaggccttgctgagcaaagctgtgcagtgtctcaacacatctagcaaagagggcaaggatttggaccctgaggtgttccagaggctagtgatcacagctcgctccattgccatcatgcgccccaacaaccttgtccactttacggagtcaaagctgccccagatggaaacagactgtttttttcctagatgtgcctgctggagtctagggatagttggcatattgattggggccccacttgaaactccctccccaggcaagcttccttgacctgagttaaccttaaaacaaattaaattccatctcagatttaccatcgttgataattttctttctcctgcttagaaggaatggatgaagggaaggaaccgcagaagcagttggaaggagattgctgtagtttcatcacccagcttgtgaaccacttctggaaactccatgcatccaaacccaagaatgccttcttggcacctgcctgccttccaggactaactcatattgaagctactgtcaatgctctggtggacatcatccatggctactgtacctgtgagctggattgtattaacacagcatccaagatctacatgcagatgctcttgtgtcctgatcctgctgtgagcttctcttgtaaacaagctctaattcgagtcctaaggcccaggaacaaacggagacatgtgactttaccctcttcccctcgaagcaacactccaatgggagacaaggatgatgatgacgatgatgatgcagatgagaaaatgcagtcatcagggatcccgaatggtggtcacatccgtcaggaaagccaggaacagagtgaggtggaccatggagattttgagatggtgtctgagtcgatggtcctggagacagctgaaaatgtcaacaatggcaacccctctcccctggaggccctgctggcaggcgcagagggcttcccccccatgctggacatcccacctgatgcagatgacgagaccatggttgaactagccattgccctgagcctgcagcaggaccaacaagctccagcctcagacgacgagggcagtacagcagcgacagatggttctacccttcggacctctcctgctgaccacggtggtagtgtgggctcggagagcgggggcagtgcagtggactcagtggctggcgagcacagtgtatctggccggagcagtgcttatggcgatgctacagctgaggggcatccggctggaccaggaagtgtcagctcaagcactggagccatcagcaccaccactgggcaccaggagggagatggctccgagggagaaggagaaggagaaactgaaggagatgtccacactagcaacaggctgcacatggtccgtctaatgctgttggagagattactgcagaccctgcctcaattacgaaacgttggcggtgtccgggccatcccatacatgcaggtcattctaatgctcactacagatctggatggagaagatgagaaagacaagggggccctagacaacctgctctcccagcttattgctgagttgggtatggataaaaaggatgtctccaagaagaatgagcgcagcgccctgaatgaagtccatctggtagtaatgagactcctgagtgtcttcatgtcccgcaccaaatctggatccaagtcttccatatgtgagtcatcttccctcatctccagtgccacagcagcagctctactgagctctggggctgtggactactgcctgcacgtgctcaaatcactgctggaatattggaagagccaacagaatgacgaggagcctgtggctaccagccagttgctgaaaccacatactacctcctccccacctgacatgagcccattctttctccgccagtatgtgaagggtcatgctgctgatgtgtttgaggcctatactcagcttctaacagaaatggtactgaggcttccttaccaaatcaaaaagattactgacaccaattctcgaatcccacctcctgtctttgaccactcgtggttttactttctctccgagtacctcatgatccagcagactccatttgtgcgccgtcaagtccgcaaacttctgctcttcatctgtggatccaaagagaagtaccgccagctccgggatttgcacaccctggactctcacgtgcgtgggatcaagaagctgctagaagagcaggggatattcctccgggcaagtgtggttacagccagctcaggctccgccttgcaatatgacacactcatcagcctgatggagcacctgaaagcctgtgcagagattgccgcccagcgaaccatcaactggcagaaattctgcatcaaagatgactccgtcctgtacttcctcctccaagtcagtttccttgtggatgagggcgtgtccccagtgctgctgcaactgctctcctgtgctctctgcggcagcaaggtgctcgctgcactggcagcctcttcgggatcctccagtgcttcttcctcctcagcccctgtggctgccagttctggacaagccacaacacagtccaagtcttccactaaaaagagcaagaaagaagaaaaagaaaaggagaaagatggtgagacctctggcagccaggaggaccagctgtgcacagctctggtgaaccagctgaacaaatttgccgataaggaaaccctgatccagttcctgcgttgtttcctgttagagtccaattcttcctcggtgcgctggcaggcccactgtctgacactgcacatctacagaaattccagcaaatctcaacaggagctcctgctagatctgatgtggtccatctggccagaactcccagcctatggtcgtaaggctgcccagtttgtggacctactaggatatttctccctgaaaactccacaaacagagaagaagttgaaggagtattcacagaaggctgtggagattctgcggactcaaaaccatattcttaccaaccaccccaactcgaacatttataacactttgtctggcttagtggagtttgatggctattacctggagagcgatccctgcctggtgtgtaataacccggaagtaccgttctgttatatcaagctgtcttccattaaagtggacacgcggtacaccaccacccagcaggttgtgaagctcattggcagtcacaccatcagcaaagtgacagtgaaaatcggggatctgaaacggaccaagatggtgcggaccatcaacctgtattataacaaccgaaccgtgcaggccatcgtggagttgaaaaacaagccagctcgctggcacaaagccaagaaggttcagctgacccctggacagacagaggtgaagattgacctgccgttgcccattgtggcctccaatctgatgattgagtttgcagacttctatgaaaactaccaggcctccacagagaccctgcagtgccctcgctgtagtgcctcggtccctgccaacccaggagtctgtggcaactgtggagagaatgtgtaccagtgtcacaaatgcagatccatcaactacgatgaaaaggatcccttcctctgcaatgcctgtggcttctgtaaatatgcccgcttcgacttcatgctctatgccaagccttgctgtgcagtggatcccattgagaatgaagaagaccggaagaaggctgtatccaacatcaatacacttttggacaaagctgatcgagtgtatcatcagctgatgggacaccggccacagctggagaacctgctctgcaaagtgaatgaggcagctccagaaaagccacaggatgactcaggaacagcagggggcatcagctccacttctgccagtgtgaatcgttacatcctgcagttggctcaggagtattgtggagactgcaagaactcttttgatgaactctccaaaatcatccagaaagtctttgcttcgcgcaaagagttgttggaatatgacctacagcagagggaagcagccactaaatcatcccggacctccgtgcagcccacattcactgccagccagtaccgtgccttatccgtcctgggctgtggccacacatcctccaccaagtgctatggctgcgcctcggctgtcacagaacattgtatcacactacttcgggccctggccaccaacccagccttgaggcacatccttgtctcccagggccttatccgggagctctttgattataatcttcgccgaggggctgcggccatgcgggaggaggtccgccagctcatgtgcctcctaactcgagacaacccagaagccacccaacagatgaatgacctgattattggcaaggtctccacagccctgaagggccactgggccaaccccgatctggcaagtagcctgcagtatgaaatgctgctgctgacggattctatctccaaggaggacagctgctgggagctccggttacgctgtgctctcagccttttcctcatggctgtgaacattaagactcctgtggtggttgaaaacattaccctcatgtgcctgaggatcttgcagaagctgataaaaccacctgctcccactagcaagaagaacaaggatgtccccgtcgaggccctcaccacggtgaagccatactgcaatgagatccatgcccaggctcaactgtggctcaagagagaccccaaggcatcctatgatgcctggaagaagtgtcttcctatcagagggatagatggcaatgggaaagcccccagcaaatcagagctccgccatctctatttgactgagaagtatgtgtggaggtggaaacagttcctgagtcgtcgggggaagaggacctcccccttggatctcaaactggggcataacaactggctgcgacaagtgcttttcactccagcaacgcaggccgcacggcaggcagcctgtaccattgtggaagctctagccaccattcccagccgcaagcagcaggtcctggacctgcttaccagttacctggatgagctgagcatagctggggagtgtgcagctgagtacctggctctctaccagaagctcatcacttctgcgcactggaaagtctacttggcagctcggggagtcctaccctatgtgggcaacctcatcaccaaggaaatagctcgtctgctggccctggaggaggctaccctgagtaccgatctgcagcagggttatgcccttaaaagtctcacaggccttctctcctcctttgttgaggtggaatccatcaaaagacattttaaaagtcgcttggtgggtactgtgctgaatggatacctgtgcttgcggaagctggtggtgcagaggaccaagctgatcgatgagacgcaggacatgctgctggagatgctggaggacatgaccacaggtacagaatcagaaaccaaggccttcatggctgtgtgcattgagacagccaagcgctacaatctggatgactaccggaccccggtgttcatcttcgagaggctctgcagcatcatttatcctgaggagaatgaagtcactgagttctttgtgaccctggagaaggatccccaacaagaagacttcttacagggcaggatgcctgggaacccgtatagcagcaatgagccaggcatcgggccgctgatgagggatataaagaacaagatttgccaggactgtgacttagtggccctcctggaagatgacagtggcatggagcttctagtgaacaataaaatcattagtttggaccttcctgtggctgaagtttacaagaaagtctggtgtaccacgaatgagggagagcccatgaggattgtttatcgtatgcgggggctgctgggcgatgccacagaggagttcattgagtccctggactctactacagatgaagaagaagatgaagaagaagtgtataaaatggctggtgtgatggcccagtgtgggggcctggaatgcatgcttaacagactcgcagggatcagagatttcaagcagggacgccaccttctaacagtgctactgaaattgttcagttactgcgtgaaggtgaaagtcaaccggcagcaactggtcaaactggaaatgaacaccttgaacgtcatgctggggaccctaaacctggcccttgtagctgaacaagaaagcaaggacagtgggggtgcagctgtggctgagcaggtgcttagcatcatggagatcattctagatgagtccaatgctgagcccctgagtgaggacaagggcaacctcctcctgacaggtgacaaggatcaactggtgatgctcttggaccagatcaacagcacctttgttcgctccaaccccagtgtgctccagggcctgcttcgcatcatcccgtacctttcctttggagaggtggagaaaatgcagatcttggtggagcgattcaaaccatactgcaactttgataaatatgatgaagatcacagtggtgatgataaagtcttcctggactgcttctgtaaaatagctgctggcatcaagaacaacagcaatgggcaccagctgaaggatctgattctccagaaggggatcacccagaatgcacttgactacatgaaaaagcacatccctagcgccaagaatttggatgccgacatctggaaaaagtttttgtctcgcccagccttgccatttatcctaaggctgcttcggggcctggccatccagcaccctggcacccaggttctgattggaactgattccatcccgaacctgcataagctggagcaggtgtccagtgatgagggcattgggaccttggcagagaacctgctggaagccctgcgggaacaccctgacgtaaacaagaagattgacgcagcccgcagggagacccgggcagagaagaaacgcatggccatggcaatgaggcagaaggccctgggcaccctgggcatgacgacaaatgaaaagggccaggtcgtgaccaagacagcactcctgaagcagatggaagagctgatcgaggagcctggcctcacgtgctgcatctgcagggagggatacaagttccagcccacaaaggtcctgggcatttataccttcacgaagcgggtagccttggaggagttggagaataagccccggaaacagcagggctacagcaccgtgtcccacttcaacattgtgcactacgactgccatctggctgccgtcaggttggctcgaggccgggaagagtgggagagtgccgccctgcagaatgccaacaccaagtgcaacgggctccttccggtctggggacctcatgtccctgaatcagcttttgccacttgcttggcaagacacaacacttacctccaggaatgtacaggccagcgggagcccacgtatcagctcaacatccacgacatcaaactgctcttcctgcgcttcgccatggagcagtcgttcagcgcagacactggcgggggcggccgggagagcaacatccacctgatcccgtacatcattcacactgtgctttacgtcctgaacacaacccgagcaacttcccgagaagagaagaacctccaaggctttctggaacagcccaaggagaagtgggtggagagtgcctttgaagtggacgggccctactatttcacagtcttggcccttcacatcctgccccctgagcagtggagagccacacgtgtggaaatcttgcggaggctgttggtgacctcgcaggctcgggcagtggctccaggtggagccaccaggctgacagataaggcagtgaaggactattccgcttaccgttcttcccttctcttttgggccctcgtcgatctcatttacaacatgtttaagaaggtgcctaccagtaacacagagggaggctggtcctgctctctcgctgagtacatccgccacaacgacatgcccatctacgaagctgccgacaaagccctgaaaaccttccaggaggagttcatgccagtggagaccttctcagagttcctcgatgtggccggtcttttatcagaaatcaccgatccagagagcttcctgaaggacctgttgaactcagtcccctgaccaccacacagcagctgcggcggcgaagacgaagctggcttgccttccaccctctgttctccctccttgtgcattaagttccctccgcgggatgctgcattgttaccccgccctcccctctctcatttttcttggtgtggcttggggtttttaggcttcctgttttatctcgtgtgtgtggtgcaccagctatgaggttgtctgtaacccaagccatcaaagggcctgtacatacctaggagccatgagttgtcccggccagcttcatacttgagtgtgcacatcttgagaaataaacaagtgacttaacacacattgaaaa

SEQ ID NO: 356659 - DNA, 12908 bp, Homo sapiens
gtgacctagaggttccgccacaagcgcgatctcaaaggtccaggtctctttggatgagcatttttctaagatggctgctgagactgatcctcataagtcgtctgagattaccaagaacctacttccagccacgctgcaactcattgacacctatgcatcgttcaccagagcctatttgctgcaaaactttaatgaagagggaacaactgagaaaccttccaaggagaaactgcaaggctttgctgctgttttggctattggctctagcaggtgcaaggcaaatactctgggtccgacactggttcagaatttgccatcgtcagtgcagactgtgtgtgagtcctggaacaacatcaataccaatgaatttcccaatattggatcctggcgcaatgcctttgccaatgacaccatcccttcagagagttatattagtgcagtgcaggctgcacacctggggactctctgtagccaaagtctgcccctggctgcttccctgaagcataccctcctctcactggtcaggttgactggagatcttattgtttggtcagatgagatgaacccaccacaggtaattcggacactgctacctcttcttttggaatcaagcactgagagtgttgccgagatcagtagcaactccctggaacgcatcttgggccctgctgagtctgatgagttcttggctcgtgtttatgagaagctgatcactggttgttacaacattctggccaatcatgcagatcctaacagtggactggatgaatccatcctggaggaatgtctccagtacttggaaaagcagctggaaagtagccaggctcgtaaagctatggaggagtttttctctgacagtggagaacttgtacagatcatgatggcaacagccaatgagaacctctctgctaaattctgtaaccgagttttgaaattcttcaccaaactcttccagctgactgagaagagccctaacccgagcctgttgcatctctgtggctccctggcacaactggcctgtgtggaacctgtgcgcctgcaggcctggctcacccgcatgactacatcgcccccaaaagattctgatcagctggatgtaattcaggagaaccggcagctgctgcagttactgaccacatacattgttcgggaaaacagccaagttggggaaggtgtgtgtgctgttcttctgggcaccctgactcccatggcaacagagatgctggccaacggtgatgggactggcttccctgaacttatggttgtgatggccactctggccagtgcaggtcaaggtgctggtcaccttcagcttcataatgctgctgtggattggctgagcagatgcaagaaatacctgtcacagaagaatgtagttgaaaaactgaatgccaatgtaatgcatggaaagcatgtgatgatcttggagtgcacatgccatatcatgtcttacttggctgatgtcacgaatgccctgagccagagtaatggtcaaggcccaagtcatctctcagtggatggggaagagcgggccattgaagtagactcagactgggtggaggagttggcggtggaagaggaagattcccaggctgaggattcagatgaagattctctttgcaataaactctgcacttttacgatcacacagaaagaattcatgaaccagcattggtaccactgtcacacctgtaaaatggtggatggcgtgggtgtctgcacagtgtgtgctaaggtgtgccacaaggatcatgagatttcctatgccaagtatggatccttcttctgtgactgtggagccaaggaagatggcagctgtttggctctggtgaagagaactcctagcagtggcatgagctctaccatgaaggagtcggcatttcagagtgaacccaggatttcagagagtctagtgcgtcatgccagcacctcctcgccagctgacaaagccaaggttaccatcagtgatggaaaggttgctgacgaagagaagcccaagaagagcagcctctgccgcacagtagagggctgccgggaggaattacagaaccaggccaatttctccttcgctcctctcgtgttagacatgcttaatttccttatggatgccattcagaccaacttccagcaagcttcagccgtcgggagcagcagccgtgctcagcaagccctcagtgagctacacactgtggagaaggcagtggagatgacagaccagctgatggttcccaccttagggtcccaggaaggtgcctttgagaatgtgcggatgaattacagtggagaccagggccagaccatccggcagctgatcagtgctcatgtgctcaggcgggtggctatgtgtgtgctctcctctccccatgggcgccgccaacatttggctgtcagccatgagaagggcaagatcaccgttctgcagctctctgcactcctgaagcaagcagattccagcaaaaggaagttaactctgacccgcttggcttctgccccagttccttttactgtgttgagcctcacaggaaatccctgcaaggaagactacttggcggtttgtgggctaaaggactgtcatgtgctcacctttagtagctcaggctctgtttcggatcacttggttttgcaccctcagttggcaacggggaacttcatcatcaaagccgtgtggttacctggttcacagaccgagttagcaattgtcaccgcagactttgttaagatttatgacctgtgtgttgatgccttgagtccaaccttctattttctcctgccaagctcaaagataagagatgttaccttccttttcaatgaggagggaaagaacatcattgttataatgtcttcggctgggtacatctatactcagcttatggaagaggccagcagtgcccagcagggacccttctatgtcactaatgtgttggaaatcaatcatgaggacctgaaggacagtaacagccaggtggcgggcggtggtgtgtccgtgtactactcccacgtgttgcagatgttgttcttcagctattgtcaaggcaaatcattcgcagccaccatcagcaggacaaccctggaggtgttgcaactcttccccatcaacatcaaaagttccaatggtggcagtaagacttctcctgctctttgccagtggtctgaggtgatgaaccaccctggcttggtgtgctgtgtccagcaaactacaggggtgccgctggtagttatggtgaaaccagacacttttcttatccaggagattaagactcttcctgctaaagcgaagatccaagacatggttgctattaggcacacggcctgcaatgagcagcagcggacaacaatgattctgctgtgtgaggatggcagcctgcgcatttacatggccaacgtggagaacacctcctactggctgcagccatccctgcagcccagcagtgtcatcagcatcatgaagcctgttcgaaagcgcaaaacagctacaatcacaacccgcacgtctagccaggtgactttccccattgacttttttgaacacaaccagcagctgacagatgtggagtttggtggtaacgacctcctacaggtctataatgcacaacagataaaacaccggctgaattccactggcatgtatgtggccaacaccaagcccggaggcttcaccattgagattagtaacaacaatagcactatggtgatgacaggcatgcggatccagattgggactcaagcaatagaacgggccccgtcatatatcgagatcttcggcagaactatgcagctcaacctgagtcgctcacgctggtttgacttccccttcaccagagaagaagccctgcaggctgataagaagctgaacctcttcattggggcctcggtggatccagcaggtgtcaccatgatagatgctgtaaaaatttatggcaagactaaggagcagtttggctggcctgatgagcccccagaagaattcccttctgcctctgtcagcaacatctgcccttcaaatctgaaccagagcaacggcactggagatagcgactcagctgcccccactacgaccagtggaactgtcctggagaggctggttgtgagttctttagaagccctggaaagctgctttgccgttggcccaatcatcgagaaggagagaaacaagaatgctgctcaggagctggccactttgctgttgtccctgccagcacctgccagtgtccagcagcagtccaagagccttctggccagcctgcacaccagccgctcggcctaccacagccacaaggatcaggccttgctgagcaaagctgtgcagtgtctcaacacatctagcaaagagggcaaggatttggaccctgaggtgttccagaggctagtgatcacagctcgctccattgccatcatgcgccccaacaaccttgtccactttacggagtcaaagctgccccagatggaaacagactgtttttttcctagatgtgcctgctggagtctagggatagttggcatattgattggggccccacttgaaactccctccccaggcaagcttccttgacctgagttaaccttaaaacaaattaaattccatctcagatttaccatcgttgataattttctttctcctgcttagaaggaatggatgaagggaaggaaccgcagaagcagttggaaggagattgctgtagtttcatcacccagcttgtgaaccacttctggaaactccatgcatccaaacccaagaatgccttcttggcacctgcctgccttccaggactaactcatattgaagctactgtcaatgctctggtggacatcatccatggctactgtacctgtgagctggattgtattaacacagcatccaagatctacatgcagatgctcttgtgtcctgatcctgctgtgagcttctcttgtaaacaagctctaattcgagtcctaaggcccaggaacaaacggagacatgtgactttaccctcttcccctcgaagcaacactccaatgggagacaaggatgatgatgacgatgatgatgcagatgagaaaatgcagtcatcagggatcccgaatggtggtcacatccgtcaggaaagccaggaacagagtgaggtggaccatggagattttgagatggtgtctgagtcgatggtcctggagacagctgaaaatgtcaacaatggcaacccctctcccctggaggccctgctggcaggcgcagagggcttcccccccatgctggacatcccacctgatgcagatgacgagaccatggttgaactagccattgccctgagcctgcagcaggaccaacaaggcagcagcagcagtgccctgggcctgcagagcctgggactgtccggccaggcacccagctcttcctctctggacgcaggaaccctctctgacaccacagcatcagctccagcctcagacgacgagggcagtacagcagcgacagatggttctacccttcggacctctcctgctgaccacggtggtagtgtgggctcggagagcgggggcagtgcagtggactcagtggctggcgagcacagtgtatctggccggagcagtgcttatggcgatgctacagctgaggggcatccggctggaccaggaagtgtcagctcaagcactggagccatcagcaccaccactgggcaccaggagggagatggctccgagggagaaggagaaggagaaactgaaggagatgtccacactagcaacaggctgcacatggtccgtctaatgctgttggagagattactgcagaccctgcctcaattacgaaacgttggcggtgtccgggccatcccatacatgcaggtcattctaatgctcactacagatctggatggagaagatgagaaagacaagggggccctagacaacctgctctcccagcttattgctgagttgggtatggataaaaaggatgtctccaagaagaatgagcgcagcgccctgaatgaagtccatctggtagtaatgagactcctgagtgtcttcatgtcccgcaccaaatctggatccaagtcttccatatgtgagtcatcttccctcatctccagtgccacagcagcagctctactgagctctggggctgtggactactgcctgcacgtgctcaaatcactgctggaatattggaagagccaacagaatgacgaggagcctgtggctaccagccagttgctgaaaccacatactacctcctccccacctgacatgagcccattctttctccgccagtatgtgaaggccaaagagttctggaggacccagccacctgcttgactctagctttgtcacctataacaccctacacgcagccctgccagcctgcacatttcccaagggtcatgctgctgatgtgtttgaggcctatactcagcttctaacagaaatggtactgaggcttccttaccaaatcaaaaagattactgacaccaattctcgaatcccacctcctgtctttgaccactcgtggttttactttctctccgagtacctcatgatccagcagactccatttgtgcgccgtcaagtccgcaaacttctgctcttcatctgtggatccaaagagaagtaccgccagctccgggatttgcacaccctggactctcacgtgcgtgggatcaagaagctgctagaagagcaggggatattcctccgggcaagtgtggttacagccagctcaggctccgccttgcaatatgacacactcatcagcctgatggagcacctgaaagcctgtgcagagattgccgcccagcgaaccatcaactggcagaaattctgcatcaaagatgactccgtcctgtacttcctcctccaagtcagtttccttgtggatgagggcgtgtccccagtgctgctgcaactgctctcctgtgctctctgcggcagcaaggtgctcgctgcactggcagcctcttcgggatcctccagtgcttcttcctcctcagcccctgtggctgccagttctggacaagccacaacacagtccaagtcttccactaaaaagagcaagaaagaagaaaaagaaaaggagaaagatggtgagacctctggcagccaggaggaccagctgtgcacagctctggtgaaccagctgaacaaatttgccgataaggaaaccctgatccagttcctgcgttgtttcctgttagagtccaattcttcctcggtgcgctggcaggcccactgtctgacactgcacatctacagaaattccagcaaatctcaacaggagctcctgctagatctgatgtggtccatctggccagaactcccagcctatggtcgtaaggctgcccagtttgtggacctactaggatatttctccctgaaaactccacaaacagagaagaagttgaaggagtattcacagaaggctgtggagattctgcggactcaaaaccatattcttaccaaccaccccaactcgaacatttataacactttgtctggcttagtggagtttgatggctattacctggagagcgatccctgcctggtgtgtaataacccggaagtaccgttctgttatatcaagctgtcttccattaaagtggacacgcggtacaccaccacccagcaggttgtgaagctcattggcagtcacaccatcagcaaagtgacagtgaaaatcggggatctgaaacggaccaagatggtgcggaccatcaacctgtattataacaaccgaaccgtgcaggccatcgtggagttgaaaaacaagccagctcgctggcacaaagccaagaaggttcagctgacccctggacagacagaggtgaagattgacctgccgttgcccattgtggcctccaatctgatgattgagtttgcagacttctatgaaaactaccaggcctccacagagaccctgcagtgccctcgctgtagtgcctcggtccctgccaacccaggagtctgtggcaactgtggagagaatgtgtaccagtgtcacaaatgcagatccatcaactacgatgaaaaggatcccttcctctgcaatgcctgtggcttctgtaaatatgcccgcttcgacttcatgctctatgccaagccttgctgtgcagtggatcccattgagaatgaagaagaccggaagaaggctgtatccaacatcaatacacttttggacaaagctgatcgagtgtatcatcagctgatgggacaccggccacagctggagaacctgctctgcaaagtgaatgaggcagctccagaaaagccacaggtagtcccacgctgcaaagggcatttggataagggcttgggtcttgatcagaagactgcctcctaggtgagatcaccttaggtggggagcctgacagcttacctcttggggttgcaggatgactcaggaacagcagggggcatcagctccacttctgccagtgtgaatcgttacatcctgcagttggctcaggagtattgtggagactgcaagaactcttttgatgaactctccaaaatcatccagaaagtctttgcttcgcgcaaagagttgttggaatatgacctacagcagagggaagcagccactaaatcatcccggacctccgtgcagcccacattcactgccagccagtaccgtgccttatccgtcctgggctgtggccacacatcctccaccaagtgctatggctgcgcctcggctgtcacagaacattgtatcacactacttcgggccctggccaccaacccagccttgaggcacatccttgtctcccagggccttatccgggagctctttgattataatcttcgccgaggggctgcggccatgcgggaggaggtccgccagctcatgtgcctcctaactcgagacaacccagaagccacccaacagatgaatgacctgattattggcaaggtctccacagccctgaagggccactgggccaaccccgatctggcaagtagcctgcagtatgaaatgctgctgctgacggattctatctccaaggaggacagctgctgggagctccggttacgctgtgctctcagccttttcctcatggctgtgaacattaagactcctgtggtggttgaaaacattaccctcatgtgcctgaggatcttgcagaagctgataaaaccacctgctcccactagcaagaagaacaaggatgtccccgtcgaggccctcaccacggtgaagccatactgcaatgagatccatgcccaggctcaactgtggctcaagagagaccccaaggcatcctatgatgcctggaagaagtgtcttcctatcagagggatagatggcaatgggaaagcccccagcaaatcagagctccgccatctctatttgactgagaagtatgtgtggaggtggaaacagttcctgagtcgtcgggggaagaggacctcccccttggatctcaaactggggcataacaactggctgcgacaagtgcttttcactccagcaacgcaggccgcacggcaggcagcctgtaccattgtggaagctctagccaccattcccagccgcaagcagcaggtcctggacctgcttaccagttacctggatgagctgagcatagctggggagtgtgcagctgagtacctggctctctaccagaagctcatcacttctgcgcactggaaagtctacttggcagctcggggagtcctaccctatgtgggcaacctcatcaccaaggaaatagctcgtctgctggccctggaggaggctaccctgagtaccgatctgcagcagggttatgcccttaaaagtctcacaggccttctctcctcctttgttgaggtggaatccatcaaaagacattttaaaagtcgcttggtgggtactgtgctgaatggatacctgtgcttgcggaagctggtggtgcagaggaccaagctgatcgatgagacgcaggacatgctgctggagatgctggaggacatgaccacaggtacagaatcagaaaccaaggccttcatggctgtgtgcattgagacagccaagcgctacaatctggatgactaccggaccccggtgttcatcttcgagaggctctgcagcatcatttatcctgaggagaatgaagtcactgagttctttgtgaccctggagaaggatccccaacaagaagacttcttacagggcaggatgcctgggaacccgtatagcagcaatgagccaggcatcgggccgctgatgagggatataaagaacaagatttgccaggactgtgacttagtggccctcctggaagatgacagtggcatggagcttctagtgaacaataaaatcattagtttggaccttcctgtggctgaagtttacaagaaagtctggtgtaccacgaatgagggagagcccatgaggattgtttatcgtatgcgggggctgctgggcgatgccacagaggagttcattgagtccctggactctactacagatgaagaagaagatgaagaagaagtgtataaaatggctggtgtgatggcccagtgtgggggcctggaatgcatgcttaacagactcgcagggatcagagatttcaagcagggacgccaccttctaacagtgctactgaaattgttcagttactgcgtgaaggtgaaagtcaaccggcagcaactggtcaaactggaaatgaacaccttgaacgtcatgctggggaccctaaacctggcccttgtagctgaacaagaaagcaaggacagtgggggtgcagctgtggctgagcaggtgcttagcatcatggagatcattctagatgagtccaatgctgagcccctgagtgaggacaagggcaacctcctcctgacaggtgacaaggatcaactggtgatgctcttggaccagatcaacagcacctttgttcgctccaaccccagtgtgctccagggcctgcttcgcatcatcccgtacctttcctttggagaggtggagaaaatgcagatcttggtggagcgattcaaaccatactgcaactttgataaatatgatgaagatcacagtggtgatgataaagtcttcctggactgcttctgtaaaatagctgctggcatcaagaacaacagcaatgggcaccagctgaaggatctgattctccagaaggggatcacccagaatgcacttgactacatgaaaaagcacatccctagcgccaagaatttggatgccgacatctggaaaaagtttttgtctcgcccagccttgccatttatcctaaggctgcttcggggcctggccatccagcaccctggcacccaggttctgattggaactgattccatcccgaacctgcataagctggagcaggtgtccagtgatgagggcattgggaccttggcagagaacctgctggaagccctgcgggaacaccctgacgtaaacaagaagattgacgcagcccgcagggagacccgggcagagaagaaacgcatggccatggcaatgaggcagaaggccctgggcaccctgggcatgacgacaaatgaaaagggccaggtcgtgaccaagacagcactcctgaagcagatggaagagctgatcgaggagcctggcctcacgtgctgcatctgcagggagggatacaagttccagcccacaaaggtcctgggcatttataccttcacgaagcgggtagccttggaggagttggagaataagccccggaaacagcagggctacagcaccgtgtcccacttcaacattgtgcactacgactgccatctggctgccgtcaggttggctcgaggccgggaagagtgggagagtgccgccctgcagaatgccaacaccaagtgcaacgggctccttccggtctggggacctcatgtccctgaatcagcttttgccacttgcttggcaagacacaacacttacctccaggaatgtacaggccagcgggagcccacgtatcagctcaacatccacgacatcaaactgctcttcctgcgcttcgccatggagcagtcgttcagcgcagacactggcgggggcggccgggagagcaacatccacctgatcccgtacatcattcacactgtgctttacgtcctgaacacaacccgagcaacttcccgagaagagaagaacctccaaggctttctggaacagcccaaggagaagtgggtggagagtgcctttgaagtggacgggccctactatttcacagtcttggcccttcacatcctgccccctgagcagtggagagccacacgtgtggaaatcttgcggaggctgttggtgacctcgcaggctcgggcagtggctccaggtggagccaccaggctgacagataaggcagtgaaggactattccgcttaccgttcttcccttctcttttgggccctcgtcgatctcatttacaacatgtttaagaaggtgcctaccagtaacacagagggaggctggtcctgctctctcgctgagtacatccgccacaacgacatgcccatctacgaagctgccgacaaagccctgaaaaccttccaggaggagttcatgccagtggagaccttctcagagttcctcgatgtggccggtcttttatcagaaatcaccgatccagagagcttcctgaaggacctgttgaactcagtcccctgaccaccacacagcagctgcggcggcgaagacgaagctggcttgccttccaccctctgttctccctccttgtgcattaagttccctccgcgggatgctgcattgttaccccgccctcccctctctcatttttcttggtgtggcttggggtttttaggcttcctgttttatctcgtgtgtgtggtgcaccagctatgaggttgtctgtaacccaagccatcaaagggcctgtacatacctaggagccatgagttgtcccggccagcttcatacttgagtgtgcacatcttgagaaataaacaagtgacttaacacacattgaaaa

SEQ ID NO: 356660 - DNA, 3022 bp, Homo sapiens
aatcagctcggtcctttcacagcggagatgctggaggacatgaccacaggtacagaatcagaaaccaaggccttcatggctgtgtgcattgagacagccaagcgctacaatctggatgactaccggaccccggtgttcatcttcgagaggctctgcagcatcatttatcctgaggagaatgaagtcactgagttctttgtgaccctggagaaggatccccaacaagaagacttcttacagggcaggatgcctgggaacccgtatagcagcaatgagccaggcatcgggccgctgatgagggatataaagaacaagatttgccaggactgtgacttagtggccctcctggaagatgacagtggcatggagcttctagtgaacaataaaatcattagtttggaccttcctgtggctgaagtttacaagaaagtctggtgtaccacgaatgagggagagcccatgaggattgtttatcgtatgcgggggctgctgggcgatgccacagaggagttcattgagtccctggactctactacagatgaagaagaagatgaagaagaagtgtataaaatggctggtgtgatggcccagtgtgggggcctggaatgcatgcttaacagactcgcagggatcagagatttcaagcagggacgccaccttctaacagtgctactgaaattgttcagttactgcgtgaaggtgaaagtcaaccggcagcaactggtcaaactggaaatgaacaccttgaacgtcatgctggggaccctaaacctggcccttgtagctgaacaagaaagcaaggacagtgggggtgcagctgtggctgagcaggtgcttagcatcatggagatcattctagatgagtccaatgctgagcccctgagtgaggacaagggcaacctcctcctgacaggtgacaaggatcaactggtgatgctcttggaccagatcaacagcacctttgttcgctccaaccccagtgtgctccagggcctgcttcgcatcatcccgtacctttcctttggagaggtggagaaaatgcagatcttggtggagcgattcaaaccatactgcaactttgataaatatgatgaagatcacagtggtgatgataaagtcttcctggactgcttctgtaaaatagctgctggcatcaagaacaacagcaatgggcaccagctgaaggatctgattctccagaaggggatcacccagaatgcacttgactacatgaaaaagcacatccctagcgccaagaatttggatgccgacatctggaaaaagtttttgtctcgcccagccttgccatttatcctaaggctgcttcggggcctggccatccagcaccctggcacccaggttctgattggaactgattccatcccgaacctgcataagctggagcaggtgtccagtgatgagggcattgggaccttggcagagaacctgctggaagccctgcgggaacaccctgacgtaaacaagaagattgacgcagcccgcagggagacccgggcagagaagaaacgcatggccatggcaatgaggcagaaggccctgggcaccctgggcatgacgacaaatgaaaagggccaggtcgtgaccaagacagcactcctgaagcagatggaagagctgatcgaggagcctggcctcacgtgctgcatctgcagggagggatacaagttccagcccacaaaggtcctgggcatttataccttcacgaagcgggtagccttggaggagttggagaataagccccggaaacagcagggctacagcaccgtgtcccacttcaacattgtgcactacgactgccatctggctgccgtcaggttggctcgaggccgggaagagtgggagagtgccgccctgcagaatgccaacaccaagtgcaacgggctccttccggtctggggacctcatgtccctgaatcagcttttgccacttgcttggcaagacacaacacttacctccaggaatgtacaggccagcgggagcccacgtatcagctcaacatccacgacatcaaactgctcttcctgcgcttcgccatggagcagtcgttcagcgcagacactggcgggggcggccgggagagcaacatccacctgatcccgtacatcattcacactgtgctttacgtcctgaacacaacccgagcaacttcccgagaagagaagaacctccaaggctttctggaacagcccaaggagaagtgggtggagagtgcctttgaagtggacgggccctactatttcacagtcttggcccttcacatcctgccccctgagcagtggagagccacacgtgtggaaatcttgcggaggctgttggtgacctcgcaggctcgggcagtggctccaggtggagccaccaggctgacagataaggcagtgaaggactattccgcttaccgttcttcccttctcttttgggccctcgtcgatctcatttacaacatgtttaagaaggtgcctaccagtaacacagagggaggctggtcctgctctctcgctgagtacatccgccacaacgacatgcccatctacgaagctgccgacaaagccctgaaaaccttccaggaggagttcatgccagtggagaccttctcagagttcctcgatgtggccggtcttttatcagaaatcaccgatccagagagcttcctgaaggacctgttgaactcagtcccctgaccaccacacagcagctgcggcggcgaagacgaagctggcttgccttccaccctctgttctccctccttgtgcattaagttccctccgcgggatgctgcattgttaccccgccctcccctctctcatttttcttggtgtggcttggggtttttaggcttcctgttttatctcgtgtgtgtggtgcaccagctatgaggttgtctgtaacccaagccatcaaagggcctgtacatacctaggagccatgagttgtcccggccagcttcatacttgagtgtgcacatcttgagaaataaacaagtgacttaacacacattgaaaa

SEQ ID NO: 356661 - DNA, 2914 bp, Homo sapiens
cccaacaagagtgtaaagctgtttagaaaatacacagaaatgtacagactaaaaaagggaattatttcttaatggagaatctattactgctgtaactggtgtaaagatccccaacaagaagacttcttacagggcaggatgcctgggaacccgtatagcagcaatgagccaggcatcgggccgctgatgagggatataaagaacaagatttgccaggactgtgacttagtggccctcctggaagatgacagtggcatggagcttctagtgaacaataaaatcattagtttggaccttcctgtggctgaagtttacaagaaagtctggtgtaccacgaatgagggagagcccatgaggattgtttatcgtatgcgggggctgctgggcgatgccacagaggagttcattgagtccctggactctactacagatgaagaagaagatgaagaagaagtgtataaaatggctggtgtgatggcccagtgtgggggcctggaatgcatgcttaacagactcgcagggatcagagatttcaagcagggacgccaccttctaacagtgctactgaaattgttcagttactgcgtgaaggtgaaagtcaaccggcagcaactggtcaaactggaaatgaacaccttgaacgtcatgctggggaccctaaacctggcccttgtagctgaacaagaaagcaaggacagtgggggtgcagctgtggctgagcaggtgcttagcatcatggagatcattctagatgagtccaatgctgagcccctgagtgaggacaagggcaacctcctcctgacaggtgacaaggatcaactggtgatgctcttggaccagatcaacagcacctttgttcgctccaaccccagtgtgctccagggcctgcttcgcatcatcccgtacctttcctttggagaggtggagaaaatgcagatcttggtggagcgattcaaaccatactgcaactttgataaatatgatgaagatcacagtggtgatgataaagtcttcctggactgcttctgtaaaatagctgctggcatcaagaacaacagcaatgggcaccagctgaaggatctgattctccagaaggggatcacccagaatgcacttgactacatgaaaaagcacatccctagcgccaagaatttggatgccgacatctggaaaaagtttttgtctcgcccagccttgccatttatcctaaggctgcttcggggcctggccatccagcaccctggcacccaggttctgattggaactgattccatcccgaacctgcataagctggagcaggtgtccagtgatgagggcattgggaccttggcagagaacctgctggaagccctgcgggaacaccctgacgtaaacaagaagattgacgcagcccgcagggagacccgggcagagaagaaacgcatggccatggcaatgaggcagaaggccctgggcaccctgggcatgacgacaaatgaaaagggccaggtcgtgaccaagacagcactcctgaagcagatggaagagctgatcgaggagcctggcctcacgtgctgcatctgcagggagggatacaagttccagcccacaaaggtcctgggcatttataccttcacgaagcgggtagccttggaggagttggagaataagccccggaaacagcagggctacagcaccgtgtcccacttcaacattgtgcactacgactgccatctggctgccgtcaggttggctcgaggccgggaagagtgggagagtgccgccctgcagaatgccaacaccaagtgcaacgggctccttccggtctggggacctcatgtccctgaatcagcttttgccacttgcttggcaagacacaacacttacctccaggaatgtacaggccagcgggagcccacgtatcagctcaacatccacgacatcaaactgctcttcctgcgcttcgccatggagcagtcgttcagcgcagacactggcgggggcggccgggagagcaacatccacctgatcccgtacatcattcacactgtgctttacgtcctgaacacaacccgagcaacttcccgagaagagaagaacctccaaggctttctggaacagcccaaggagaagtgggtggagagtgcctttgaagtggacgggccctactatttcacagtcttggcccttcacatcctgccccctgagcagtggagagccacacgtgtggaaatcttgcggaggctgttggtgacctcgcaggctcgggcagtggctccaggtggagccaccaggctgacagataaggcagtgaaggactattccgcttaccgttcttcccttctcttttgggccctcgtcgatctcatttacaacatgtttaagaaggtgcctaccagtaacacagagggaggctggtcctgctctctcgctgagtacatccgccacaacgacatgcccatctacgaagctgccgacaaagccctgaaaaccttccaggaggagttcatgccagtggagaccttctcagagttcctcgatgtggccggtcttttatcagaaatcaccgatccagagagcttcctgaaggacctgttgaactcagtcccctgaccaccacacagcagctgcggcggcgaagacgaagctggcttgccttccaccctctgttctccctccttgtgcattaagttccctccgcgggatgctgcattgttaccccgccctcccctctctcatttttcttggtgtggcttggggtttttaggcttcctgttttatctcgtgtgtgtggtgcaccagctatgaggttgtctgtaacccaagccatcaaagggcctgtacatacctaggagccatgagttgtcccggccagcttcatacttgagtgtgcacatcttgagaaataaacaagtgacttaacacacattgaaaa

SEQ ID NO: 356662 - DNA, 3402 bp, Homo sapiens
gagcacatatactaaaattggaacgatacagagaagattagcatggcccctgcgcaaggatgacacgcaaattcgtgaagcgttccatattttaggcggtatgagtttggctgggggccgggcaccccggaagaccgctgggaaccggctttctgggcttttggaggcagaggaggaagatgagttctaccagacgacttatgggggtttcacagaggaatccggagatgatgagtatcaaggggaccagtcagacacagaggacgaagtggactctgactttgacattgatgaaggggatgaaccatccagtgatggagaagcagaagagccaagaaggaagcgccgagtagtcaccaaggcctataaggaacctctcaagagcttaaggcctcgaaaggtcaacaccccggctggtagctctcagaaggcgcgagaagagaaggcactactgccattagaactacaagatgacggctctgacagtcggaagtctatgcgtcagtctacagctgagcatacacgacaaacgttccttcgggtacaggagaggcagggccagtcaagacggcgaaaggggccccactgtgagcggccactaacccaggaggaactgctccgggaggccaagatcacagaagagcttaatttacggtcactggagacatatgagcggctcgaggctgataaaaagaagcaggttcataagaagcggaagtgccccgggcccataatcacctatcattcagtgacagtgccacttgttggggagccaggccccaaggaagagaacgttgacatagaaggacttgatcctgctccctcggtgtctgcattgactcctcatgctgggactggacccgtcaacccccctgctcgctgctcacgtaccttcatcacttttagtgatgatgcaactttcgaggaatggttcccccaagggcggcccccaaaagtccctgttcgtgaggtctgtccagtgacccatcgtccagccctataccgggaccctgttacagacataccctatgccactgctcgagccttcaagatcattcgtgaggcttacaagaagtacattactgcccatggactgccgcccactgcctcagccaacaagcgcctggaggcgcttgctggggaccctaaacctggcccttgtagctgaacaagaaagcaaggacagtgggggtgcagctgtggctgagcaggtgcttagcatcatggagatcattctagatgagtccaatgctgagcccctgagtgaggacaagggcaacctcctcctgacaggtgacaaggatcaactggtgatgctcttggaccagatcaacagcacctttgttcgctccaaccccagtgtgctccagggcctgcttcgcatcatcccgtacctttcctttggagaggtggagaaaatgcagatcttggtggagcgattcaaaccatactgcaactttgataaatatgatgaagatcacagtggtgatgataaagtcttcctggactgcttctgtaaaatagctgctggcatcaagaacaacagcaatgggcaccagctgaaggatctgattctccagaaggggatcacccagaatgcacttgactacatgaaaaagcacatccctagcgccaagaatttggatgccgacatctggaaaaagtttttgtctcgcccagccttgccatttatcctaaggctgcttcggggcctggccatccagcaccctggcacccaggttctgattggaactgattccatcccgaacctgcataagctggagcaggtgtccagtgatgagggcattgggaccttggcagagaacctgctggaagccctgcgggaacaccctgacgtaaacaagaagattgacgcagcccgcagggagacccgggcagagaagaaacgcatggccatggcaatgaggcagaaggccctgggcaccctgggcatgacgacaaatgaaaagggccaggtcgtgaccaagacagcactcctgaagcagatggaagagctgatcgaggagcctggcctcacgtgctgcatctgcagggagggatacaagttccagcccacaaaggtcctgggcatttataccttcacgaagcgggtagccttggaggagttggagaataagccccggaaacagcagggctacagcaccgtgtcccacttcaacattgtgcactacgactgccatctggctgccgtcaggttggctcgaggccgggaagagtgggagagtgccgccctgcagaatgccaacaccaagtgcaacgggctccttccggtctggggacctcatgtccctgaatcagcttttgccacttgcttggcaagacacaacacttacctccaggaatgtacaggccagcgggagcccacgtatcagctcaacatccacgacatcaaactgctcttcctgcgcttcgccatggagcagtcgttcagcgcagacactggcgggggcggccgggagagcaacatccacctgatcccgtacatcattcacactgtgctttacgtcctgaacacaacccgagcaacttcccgagaagagaagaacctccaaggctttctggaacagcccaaggagaagtgggtggagagtgcctttgaagtggacgggccctactatttcacagtcttggcccttcacatcctgccccctgagcagtggagagccacacgtgtggaaatcttgcggaggctgttggtgacctcgcaggctcgggcagtggctccaggtggagccaccaggctgacagataaggcagtgaaggactattccgcttaccgttcttcccttctcttttgggccctcgtcgatctcatttacaacatgtttaagaaggtgcctaccagtaacacagagggaggctggtcctgctctctcgctgagtacatccgccacaacgacatgcccatctacgaagctgccgacaaagccctgaaaaccttccaggaggagttcatgccagtggagaccttctcagagttcctcgatgtggccggtcttttatcagaaatcaccgatccagagagcttcctgaaggacctgttgaactcagtcccctgaccaccacacagcagctgcggcggcgaagacgaagctggcttgccttccaccctctgttctccctccttgtgcattaagttccctccgcgggatgctgcattgttaccccgccctcccctctctcatttttcttggtgtggcttggggtttttaggcttcctgttttatctcgtgtgtgtggtgcaccagctatgaggttgtctgtaacccaagccatcaaagggcctgtacatacctaggagccatgagttgtcccggccagcttcatacttgagtgtgcacatcttgagaaataaacaagtgacttaacacacattgaaaa

SEQ ID NO: 356663 - DNA, 3257 bp, Homo sapiens
gagcacatatactaaaattggaacgatacagagaagattagcatggcccctgcgcaaggatgacacgcaaattcgtgaagcgttccatattttaggcggtatgagtttggctgggggccgggcaccccggaagaccgctgggaaccggctttctgggcttttggaggcagaggaggaagatgagttctaccagacgacttatgggggtttcacagaggaatccggagatgatgagtatcaaggggaccagtcagacacagaggacgaagtggactctgactttgacattgatgaaggggatgaaccatccagtgatggagaagcagaagagccaagaaggaagcgccgagtagtcaccaaggcctataaggaacctctcaagagcttaaggcctcgaaaggtcaacaccccggctggtagctctcagaaggcgcgagaagagaaggcactactgccattagaactacaagatgacggctctgacagtcggaagtctatgcgtcagtctacagctgagcatacacgacaaacgttccttcgggtacaggagaggcagggccagtcaagacggcgaaaggggccccactgtgagcggccactaacccaggaggaactgctccgggaggccaagatcacagaagagcttaatttacggtcactggacttgatcctgctccctcggtgtctgcattgactcctcatgctgggactggacccgtcaacccccctgctcgctgctcacgtaccttcatcacttttagtgatgatgcaactttcgaggaatggttcccccaagggcggcccccaaaagtccctgttcgtgaggtctgtccagtgacccatcgtccagccctataccgggaccctgttacagacataccctatgccactgctcgagccttcaagatcattcgtgaggcttacaagaagtacattactgcccatggactgccgcccactgcctcagccaacaagcgcctggaggcgcttgctggggaccctaaacctggcccttgtagctgaacaagaaagcaaggacagtgggggtgcagctgtggctgagcaggtgcttagcatcatggagatcattctagatgagtccaatgctgagcccctgagtgaggacaagggcaacctcctcctgacaggtgacaaggatcaactggtgatgctcttggaccagatcaacagcacctttgttcgctccaaccccagtgtgctccagggcctgcttcgcatcatcccgtacctttcctttggagaggtggagaaaatgcagatcttggtggagcgattcaaaccatactgcaactttgataaatatgatgaagatcacagtggtgatgataaagtcttcctggactgcttctgtaaaatagctgctggcatcaagaacaacagcaatgggcaccagctgaaggatctgattctccagaaggggatcacccagaatgcacttgactacatgaaaaagcacatccctagcgccaagaatttggatgccgacatctggaaaaagtttttgtctcgcccagccttgccatttatcctaaggctgcttcggggcctggccatccagcaccctggcacccaggttctgattggaactgattccatcccgaacctgcataagctggagcaggtgtccagtgatgagggcattgggaccttggcagagaacctgctggaagccctgcgggaacaccctgacgtaaacaagaagattgacgcagcccgcagggagacccgggcagagaagaaacgcatggccatggcaatgaggcagaaggccctgggcaccctgggcatgacgacaaatgaaaagggccaggtcgtgaccaagacagcactcctgaagcagatggaagagctgatcgaggagcctggcctcacgtgctgcatctgcagggagggatacaagttccagcccacaaaggtcctgggcatttataccttcacgaagcgggtagccttggaggagttggagaataagccccggaaacagcagggctacagcaccgtgtcccacttcaacattgtgcactacgactgccatctggctgccgtcaggttggctcgaggccgggaagagtgggagagtgccgccctgcagaatgccaacaccaagtgcaacgggctccttccggtctggggacctcatgtccctgaatcagcttttgccacttgcttggcaagacacaacacttacctccaggaatgtacaggccagcgggagcccacgtatcagctcaacatccacgacatcaaactgctcttcctgcgcttcgccatggagcagtcgttcagcgcagacactggcgggggcggccgggagagcaacatccacctgatcccgtacatcattcacactgtgctttacgtcctgaacacaacccgagcaacttcccgagaagagaagaacctccaaggctttctggaacagcccaaggagaagtgggtggagagtgcctttgaagtggacgggccctactatttcacagtcttggcccttcacatcctgccccctgagcagtggagagccacacgtgtggaaatcttgcggaggctgttggtgacctcgcaggctcgggcagtggctccaggtggagccaccaggctgacagataaggcagtgaaggactattccgcttaccgttcttcccttctcttttgggccctcgtcgatctcatttacaacatgtttaagaaggtgcctaccagtaacacagagggaggctggtcctgctctctcgctgagtacatccgccacaacgacatgcccatctacgaagctgccgacaaagccctgaaaaccttccaggaggagttcatgccagtggagaccttctcagagttcctcgatgtggccggtcttttatcagaaatcaccgatccagagagcttcctgaaggacctgttgaactcagtcccctgaccaccacacagcagctgcggcggcgaagacgaagctggcttgccttccaccctctgttctccctccttgtgcattaagttccctccgcgggatgctgcattgttaccccgccctcccctctctcatttttcttggtgtggcttggggtttttaggcttcctgttttatctcgtgtgtgtggtgcaccagctatgaggttgtctgtaacccaagccatcaaagggcctgtacatacctaggagccatgagttgtcccggccagcttcatacttgagtgtgcacatcttgagaaataaacaagtgacttaacacacattgaaaa

SEQ ID NO: 356664 - DNA, 2635 bp, Homo sapiens
gtgtctagccgatcccttctttggtcaggacatagaaggcacttgatcctgctccctcggtgtctgcattgactcctcatgctgggactggacccgtcaacccccctgctcgctgctcacgtaccttcatcacttttagtgatgatgcaactttcgaggaatggttcccccaagggcggcccccaaaagtccctgttcgtgaggtctgtccagtgacccatcgtccagccctataccgggaccctgttacagacataccctatgccactgctcgagccttcaagatcattcgtgaggcttacaagaagtacattactgcccatggactgccgcccactgcctcagccaacaagcgcctggaggcgcttgctggggaccctaaacctggcccttgtagctgaacaagaaagcaaggacagtgggggtgcagctgtggctgagcaggtgcttagcatcatggagatcattctagatgagtccaatgctgagcccctgagtgaggacaagggcaacctcctcctgacaggtgacaaggatcaactggtgatgctcttggaccagatcaacagcacctttgttcgctccaaccccagtgtgctccagggcctgcttcgcatcatcccgtacctttcctttggagaggtggagaaaatgcagatcttggtggagcgattcaaaccatactgcaactttgataaatatgatgaagatcacagtggtgatgataaagtcttcctggactgcttctgtaaaatagctgctggcatcaagaacaacagcaatgggcaccagctgaaggatctgattctccagaaggggatcacccagaatgcacttgactacatgaaaaagcacatccctagcgccaagaatttggatgccgacatctggaaaaagtttttgtctcgcccagccttgccatttatcctaaggctgcttcggggcctggccatccagcaccctggcacccaggttctgattggaactgattccatcccgaacctgcataagctggagcaggtgtccagtgatgagggcattgggaccttggcagagaacctgctggaagccctgcgggaacaccctgacgtaaacaagaagattgacgcagcccgcagggagacccgggcagagaagaaacgcatggccatggcaatgaggcagaaggccctgggcaccctgggcatgacgacaaatgaaaagggccaggtcgtgaccaagacagcactcctgaagcagatggaagagctgatcgaggagcctggcctcacgtgctgcatctgcagggagggatacaagttccagcccacaaaggtcctgggcatttataccttcacgaagcgggtagccttggaggagttggagaataagccccggaaacagcagggctacagcaccgtgtcccacttcaacattgtgcactacgactgccatctggctgccgtcaggttggctcgaggccgggaagagtgggagagtgccgccctgcagaatgccaacaccaagtgcaacgggctccttccggtctggggacctcatgtccctgaatcagcttttgccacttgcttggcaagacacaacacttacctccaggaatgtacaggccagcgggagcccacgtatcagctcaacatccacgacatcaaactgctcttcctgcgcttcgccatggagcagtcgttcagcgcagacactggcgggggcggccgggagagcaacatccacctgatcccgtacatcattcacactgtgctttacgtcctgaacacaacccgagcaacttcccgagaagagaagaacctccaaggctttctggaacagcccaaggagaagtgggtggagagtgcctttgaagtggacgggccctactatttcacagtcttggcccttcacatcctgccccctgagcagtggagagccacacgtgtggaaatcttgcggaggctgttggtgacctcgcaggctcgggcagtggctccaggtggagccaccaggctgacagataaggcagtgaaggactattccgcttaccgttcttcccttctcttttgggccctcgtcgatctcatttacaacatgtttaagaaggtgcctaccagtaacacagagggaggctggtcctgctctctcgctgagtacatccgccacaacgacatgcccatctacgaagctgccgacaaagccctgaaaaccttccaggaggagttcatgccagtggagaccttctcagagttcctcgatgtggccggtcttttatcagaaatcaccgatccagagagcttcctgaaggacctgttgaactcagtcccctgaccaccacacagcagctgcggcggcgaagacgaagctggcttgccttccaccctctgttctccctccttgtgcattaagttccctccgcgggatgctgcattgttaccccgccctcccctctctcatttttcttggtgtggcttggggtttttaggcttcctgttttatctcgtgtgtgtggtgcaccagctatgaggttgtctgtaacccaagccatcaaagggcctgtacatacctaggagccatgagttgtcccggccagcttcatacttgagtgtgcacatcttgagaaataaacaagtgacttaacacacattgaaaa

SEQ ID NO: 356665 - DNA, 12483 bp, Homo sapiens
gtgacctagaggttccgccacaagcgcgatctcaaaggtccaggtctctttggatgagcatttttctaagatggctgctgagactgatcctcataagtcgtctgagattaccaagaacctacttccagccacgctgcaactcattgacacctatgcatcgttcaccagagcctatttgctgcaaaactttaatgaagagggaacaactgagaaaccttccaaggagaaactgcaaggctttgctgctgttttggctattggctctagcaggtgcaaggcaaatactctgggtccgacactggttcagaatttgccatcgtcagtgcagactgtgtgtgagtcctggaacaacatcaataccaatgaatttcccaatattggatcctggcgcaatgcctttgccaatgacaccatcccttcagagagttatattagtgcagtgcaggctgcacacctggggactctctgtagccaaagtctgcccctggctgcttccctgaagcataccctcctctcactggtcaggttgactggagatcttattgtttggtcagatgagatgaacccaccacaggtaattcggacactgctacctcttcttttggaatcaagcactgagagtgttgccgagatcagtagcaactccctggaacgcatcttgggccctgctgagtctgatgagttcttggctcgtgtttatgagaagctgatcactggttgttacaacattctggccaatcatgcagatcctaacagtggactggatgaatccatcctggaggaatgtctccagtacttggaaaagcagctggaaagtagccaggctcgtaaagctatggaggagtttttctctgacagtggagaacttgtacagatcatgatggcaacagccaatgagaacctctctgctaaattctgtaaccgagttttgaaattcttcaccaaactcttccagctgactgagaagagccctaacccgagcctgttgcatctctgtggctccctggcacaactggcctgtgtggaacctgtgcgcctgcaggcctggctcacccgcatgactacatcgcccccaaaagattctgatcagctggatgtaattcaggagaaccggcagctgctgcagttactgaccacatacattgttcgggaaaacagccaagttggggaaggtgtgtgtgctgttcttctgggcaccctgactcccatggcaacagagatgctggccaacggtgatgggactggcttccctgaacttatggttgtgatggccactctggccagtgcaggtcaaggtgctggtcaccttcagcttcataatgctgctgtggattggctgagcagatgcaagaaatacctgtcacagaagaatgtagttgaaaaactgaatgccaatgtaatgcatggaaagcatgtgatgatcttggagtgcacatgccatatcatgtcttacttggctgatgtcacgaatgccctgagccagagtaatggtcaaggcccaagtcatctctcagtggatggggaagagcgggccattgaagtagactcagactgggtggaggagttggcggtggaagaggaagattcccaggctgaggattcagatgaagattctctttgcaataaactctgcacttttacgatcacacagaaagaattcatgaaccagcattggtaccactgtcacacctgtaaaatggtggatggcgtgggtgtctgcacagtgtgtgctaaggtgtgccacaaggatcatgagatttcctatgccaagtatggatccttcttctgtgactgtggagccaaggaagatggcagctgtttggctctggtgaagagaactcctagcagtggcatgagctctaccatgaaggagtcggcatttcagagtgaacccaggatttcagagagtctagtgcgtcatgccagcacctcctcgccagctgacaaagccaaggttaccatcagtgatggaaaggttgctgacgaagagaagcccaagaagagcagcctctgccgcacagtagagggctgccgggaggaattacagaaccaggccaatttctccttcgctcctctcgtgttagacatgcttaatttccttatggatgccattcagaccaacttccagcaagcttcagccgtcgggagcagcagccgtgctcagcaagccctcagtgagctacacactgtggagaaggcagtggagatgacagaccagctgatggttcccaccttagggtcccaggaaggtgcctttgagaatgtgcggatgaattacagtggagaccagggccagaccatccggcagctgatcagtgctcatgtgctcaggcgggtggctatgtgtgtgctctcctctccccatgggcgccgccaacatttggctgtcagccatgagaagggcaagatcaccgttctgcagctctctgcactcctgaagcaagcagattccagcaaaaggaagttaactctgacccgcttggcttctgccccagttccttttactgtgttgagcctcacaggaaatccctgcaaggaagactacttggcggtttgtgggctaaaggactgtcatgtgctcacctttagtagctcaggctctgtttcggatcacttggttttgcaccctcagttggcaacggggaacttcatcatcaaagccgtgtggttacctggttcacagaccgagttagcaattgtcaccgcagactttgttaagatttatgacctgtgtgttgatgccttgagtccaaccttctattttctcctgccaagctcaaagataagagatgttaccttccttttcaatgaggagggaaagaacatcattgttataatgtcttcggctgggtacatctatactcagcttatggaagaggccagcagtgcccagcagggacccttctatgtcactaatgtgttggaaatcaatcatgaggacctgaaggacagtaacagccaggtggcgggcggtggtgtgtccgtgtactactcccacgtgttgcagatgttgttcttcagctattgtcaaggcaaatcattcgcagccaccatcagcaggacaaccctggaggtgttgcaactcttccccatcaacatcaaaagttccaatggtggcagtaagacttctcctgctctttgccagtggtctgaggtgatgaaccaccctggcttggtgtgctgtgtccagcaaactacaggggtgccgctggtagttatggtgaaaccagacacttttcttatccaggagattaagactcttcctgctaaagcgaagatccaagacatggttgctattaggcacacggcctgcaatgagcagcagcggacaacaatgattctgctgtgtgaggatggcagcctgcgcatttacatggccaacgtggagaacacctcctactggctgcagccatccctgcagcccagcagtgtcatcagcatcatgaagcctgttcgaaagcgcaaaacagctacaatcacaacccgcacgtctagccaggtgactttccccattgacttttttgaacacaaccagcagctgacagatgtggagtttggtggtaacgacctcctacaggtctataatgcacaacagataaaacaccggctgaattccactggcatgtatgtggccaacaccaagcccggaggcttcaccattgagattagtaacaacaatagcactatggtgatgacaggcatgcggatccagattgggactcaagcaatagaacgggccccgtcatatatcgagatcttcggcagaactatgcagctcaacctgagtcgctcacgctggtttgacttccccttcaccagagaagaagccctgcaggctgataagaagctgaacctcttcattggggcctcggtggatccagcaggtgtcaccatgatagatgctgtaaaaatttatggcaagactaaggagcagtttggctggcctgatgagcccccagaagaattcccttctgcctctgtcagcaacatctgcccttcaaatctgaaccagagcaacggcactggagatagcgactcagctgcccccactacgaccagtggaactgtcctggagaggctggttgtgagttctttagaagccctggaaagctgctttgccgttggcccaatcatcgagaaggagagaaacaagaatgctgctcaggagctggccactttgctgttgtccctgccagcacctgccagtgtccagcagcagtccaagagccttctggccagcctgcacaccagccgctcggcctaccacagccacaaggatcaggccttgctgagcaaagctgtgcagtgtctcaacacatctagcaaagagggcaaggatttggaccctgaggtgttccagaggctagtgatcacagctcgctccattgccatcatgcgccccaacaaccttgtccactttacggagtcaaagctgccccagatggaaacagactgtttttttcctagatgtgcctgctggagtctagggatagttggcatattgattggggccccacttgaaactccctccccaggcaagcttccttgacctgagttaaccttaaaacaaattaaattccatctcagatttaccatcgttgataattttctttctcctgcttagaaggaatggatgaagggaaggaaccgcagaagcagttggaaggagattgctgtagtttcatcacccagcttgtgaaccacttctggaaactccatgcatccaaacccaagaatgccttcttggcacctgcctgccttccaggactaactcatattgaagctactgtcaatgctctggtggacatcatccatggctactgtacctgtgagctggattgtattaacacagcatccaagatctacatgcagatgctcttgtgtcctgatcctgctgtgagcttctcttgtaaacaagctctaattcgagtcctaaggcccaggaacaaacggagacatgtgactttaccctcttcccctcgaagcaacactccaatgggagacaaggatgatgatgacgatgatgatgcagatgagaaaatgcagtcatcagggatcccgaatggtggtcacatccgtcaggaaagccaggaacagagtgaggtggaccatggagattttgagatggtgtctgagtcgatggtcctggagacagctgaaaatgtcaacaatggcaacccctctcccctggaggccctgctggcaggcgcagagggcttcccccccatgctggacatcccacctgatgcagatgacgagaccatggttgaactagccattgccctgagcctgcagcaggaccaacaaggcagcagcagcagtgccctgggcctgcagagcctgggactgtccggccaggcacccagctcttcctctctggacgcaggaaccctctctgacaccacagcatcagctccagcctcagacgacgagggcagtacagcagcgacagatggttctacccttcggacctctcctgctgaccacggtggtagtgtgggctcggagagcgggggcagtgcagtggactcagtggctggcgagcacagtgtatctggccggagcagtgcttatggcgatgctacagctgaggggcatccggctggaccaggaagtgtcagctcaagcactggagccatcagcaccaccactgggcaccaggagggagatggctccgagggagaaggagaaggagaaactgaaggagatgtccacactagcaacaggctgcacatggtccgtctaatgctgttggagagattactgcagaccctgcctcaattacgaaacgttggcggtgtccgggccatcccatacatgcaggtcattctaatgctcactacagatctggatggagaagatgagaaagacaagggggccctagacaacctgctctcccagcttattgctgagttgggtatggataaaaaggatgtctccaagaagaatgagcgcagcgccctgaatgaagtccatctggtagtaatgagactcctgagtgtcttcatgtcccgcaccaaatctggatccaagtcttccatatgtgagtcatcttccctcatctccagtgccacagcagcagctctactgagctctggggctgtggactactgcctgcacgtgctcaaatcactgctggaatattggaagagccaacagaatgacgaggagcctgtggctaccagccagttgctgaaaccacatactacctcctccccacctgacatgagcccattctttctccgccagtatgtgaagggtcatgctgctgatgtgtttgaggcctatactcagcttctaacagaaatggtactgaggcttccttaccaaatcaaaaagattactgacaccaattctcgaatcccacctcctgtctttgaccactcgtggttttactttctctccgagtacctcatgatccagcagactccatttgtgcgccgtcaagtccgcaaacttctgctcttcatctgtggatccaaagagaagtaccgccagctccgggatttgcacaccctggactctcacgtgcgtgggatcaagaagctgctagaagagcaggggatattcctccgggcaagtgtggttacagccagctcaggctccgccttgcaatatgacacactcatcagcctgatggagcacctgaaagcctgtgcagagattgccgcccagcgaaccatcaactggcagaaattctgcatcaaagatgactccgtcctgtacttcctcctccaagtcagtttccttgtggatgagggcgtgtccccagtgctgctgcaactgctctcctgtgctctctgcggcagcaaggtgctcgctgcactggcagcctcttcgggatcctccagtgcttcttcctcctcagcccctgtggctgccagttctggacaagccacaacacagtccaagtcttccactaaaaagagcaagaaagaagaaaaagaaaaggagaaagatggtgagacctctggcagccaggaggaccagctgtgcacagctctggtgaaccagctgaacaaatttgccgataaggaaaccctgatccagttcctgcgttgtttcctgttagagtccaattcttcctcggtgcgctggcaggcccactgtctgacactgcacatctacagaaattccagcaaatctcaacaggagctcctgctagatctgatgtggtccatctggccagaactcccagcctatggtcgtaaggctgcccagtttgtggacctactaggatatttctccctgaaaactccacaaacagagaagaagttgaaggagtattcacagaaggctgtggagattctgcggactcaaaaccatattcttaccaaccaccccaactcgaacatttataacactttgtctggcttagtggagtttgatggctattacctggagagcgatccctgcctggtgtgtaataacccggaagtaccgttctgttatatcaagctgtcttccattaaagtggacacgcggtacaccaccacccagcaggttgtgaagctcattggcagtcacaccatcagcaaagtgacagtgaaaatcggggatctgaaacggaccaagatggtgcggaccatcaacctgtattataacaaccgaaccgtgcaggccatcgtggagttgaaaaacaagccagctcgctggcacaaagccaagaaggttcagctgacccctggacagacagaggtgaagattgacctgccgttgcccattgtggcctccaatctgatgattgagtttgcagacttctatgaaaactaccaggcctccacagagaccctgcagtgccctcgctgtagtgcctcggtccctgccaacccaggagtctgtggcaactgtggagagaatgtgtaccagtgtcacaaatgcagatccatcaactacgatgaaaaggatcccttcctctgcaatgcctgtggcttctgtaaatatgcccgcttcgacttcatgctctatgccaagccttgctgtgcagtggatcccattgagaatgaagaagaccggaagaaggctgtatccaacatcaatacacttttggacaaagctgatcgagtgtatcatcagctgatgggacaccggccacagctggagaacctgctctgcaaagtgaatgaggcagctccagaaaagccacaggatgactcaggaacagcagggggcatcagctccacttctgccagtgtgaatcgttacatcctgcagttggctcaggagtattgtggagactgcaagaactcttttgatgaactctccaaaatcatccagaaagtctttgcttcgcgcaaagagttgttggaatatgacctacagcagagggaagcagccactaaatcatcccggacctccgtgcagcccacattcactgccagccagtaccgtgccttatccgtcctgggctgtggccacacatcctccaccaagtgctatggctgcgcctcggctgtcacagaacattgtatcacactacttcgggccctggccaccaacccagccttgaggcacatccttgtctcccagggccttatccgggagctctttgattataatcttcgccgaggggctgcggccatgcgggaggaggtccgccagctcatgtgcctcctaactcgagacaacccagaagccacccaacagatgaatgacctgattattggcaaggtctccacagccctgaagggccactgggccaaccccgatctggcaagtagcctgcagtatgaaatgctgctgctgacggattctatctccaaggaggacagctgctgggagctccggttacgctgtgctctcagccttttcctcatggctgtgaacattaagactcctgtggtggttgaaaacattaccctcatgtgcctgaggatcttgcagaagctgataaaaccacctgctcccactagcaagaagaacaaggatgtccccgtcgaggccctcaccacggtgaagccatactgcaatgagatccatgcccaggctcaactgtggctcaagagagaccccaaggcatcctatgatgcctggaagaagtgtcttcctatcagagggatagatggcaatgggaaagcccccagcaaatcagagctccgccatctctatttgactgagaagtatgtgtggaggtggaaacagttcctgagtcgtcgggggaagaggacctcccccttggatctcaaactggggcataacaactggctgcgacaagtgcttttcactccagcaacgcaggccgcacggcaggcagcctgtaccattgtggaagctctagccaccattcccagccgcaagcagcaggtcctggacctgcttaccagttacctggatgagctgagcatagctggggagtgtgcagctgagtacctggctctctaccagaagctcatcacttctgcgcactggaaagtctacttggcagctcggggagtcctaccctatgtgggcaacctcatcaccaaggaaatagctcgtctgctggccctggaggaggctaccctgagtaccgatctgcagcagggttatgcccttaaaagtctcacaggccttctctcctcctttgttgaggtggaatccatcaaaagacattttaaaagtcgcttggtgggtactgtgctgaatggatacctgtgcttgcggaagctggtggtgcagaggaccaagctgatcgatgagacgcaggacatgctgctggagatgctggaggacatgaccacaggtacagaatcagaaaccaaggccttcatggctgtgtgcattgagacagccaagcgctacaatctggatgactaccggaccccggtgttcatcttcgagaggctctgcagcatcatttatcctgaggagaatgaagtcactgagttctttgtgaccctggagaaggatccccaacaagaagacttcttacagggcaggatgcctgggaacccgtatagcagcaatgagccaggcatcgggccgctgatgagggatataaagaacaagatttgccaggactgtgacttagtggccctcctggaagatgacagtggcatggagcttctagtgaacaataaaatcattagtttggaccttcctgtggctgaagtttacaagaaagtctggtgtaccacgaatgagggagagcccatgaggattgtttatcgtatgcgggggctgctgggcgatgccacagaggagttcattgagtccctggactctactacagatgaagaagaagatgaagaagaagtgtataaaatggctggtgtgatggcccagtgtgggggcctggaatgcatgcttaacagactcgcagggatcagagatttcaagcagggacgccaccttctaacagtgctactgaaattgttcagttactgcgtgaaggtgaaagtcaaccggcagcaactggtcaaactggaaatgaacaccttgaacgtcatgctggggaccctaaacctggcccttgtagctgaacaagaaagcaaggacagtgggggtgcagctgtggctgagcaggtgcttagcatcatggagatcattctagatgagtccaatgctgagcccctgagtgaggacaagggcaacctcctcctgacaggtgacaaggatcaactggtgatgctcttggaccagatcaacagcacctttgttcgctccaaccccagtgtgctccagggcctgcttcgcatcatcccgtacctttcctttggagaggtggagaaaatgcagatcttggtggagcgattcaaaccatactgcaactttgataaatatgatgaagatcacagtggtgatgataaagtcttcctggactgcttctgtaaaatagctgctggcatcaagaacaacagcaatgggcaccagctgaaggatctgattctccagaaggggatcacccagaatgcacttgactacatgaaaaagcacatccctagcgccaagaatttggatgccgacatctggaaaaagtttttgtctcgcccagccttgccatttatcctaaggctgcttcggggcctggccatccagcaccctggcacccaggttctgattggaactgattccatcccgaacctgcataagctggagcaggtgtccagtgatgagggcattgggaccttggcagagaacctgctggaagccctgcgggaacaccctgacgtaaacaagaagattgacgcagcccgcagggagacccgggcagagaagaaacgcatggccatggcaatgaggcagaaggccctgggcaccctgggcatgacgacaaatgaaaagggccaggtcgtgaccaagacagcactcctgaagcagatggaagagctgatcgaggagcctggcctcacgtgctgcataatgccaacaccaagtgcaacgggctccttccggtctggggacctcatgtccctgaatcagcttttgccacttgcttggcaagacacaacacttacctccaggaatgtacaggccagcgggagcccacgtatcagctcaacatccacgacatcaaactgctcttcctgcgcttcgccatggagcagtcgttcagcgcagacactggcgggggcggccgggagagcaacatccacctgatcccgtacatcattcacactgtgctttacgtcctgaacacaacccgagcaacttcccgagaagagaagaacctccaaggctttctggaacagcccaaggagaagtgggtggagagtgcctttgaagtggacgggccctactatttcacagtcttggcccttcacatcctgccccctgagcagtggagagccacacgtgtggaaatcttgcggaggctgttggtgacctcgcaggctcgggcagtggctccaggtggagccaccaggctgacagataaggcagtgaaggactattccgcttaccgttcttcccttctcttttgggccctcgtcgatctcatttacaacatgtttaagaaggtgcctaccagtaacacagagggaggctggtcctgctctctcgctgagtacatccgccacaacgacatgcccatctacgaagctgccgacaaagccctgaaaaccttccaggaggagttcatgccagtggagaccttctcagagttcctcgatgtggccggtcttttatcagaaatcaccgatccagagagcttcctgaaggacctgttgaactcagtcccctgaccaccacacagcagctgcggcggcgaagacgaagctggcttgccttccaccctctgttctccctccttgtgcattaagttccctccgcgggatgctgcattgttaccccgccctcccctctctcatttttcttggtgtggcttggggtttttaggcttcctgttttatctcgtgtgtgtggtgcaccagctatgaggttgtctgtaacccaagccatcaaagggcctgtacatacctaggagccatgagttgtcccggccagcttcatacttgagtgtgcacatcttgagaaataaacaagtgacttaacacacattgaaaa

SEQ ID NO: 356666 - DNA, 12872 bp, Homo sapiens
gtgacctagaggttccgccacaagcgcgatctcaaaggtccaggtctctttggatgagcatttttctaagatggctgctgagactgatcctcataagtcgtctgagattaccaagaacctacttccagccacgctgcaactcattgacacctatgcatcgttcaccagagcctatttgctgcaaaactttaatgaagagggaacaactgagaaaccttccaaggagaaactgcaaggctttgctgctgttttggctattggctctagcaggtgcaaggcaaatactctgggtccgacactggttcagaatttgccatcgtcagtgcagactgtgtgtgagtcctggaacaacatcaataccaatgaatttcccaatattggatcctggcgcaatgcctttgccaatgacaccatcccttcagagagttatattagtgcagtgcaggctgcacacctggggactctctgtagccaaagtctgcccctggctgcttccctgaagcataccctcctctcactggtcaggttgactggagatcttattgtttggtcagatgagatgaacccaccacaggtaattcggacactgctacctcttcttttggaatcaagcactgagagtgttgccgagatcagtagcaactccctggaacgcatcttgggccctgctgagtctgatgagttcttggctcgtgtttatgagaagctgatcactggttgttacaacattctggccaatcatgcagatcctaacagtggactggatgaatccatcctggaggaatgtctccagtacttggaaaagcagctggaaagtagccaggctcgtaaagctatggaggagtttttctctgacagtggagaacttgtacagatcatgatggcaacagccaatgagaacctctctgctaaattctgtaaccgagttttgaaattcttcaccaaactcttccagctgactgagaagagccctaacccgagcctgttgcatctctgtggctccctggcacaactggcctgtgtggaacctgtgcgcctgcaggcctggctcacccgcatgactacatcgcccccaaaagattctgatcagctggatgtaattcaggagaaccggcagctgctgcagttactgaccacatacattgttcgggaaaacagccaagttggggaaggtgtgtgtgctgttcttctgggcaccctgactcccatggcaacagagatgctggccaacggtgatgggactggcttccctgaacttatggttgtgatggccactctggccagtgcaggtcaaggtgctggtcaccttcagcttcataatgctgctgtggattggctgagcagatgcaagaaatacctgtcacagaagaatgtagttgaaaaactgaatgccaatgtaatgcatggaaagcatgtgatgatcttggagtgcacatgccatatcatgtcttacttggctgatgtcacgaatgccctgagccagagtaatggtcaaggcccaagtcatctctcagtggatggggaagagcgggccattgaagtagactcagactgggtggaggagttggcggtggaagaggaagattcccaggctgaggattcagatgaagattctctttgcaataaactctgcacttttacgatcacacagaaagaattcatgaaccagcattggtaccactgtcacacctgtaaaatggtggatggcgtgggtgtctgcacagtgtgtgctaaggtgtgccacaaggatcatgagatttcctatgccaagtatggatccttcttctgtgactgtggagccaaggaagatggcagctgtttggctctggtgaagagaactcctagcagtggcatgagctctaccatgaaggagtcggcatttcagagtgaacccaggatttcagagagtctagtgcgtcatgccagcacctcctcgccagctgacaaagccaaggttaccatcagtgatggaaaggttgctgacgaagagaagcccaagaagagcagcctctgccgcacagtagagggctgccgggaggaattacagaaccaggccaatttctccttcgctcctctcgtgttagacatgcttaatttccttatggatgccattcagaccaacttccagcaagcttcagccgtcgggagcagcagccgtgctcagcaagccctcagtgagctacacactgtggagaaggcagtggagatgacagaccagctgatggttcccaccttagggtcccaggaaggtgcctttgagaatgtgcggatgaattacagtggagaccagggccagaccatccggcagctgatcagtgctcatgtgctcaggcgggtggctatgtgtgtgctctcctctccccatgggcgccgccaacatttggctgtcagccatgagaagggcaagatcaccgttctgcagctctctgcactcctgaagcaagcagattccagcaaaaggaagttaactctgacccgcttggcttctgccccagttccttttactgtgttgagcctcacaggaaatccctgcaaggaagactacttggcggtttgtgggctaaaggactgtcatgtgctcacctttagtagctcaggctctgtttcggatcacttggttttgcaccctcagttggcaacggggaacttcatcatcaaagccgtgtggttacctggttcacagaccgagttagcaattgtcaccgcagactttgttaagatttatgacctgtgtgttgatgccttgagtccaaccttctattttctcctgccaagctcaaagataagagatgttaccttccttttcaatgaggagggaaagaacatcattgttataatgtcttcggctgggtacatctatactcagcttatggaagaggccagcagtgcccagcagggacccttctatgtcactaatgtgttggaaatcaatcatgaggacctgaaggacagtaacagccaggtggcgggcggtggtgtgtccgtgtactactcccacgtgttgcagatgttgttcttcagctattgtcaaggcaaatcattcgcagccaccatcagcaggacaaccctggaggtgttgcaactcttccccatcaacatcaaaagttccaatggtggcagtaagacttctcctgctctttgccagtggtctgaggtgatgaaccaccctggcttggtgtgctgtgtccagcaaactacaggggtgccgctggtagttatggtgaaaccagacacttttcttatccaggagattaagactcttcctgctaaagcgaagatccaagacatggttgctattaggcacacggcctgcaatgagcagcagcggacaacaatgattctgctgtgtgaggatggcagcctgcgcatttacatggccaacgtggagaacacctcctactggctgcagccatccctgcagcccagcagtgtcatcagcatcatgaagcctgttcgaaagcgcaaaacagctacaatcacaacccgcacgtctagccaggtgactttccccattgacttttttgaacacaaccagcagctgacagatgtggagtttggtggtaacgacctcctacaggtctataatgcacaacagataaaacaccggctgaattccactggcatgtatgtggccaacaccaagcccggaggcttcaccattgagattagtaacaacaatagcactatggtgatgacaggcatgcggatccagattgggactcaagcaatagaacgggccccgtcatatatcgagatcttcggcagaactatgcagctcaacctgagtcgctcacgctggtttgacttccccttcaccagagaagaagccctgcaggctgataagaagctgaacctcttcattggggcctcggtggatccagcaggtgtcaccatgatagatgctgtaaaaatttatggcaagactaaggagcagtttggctggcctgatgagcccccagaagaattcccttctgcctctgtcagcaacatctgcccttcaaatctgaaccagagcaacggcactggagatagcgactcagctgcccccactacgaccagtggaactgtcctggagaggctggttgtgagttctttagaagccctggaaagctgctttgccgttggcccaatcatcgagaaggagagaaacaagaatgctgctcaggagctggccactttgctgttgtccctgccagcacctgccagtgtccagcagcagtccaagagccttctggccagcctgcacaccagccgctcggcctaccacagccacaaggatcaggccttgctgagcaaagctgtgcagtgtctcaacacatctagcaaagagggcaaggatttggaccctgaggtgttccagaggctagtgatcacagctcgctccattgccatcatgcgccccaacaaccttgtccactttacggagtcaaagctgccccagatggaaacagactgtttttttcctagatgtgcctgctggagtctagggatagttggcatattgattggggccccacttgaaactccctccccaggcaagcttccttgacctgagttaaccttaaaacaaattaaattccatctcagatttaccatcgttgataattttctttctcctgcttagaaggaatggatgaagggaaggaaccgcagaagcagttggaaggagattgctgtagtttcatcacccagcttgtgaaccacttctggaaactccatgcatccaaacccaagaatgccttcttggcacctgcctgccttccaggactaactcatattgaagctactgtcaatgctctggtggacatcatccatggctactgtacctgtgagctggattgtattaacacagcatccaagatctacatgcagatgctcttgtgtcctgatcctgctgtgagcttctcttgtaaacaagctctaattcgagtcctaaggcccaggaacaaacggagacatgtgactttaccctcttcccctcgaagcaacactccaatgggagacaaggatgatgatgacgatgatgatgcagatgagaaaatgcagtcatcagggatcccgaatggtggtcacatccgtcaggaaagccaggaacagagtgaggtggaccatggagattttgagatggtgtctgagtcgatggtcctggagacagctgaaaatgtcaacaatggcaacccctctcccctggaggccctgctggcaggcgcagagggcttcccccccatgctggacatcccacctgatgcagatgacgagaccatggttgaactagccattgccctgagcctgcagcaggaccaacaaggcagcagcagcagtgccctgggcctgcagagcctgggactgtccggccaggcacccagctcttcctctctggacgcaggaaccctctctgacaccacagcatcagctccagcctcagacgacgagggcagtacagcagcgacagatggttctacccttcggacctctcctgctgaccacggtggtagtgtgggctcggagagcgggggcagtgcagtggactcagtggctggcgagcacagtgtatctggccggagcagtgcttatggcgatgctacagctgaggggcatccggctggaccaggaagtgtcagctcaagcactggagccatcagcaccaccactgggcaccaggagggagatggctccgagggagaaggagaaggagaaactgaaggagatgtccacactagcaacaggctgcacatggtccgtctaatgctgttggagagattactgcagaccctgcctcaattacgaaacgttggcggtgtccgggccatcccatacatgcaggtcattctaatgctcactacagatctggatggagaagatgagaaagacaagggggccctagacaacctgctctcccagcttattgctgagttgggtatggataaaaaggatgtctccaagaagaatgagcgcagcgccctgaatgaagtccatctggtagtaatgagactcctgagtgtcttcatgtcccgcaccaaatctggatccaagtcttccatatgtgagtcatcttccctcatctccagtgccacagcagcagctctactgagctctggggctgtggactactgcctgcacgtgctcaaatcactgctggaatattggaagagccaacagaatgacgaggagcctgtggctaccagccagttgctgaaaccacatactacctcctccccacctgacatgagcccattctttctccgccagtatgtgaagggtcatgctgctgatgtgtttgaggcctatactcagcttctaacagaaatggtactgaggcttccttaccaaatcaaaaagattactgacaccaattctcgaatcccacctcctgtctttgaccactcgtggttttactttctctccgagtacctcatgatccagcagactccatttgtgcgccgtcaagtccgcaaacttctgctcttcatctgtggatccaaagagaagtaccgccagctccgggatttgcacaccctggactctcacgtgcgtgggatcaagaagctgctagaagagcaggggatattcctccgggcaagtgtggttacagccagctcaggctccgccttgcaatatgacacactcatcagcctgatggagcacctgaaagcctgtgcagagattgccgcccagcgaaccatcaactggcagaaattctgcatcaaagatgactccgtcctgtacttcctcctccaagtcagtttccttgtggatgagggcgtgtccccagtgctgctgcaactgctctcctgtgctctctgcggcagcaaggtgctcgctgcactggcagcctcttcgggatcctccagtgcttcttcctcctcagcccctgtggctgccagttctggacaagccacaacacagtccaagtcttccactaaaaagagcaagaaagaagaaaaagaaaaggagaaagatggtgagacctctggcagccaggaggaccagctgtgcacagctctggtgaaccagctgaacaaatttgccgataaggaaaccctgatccagttcctgcgttgtttcctgttagagtccaattcttcctcggtgcgctggcaggcccactgtctgacactgcacatctacagaaattccagcaaatctcaacaggagctcctgctagatctgatgtggtccatctggccagaactcccagcctatggtcgtaaggctgcccagtttgtggacctactaggatatttctccctgaaaactccacaaacagagaagaagttgaaggagtattcacagaaggctgtggagattctgcggactcaaaaccatattcttaccaaccaccccaactcgaacatttataacactttgtctggcttagtggagtttgatggctattacctggagagcgatccctgcctggtgtgtaataacccggaagtaccgttctgttatatcaagctgtcttccattaaagtggacacgcggtacaccaccacccagcaggttgtgaagctcattggcagtcacaccatcagcaaagtgacagtgaaaatcggggatctgaaacggaccaagatggtgcggaccatcaacctgtattataacaaccgaaccgtgcaggccatcgtggagttgaaaaacaagccagctcgctggcacaaagccaagaaggttcagctgacccctggacagacagaggtgaagattgacctgccgttgcccattgtggcctccaatctgatgattgagtttgcagacttctatgaaaactaccaggcctccacagagaccctgcagtgccctcgctgtagtgcctcggtccctgccaacccaggagtctgtggcaactgtggagagaatgtgtaccagtgtcacaaatgcagatccatcaactacgatgaaaaggatcccttcctctgcaatgcctgtggcttctgtaaatatgcccgcttcgacttcatgctctatgccaagccttgctgtgcagtggatcccattgagaatgaagaagaccggaagaaggctgtatccaacatcaatacacttttggacaaagctgatcgagtgtatcatcagctgatgggacaccggccacagctggagaacctgctctgcaaagtgaatgaggcagctccagaaaagccacaggatgactcaggaacagcagggggcatcagctccacttctgccagtgtgaatcgttacatcctgcagttggctcaggagtattgtggagactgcaagaactcttttgatgaactctccaaaatcatccagaaagtctttgcttcgcgcaaagagttgttggaatatgacctacagcagagggaagcagccactaaatcatcccggacctccgtgcagcccacattcactgccagccagtaccgtgccttatccgtcctgggctgtggccacacatcctccaccaagtgctatggctgcgcctcggctgtcacagaacattgtatcacactacttcgggccctggccaccaacccagccttgaggcacatccttgtctcccagggccttatccgggagctctttgattataatcttcgccgaggggctgcggccatgcgggaggaggtccgccagctcatgtgcctcctaactcgagacaacccagaagccacccaacagatgaatgacctgattattggcaaggtctccacagccctgaagggccactgggccaaccccgatctggcaagtagcctgcagtatgaaatgctgctgctgacggattctatctccaaggaggacagctgctgggagctccggttacgctgtgctctcagccttttcctcatggctgtgaacattaagactcctgtggtggttgaaaacattaccctcatgtgcctgaggatcttgcagaagctgataaaaccacctgctcccactagcaagaagaacaaggatgtccccgtcgaggccctcaccacggtgaagccatactgcaatgagatccatgcccaggctcaactgtggctcaagagagaccccaaggcatcctatgatgcctggaagaagtgtcttcctatcagagggatagatggcaatgggaaagcccccagcaaatcagagctccgccatctctatttgactgagaagtatgtgtggaggtggaaacagttcctgagtcgtcgggggaagaggacctcccccttggatctcaaactggggcataacaactggctgcgacaagtgcttttcactccagcaacgcaggccgcacggcaggcagcctgtaccattgtggaagctctagccaccattcccagccgcaagcagcaggtcctggacctgcttaccagttacctggatgagctgagcatagctggggagtgtgcagctgagtacctggctctctaccagaagctcatcacttctgcgcactggaaagtctacttggcagctcggggagtcctaccctatgtgggcaacctcatcaccaaggaaatagctcgtctgctggccctggaggaggctaccctgagtaccgatctgcagcagggttatgcccttaaaagtctcacaggccttctctcctcctttgttgaggtggaatccatcaaaagacattttaaaagtcgcttggtgggtactgtgctgaatggatacctgtgcttgcggaagctggtggtgcagaggaccaagctgatcgatgagacgcaggacatgctgctggagatgctggaggacatgaccacaggtacagaatcagaaaccaaggccttcatggctgtgtgcattgagacagccaagcgctacaatctggatgactaccggaccccggtgttcatcttcgagaggctctgcagcatcatttatcctgaggagaatgaagtcactgagttctttgtgaccctggagaaggatccccaacaagaagacttcttacagggcaggatgcctgggaacccgtatagcagcaatgagccaggcatcgggccgctgatgagggatataaagaacaagatttgccaggactgtgacttagtggccctcctggaagatgacagtggcatggagcttctagtgaacaataaaatcattagtttggaccttcctgtggctgaagtttacaagaaagtctggtgtaccacgaatgagggagagcccatgaggattgtttatcgtatgcgggggctgctgggcgatgccacagaggagttcattgagtccctggactctactacagatgaagaagaagatgaagaagaagtgtataaaatggctggtgtgatggcccagtgtgggggcctggaatgcatgcttaacagactcgcagggatcagagatttcaagcagggacgccaccttctaacagtgctactgaaattgttcagttactgcgtgaaggtgaaagtcaaccggcagcaactggtcaaactggaaatgaacaccttgaacgtcatgctggggaccctaaacctggcccttgtagctgaacaagaaagcaaggacagtgggggtgcagctgtggctgagcaggtgcttagcatcatggagatcattctagatgagtccaatgctgagcccctgagtgaggacaagggcaacctcctcctgacaggtgacaaggatcaactggtgatgctcttggaccagatcaacagcacctttgttcgctccaaccccagtgtgctccagggcctgcttcgcatcatcccgtacctttcctttggagaggtggagaaaatgcagatcttggtggagcgattcaaaccatactgcaactttgataaatatgatgaagatcacagtggtgatgataaagtcttcctggactgcttctgtaaaatagctgctggcatcaagaacaacagcaatgggcaccagctgaaggatctgattctccagaaggggatcacccagaatgcacttgactacatgaaaaagcacatccctagcgccaagaatttggatgccgacatctggaaaaagtttttgtctcgcccagccttgccatttatcctaaggctgcttcggggcctggccatccagcaccctggcacccaggttctgattggaactgattccatcccgaacctgcataagctggagcaggtgtccagtgatgagggcattgggaccttggcagagaacctgctggaagccctgcgggaacaccctgacgtaaacaagaagattgacgcagcccgcagggagacccgggcagagaagaaacgcatggccatggcaatgaggcagaaggccctgggcaccctgggcatgacgacaaatgaaaagggccaggtcgtgaccaagacagcactcctgaagcagatggaagagctgatcgaggagcctggcctcacgtgctgcatctgcagggagggatacaagttccagcccacaaaggtcctgggcatttataccttcacgaagcgggtagccttggaggagttggagaataagccccggaaacagcagggctacagcaccgtgtcccacttcaacattgtgcactacgactgccatctggctgccgtcaggttggctcgaggccgggaagagtgggagagtgccgccctgcagaatgccaacaccaagtgcaacgggctccttccggtctggggacctcatgtccctgaatcagcttttgccacttgcttggcaagacacaacacttacctccaggaatgtacaggccagcgggagcccacgtatcagctcaacatccacgacatcaaactgctcttcctgcgcttcgccatggagcagtcgttcagcgcagacactggcgggggcggccgggagagcaacatccacctgatcccgtacatcattcacactgtgctttacgtcctgaacacaacccgagcaacttcccgagaagagaagaacctccaaggctttctggaacagcccaaggagaagtgggtggagagtgcctttgaagtggacgggccctactatttcacagtcttggcccttcacatcctgccccctgagcagtggagagccacacgtgtggaaatcttgcggaggctgttggtgacctcgcaggctcgggcagtggctccaggtggagccaccaggctgacagataaggcagtgaaggactattccgcttaccgttcttcccttctcttttgggccctcgtcgatctcatttacaacatgtttaagaaggtgcctaccagtaacacagagggaggctggtcctgctctctcgctgagtacatccgccacaacgacatgcccatctacgaagctgccgacaaagccctgaaaaccttccaggaggagttcatgccagtggagaccttctcagagttcctcgatgtggccggtcttttatcagaaatcaccgatccagagagcttcctgaaggacctgttgaactcagtcccctgaccaccacacagcagctgcggcggcgaagacgaagctggcttgccttccaccctctgttctccctccttgtgcattaagttccctccgcgggatgctgcattgttaccccgccctcccctctctcatttttcttggtgtggcttggggtttttaggcttcctgttttatctcgtgtgtgtggtgcaccagctatgaggttgtctgtaacccaagccatcaaagggcctgtacatacctaggagccatgagttgtcccggccagcttcatacttgagtgtgcacatcttgagaaataaacaagtgacttaacacacattgaaaaaaaaaaaaaaaagggggggttaaaaaatccggaggggccagttagggtaccggttttgtaaagggccaaagggcgttaagaaggaggcgggtaaagggaggggaagggggtctgggagaccttgggggtatggaaccacgaaagcgaaaaagtaggagttgggtgttgtaataaaggg

SEQ ID NO: 356667 - DNA, 12858 bp, Homo sapiens
gtgacctagaggttccgccacaagcgcgatctcaaaggtccaggtctctttggatgagcatttttctaagatggctgctgagactgatcctcataagtcgtctgagattaccaagaacctacttccagccacgctgcaactcattgacacctatgcatcgttcaccagagcctatttgctgcaaaactttaatgaagagggaacaactgagaaaccttccaaggagaaactgcaaggctttgctgctgttttggctattggctctagcaggtgcaaggcaaatactctgggtccgacactggttcagaatttgccatcgtcagtgcagactgtgtgtgagtcctggaacaacatcaataccaatgaatttcccaatattggatcctggcgcaatgcctttgccaatgacaccatcccttcagagagttatattagtgcagtgcaggctgcacacctggggactctctgtagccaaagtctgcccctggctgcttccctgaagcataccctcctctcactggtcaggttgactggagatcttattgtttggtcagatgagatgaacccaccacaggtaattcggacactgctacctcttcttttggaatcaagcactgagagtgttgccgagatcagtagcaactccctggaacgcatcttgggccctgctgagtctgatgagttcttggctcgtgtttatgagaagctgatcactggttgttacaacattctggccaatcatgcagatcctaacagtggactggatgaatccatcctggaggaatgtctccagtacttggaaaagcagctggaaagtagccaggctcgtaaagctatggaggagtttttctctgacagtggagaacttgtacagatcatgatggcaacagccaatgagaacctctctgctaaattctgtaaccgagttttgaaattcttcaccaaactcttccagctgactgagaagagccctaacccgagcctgttgcatctctgtggctccctggcacaactggcctgtgtggaacctgtgcgcctgcaggcctggctcacccgcatgactacatcgcccccaaaagattctgatcagctggatgtaattcaggagaaccggcagctgctgcagttactgaccacatacattgttcgggaaaacagccaagttggggaaggtgtgtgtgctgttcttctgggcaccctgactcccatggcaacagagatgctggccaacggtgatgggactggcttccctgaacttatggttgtgatggccactctggccagtgcaggtcaaggtgctggtcaccttcagcttcataatgctgctgtggattggctgagcagatgcaagaaatacctgtcacagaagaatgtagttgaaaaactgaatgccaatgtaatgcatggaaagcatgtgatgatcttggagtgcacatgccatatcatgtcttacttggctgatgtcacgaatgccctgagccagagtaatggtcaaggcccaagtcatctctcagtggatggggaagagcgggccattgaagtagactcagactgggtggaggagttggcggtggaagaggaagattcccaggctgaggattcagatgaagattctctttgcaataaactctgcacttttacgatcacacagaaagaattcatgaaccagcattggtaccactgtcacacctgtaaaatggtggatggcgtgggtgtctgcacagtgtgtgctaaggtgtgccacaaggatcatgagatttcctatgccaagtatggatccttcttctgtgactgtggagccaaggaagatggcagctgtttggctctggtgaagagaactcctagcagtggcatgagctctaccatgaaggagtcggcatttcagagtgaacccaggatttcagagagtctagtgcgtcatgccagcacctcctcgccagctgacaaagccaaggttaccatcagtgatggaaaggttgctgacgaagagaagcccaagaagagcagcctctgccgcacagtagagggctgccgggaggaattacagaaccaggccaatttctccttcgctcctctcgtgttagacatgcttaatttccttatggatgccattcagaccaacttccagcaagcttcagccgtcgggagcagcagccgtgctcagcaagccctcagtgagctacacactgtggagaaggcagtggagatgacagaccagctgatggttcccaccttagggtcccaggaaggtgcctttgagaatgtgcggatgaattacagtggagaccagggccagaccatccggcagctgatcagtgctcatgtgctcaggcgggtggctatgtgtgtgctctcctctccccatgggcgccgccaacatttggctgtcagccatgagaagggcaagatcaccgttctgcagctctctgcactcctgaagcaagcagattccagcaaaaggaagttaactctgacccgcttggcttctgccccagttccttttactgtgttgagcctcacaggaaatccctgcaaggaagactacttggcggtttgtgggctaaaggactgtcatgtgctcacctttagtagctcaggctctgtttcggatcacttggttttgcaccctcagttggcaacggggaacttcatcatcaaagccgtgtggttacctggttcacagaccgagttagcaattgtcaccgcagactttgttaagatttatgacctgtgtgttgatgccttgagtccaaccttctattttctcctgccaagctcaaagataagagatgttaccttccttttcaatgaggagggaaagaacatcattgttataatgtcttcggctgggtacatctatactcagcttatggaagaggccagcagtgcccagcagggacccttctatgtcactaatgtgttggaaatcaatcatgaggacctgaaggacagtaacagccaggtggcgggcggtggtgtgtccgtgtactactcccacgtgttgcagatgttgttcttcagctattgtcaaggcaaatcattcgcagccaccatcagcaggacaaccctggaggtgttgcaactcttccccatcaacatcaaaagttccaatggtggcagtaagacttctcctgctctttgccagtggtctgaggtgatgaaccaccctggcttggtgtgctgtgtccagcaaactacaggggtgccgctggtagttatggtgaaaccagacacttttcttatccaggagattaagactcttcctgctaaagcgaagatccaagacatggttgctattaggcacacggcctgcaatgagcagcagcggacaacaatgattctgctgtgtgaggatggcagcctgcgcatttacatggccaacgtggagaacacctcctactggctgcagccatccctgcagcccagcagtgtcatcagcatcatgaagcctgttcgaaagcgcaaaacagctacaatcacaacccgcacgtctagccaggtgactttccccattgacttttttgaacacaaccagcagctgacagatgtggagtttggtggtaacgacctcctacaggtctataatgcacaacagataaaacaccggctgaattccactggcatgtatgtggccaacaccaagcccggaggcttcaccattgagattagtaacaacaatagcactatggtgatgacaggcatgcggatccagattgggactcaagcaatagaacgggccccgtcatatatcgagatcttcggcagaactatgcagctcaacctgagtcgctcacgctggtttgacttccccttcaccagagaagaagccctgcaggctgataagaagctgaacctcttcattggggcctcggtggatccagcaggtgtcaccatgatagatgctgtaaaaatttatggcaagactaaggagcagtttggctggcctgatgagcccccagaagaattcccttctgcctctgtcagcaacatctgcccttcaaatctgaaccagagcaacggcactggagatagcgactcagctgcccccactacgaccagtggaactgtcctggagaggctggttgtgagttctttagaagccctggaaagctgctttgccgttggcccaatcatcgagaaggagagaaacaagaatgctgctcaggagctggccactttgctgttgtccctgccagcacctgccagtgtccagcagcagtccaagagccttctggccagcctgcacaccagccgctcggcctaccacagccacaaggatcaggccttgctgagcaaagctgtgcagtgtctcaacacatctagcaaagagggcaaggatttggaccctgaggtgttccagaggctagtgatcacagctcgctccattgccatcatgcgccccaacaaccttgtccactttacggagtcaaagctgccccagatggaaacagactgtttttttcctagatgtgcctgctggagtctagggatagttggcatattgattggggccccacttgaaactccctccccaggcaagcttccttgacctgagttaaccttaaaacaaattaaattccatctcagatttaccatcgttgataattttctttctcctgcttagaaggaatggatgaagggaaggaaccgcagaagcagttggaaggagattgctgtagtttcatcacccagcttgtgaaccacttctggaaactccatgcatccaaacccaagaatgccttcttggcacctgcctgccttccaggactaactcatattgaagctactgtcaatgctctggtggacatcatccatggctactgtacctgtgagctggattgtattaacacagcatccaagatctacatgcagatgctcttgtgtcctgatcctgctgtgagcttctcttgtaaacaagctctaattcgagtcctaaggcccaggaacaaacggagacatgtgactttaccctcttcccctcgaagcaacactccaatgggagacaaggatgatgatgacgatgatgatgcagatgagaaaatgcagtcatcagggatcccgaatggtggtcacatccgtcaggaaagccaggaacagagtgaggtggaccatggagattttgagatggtgtctgagtcgatggtcctggagacagctgaaaatgtcaacaatggcaacccctctcccctggaggccctgctggcaggcgcagagggcttcccccccatgctggacatcccacctgatgcagatgacgagaccatggttgaactagccattgccctgagcctgcagcaggaccaacaaggcagcagcagcagtgccctgggcctgcagagcctgggactgtccggccaggcacccagctcttcctctctggacgcaggaaccctctctgacaccacagcatcagctccagcctcagacgacgagggcagtacagcagcgacagatggttctacccttcggacctctcctgctgaccacggtggtagtgtgggctcggagagcgggggcagtgcagtggactcagtggctggcgagcacagtgtatctggccggagcagtgcttatggcgatgctacagctgaggggcatccggctggaccaggaagtgtcagctcaagcactggagccatcagcaccaccactgggcaccaggagggagatggctccgagggagaaggagaaggagaaactgaaggagatgtccacactagcaacaggctgcacatggtccgtctaatgctgttggagagattactgcagaccctgcctcaattacgaaacgttggcggtgtccgggccatcccatacatgcaggtcattctaatgctcactacagatctggatggagaagatgagaaagacaagggggccctagacaacctgctctcccagcttattgctgagttgggtatggataaaaaggatgtctccaagaagaatgagcgcagcgccctgaatgaagtccatctggtagtaatgagactcctgagtgtcttcatgtcccgcaccaaatctggatccaagtcttccatatgtgagtcatcttccctcatctccagtgccacagcagcagctctactgagctctggggctgtggactactgcctgcacgtgctcaaatcactgctggaatattggaagagccaacagaatgacgaggagcctgtggctaccagccagttgctgaaaccacatactacctcctccccacctgacatgagcccattctttctccgccagtatgtgaagggtcatgctgctgatgtgtttgaggcctatactcagcttctaacagaaatggtactgaggcttccttaccaaatcaaaaagattactgacaccaattctcgaatcccacctcctgtctttgaccactcgtggttttactttctctccgagtacctcatgatccagcagactccatttgtgcgccgtcaagtccgcaaacttctgctcttcatctgtggatccaaagagaagtaccgccagctccgggatttgcacaccctggactctcacgtgcgtgggatcaagaagctgctagaagagcaggggatattcctccgggcaagtgtggttacagccagctcaggctccgccttgcaatatgacacactcatcagcctgatggagcacctgaaagcctgtgcagagattgccgcccagcgaaccatcaactggcagaaattctgcatcaaagatgactccgtcctgtacttcctcctccaagtcagtttccttgtggatgagggcgtgtccccagtgctgctgcaactgctctcctgtgctctctgcggcagcaaggtgctcgctgcactggcagcctcttcgggatcctccagtgcttcttcctcctcagcccctgtggctgccagttctggacaagccacaacacagtccaagtcttccactaaaaagagcaagaaagaagaaaaagaaaaggagaaagatggtgagacctctggcagccaggaggaccagctgtgcacagctctggtgaaccagctgaacaaatttgccgataaggaaaccctgatccagttcctgcgttgtttcctgttagagtccaattcttcctcggtgcgctggcaggcccactgtctgacactgcacatctacagaaattccagcaaatctcaacaggagctcctgctagatctgatgtggtccatctggccagaactcccagcctatggtcgtaaggctgcccagtttgtggacctactaggatatttctccctgaaaactccacaaacagagaagaagttgaaggagtattcacagaaggctgtggagattctgcggactcaaaaccatattcttaccaaccaccccaactcgaacatttataacactttgtctggcttagtggagtttgatggctattacctggagagcgatccctgcctggtgtgtaataacccggaagtaccgttctgttatatcaagctgtcttccattaaagtggacacgcggtacaccaccacccagcaggttgtgaagctcattggcagtcacaccatcagcaaagtgacagtgaaaatcggggatctgaaacggaccaagatggtgcggaccatcaacctgtattataacaaccgaaccgtgcaggccatcgtggagttgaaaaacaagccagctcgctggcacaaagccaagaaggttcagctgacccctggacagacagaggtgaagattgacctgccgttgcccattgtggcctccaatctgatgattgagtttgcagacttctatgaaaactaccaggcctccacagagaccctgcagtgccctcgctgtagtgcctcggtccctgccaacccaggagtctgtggcaactgtggagagaatgtgtaccagtgtcacaaatgcagatccatcaactacgatgaaaaggatcccttcctctgcaatgcctgtggcttctgtaaatatgcccgcttcgacttcatgctctatgccaagccttgctgtgcagtggatcccattgagaatgaagaagaccggaagaaggctgtatccaacatcaatacacttttggacaaagctgatcgagtgtatcatcagctgatgggacaccggccacagctggagaacctgctctgcaaagtgaatgaggcagctccagaaaagccacaggatgactcaggaacagcagggggcatcagctccacttctgccagtgtgaatcgttacatcctgcagttggctcaggagtattgtggagactgcaagaactcttttgatgaactctccaaaatcatccagaaagtctttgcttcgcgcaaagagttgttggaatatgacctacagcagagggaagcagccactaaatcatcccggacctccgtgcagcccacattcactgccagccagtaccgtgccttatccgtcctgggctgtggccacacatcctccaccaagtgctatggctgcgcctcggctgtcacagaacattgtatcacactacttcgggccctggccaccaacccagccttgaggcacatccttgtctcccagggccttatccgggagctctttgattataatcttcgccgaggggctgcggccatgcgggaggaggtccgccagctcatgtgcctcctaactcgagacaacccagaagccacccaacagatgaatgacctgattattggcaaggtctccacagccctgaagggccactgggccaaccccgatctggcaagtagcctgcagtatgaaatgctgctgctgacggattctatctccaaggaggacagctgctgggagctccggttacgctgtgctctcagccttttcctcatggctgtgaacattaagactcctgtggtggttgaaaacattaccctcatgtgcctgaggatcttgcagaagctgataaaaccacctgctcccactagcaagaagaacaaggatgtccccgtcgaggccctcaccacggtgaagccatactgcaatgagatccatgcccaggctcaactgtggctcaagagagaccccaaggcatcctatgatgcctggaagaagtgtcttcctatcagagggatagatggcaatgggaaagcccccagcaaatcagagctccgccatctctatttgactgagaagtatgtgtggaggtggaaacagttcctgagtcgtcgggggaagaggacctcccccttggatctcaaactggggcataacaactggctgcgacaagtgcttttcactccagcaacgcaggccgcacggcaggcagcctgtaccattgtggaagctctagccaccattcccagccgcaagcagcaggtcctggacctgcttaccagttacctggatgagctgagcatagctggggagtgtgcagctgagtacctggctctctaccagaagctcatcacttctgcgcactggaaagtctacttggcagctcggggagtcctaccctatgtgggcaacctcatcaccaaggaaatagctcgtctgctggccctggaggaggctaccctgagtaccgatctgcagcagggttatgcccttaaaagtctcacaggccttctctcctcctttgttgaggtggaatccatcaaaagacattttaaaagtcgcttggtgggtactgtgctgaatggatacctgtgcttgcggaagctggtggtgcagaggaccaagctgatcgatgagacgcaggacatgctgctggagatgctggaggacatgaccacaggtacagaatcagaaaccaaggccttcatggctgtgtgcattgagacagccaagcgctacaatctggatgactaccggaccccggtgttcatcttcgagaggctctgcagcatcatttatcctgaggagaatgaagtcactgagttctttgtgaccctggagaaggatccccaacaagaagacttcttacagggcaggatgcctgggaacccgtatagcagcaatgagccaggcatcgggccgctgatgagggatataaagaacaagatttgccaggactgtgacttagtggccctcctggaagatgacagtggcatggagcttctagtgaacaataaaatcattagtttggaccttcctgtggctgaagtttacaagaaagtctggtgtaccacgaatgagggagagcccatgaggattgtttatcgtatgcgggggctgctgggcgatgccacagaggagttcattgagtccctggactctactacagatgaagaagaagatgaagaagaagtgtataaaatggctggtgtgatggcccagtgtgggggcctggaatgcatgcttaacagactcgcagggatcagagatttcaagcagggacgccaccttctaacagtgctactgaaattgttcagttactgcgtgaaggtgaaagtcaaccggcagcaactggtcaaactggaaatgaacaccttgaacgtcatgctggggaccctaaacctggcccttgtagctgaacaagaaagcaaggacagtgggggtgcagctgtggctgagcaggtgcttagcatcatggagatcattctagatgagtccaatgctgagcccctgagtgaggacaagggcaacctcctcctgacaggtgacaaggatcaactggtgatgctcttggaccagatcaacagcacctttgttcgctccaaccccagtgtgctccagggcctgcttcgcatcatcccgtacctttcctttggagaggtggagaaaatgcagatcttggtggagcgattcaaaccatactgcaactttgataaatatgatgaagatcacagtggtgatgataaagtcttcctggactgcttctgtaaaatagctgctggcatcaagaacaacagcaatgggcaccagctgaaggatctgattctccagaaggggatcacccagaatgcacttgactacatgaaaaagcacatccctagcgccaagaatttggatgccgacatctggaaaaagtttttgtctcgcccagccttgccatttatcctaaggctgcttcggggcctggccatccagcaccctggcacccaggttctgattggaactgattccatcccgaacctgcataagctggagcaggtgtccagtgatgagggcattgggaccttggcagagaacctgctggaagccctgcgggaacaccctgacgtaaacaagaagattgacgcagcccgcagggagacccgggcagagaagaaacgcatggccatggcaatgaggcagaaggccctgggcaccctgggcatgacgacaaatgaaaagggccaggtcgtgaccaagacagcactcctgaagcagatggaagagctgatcgaggagcctggcctcacgtgctgcatctgcagggagggatacaagttccagcccacaaaggtcctgggcatttataccttcacgaagcgggtagccttggaggagttggagaataagccccggaaacagcagggctacagcaccgtgtcccacttcaacattgtgcactacgactgccatctggctgccgtcaggttggctcgaggccgggaagagtgggagagtgccgccctgcagaatgccaacaccaagtgcaacgggctccttccggtctggggacctcatgtccctgaatcagcttttgccacttgcttggcaagacacaacacttacctccaggaatgtacaggccagcgggagcccacgtatcagctcaacatccacgacatcaaactgctcttcctgcgcttcgccatggagcagtcgttcagcgcagacactggcgggggcggccgggagagcaacatccacctgatcccgtacatcattcacactgtgctttacgtcctgaacacaacccgagcaacttcccgagaagagaagaacctccaaggctttctggaacagcccaaggagaagtgggtggagagtgcctttgaagtggacgggccctactatttcacagtcttggcccttcacatcctgccccctgagcagtggagagccacacgtgtggaaatcttgcggaggctgttggtgacctcgcaggctcgggcagtggctccaggtggagccaccaggctgacagataaggcagtgaaggactattccgcttaccgttcttcccttctcttttgggccctcgtcgatctcatttacaacatgtttaagaaggtgcctaccagtaacacagagggaggctggtcctgctctctcgctgagtacatccgccacaacgacatgcccatctacgaagctgccgacaaagccctgaaaaccttccaggaggagttcatgccagtggagaccttctcagagttcctcgatgtggccggtcttttatcagaaatcaccgatccagagagcttcctgaaggacctgttgaactcagtcccctgaccaccacacagcagctgcggcggcgaagacgaagctggcttgccttccaccctctgttctccctccttgtgcattaagttccctccgcgggatgctgcattgttaccccgccctcccctctctcatttttcttggtgtggcttggggtttttaggcttcctgttttatctcgtgtgtgtggtgcaccagctatgaggttgtctgtaacccaagccatcaaagggcctgtacatacctaggagccatgagttgtcccggccagcttcatacttgagtgtgcacatcttgagaaataaacaagtgacttaacacacattgaaaaaaaaaaaagtgcattatactaccggtagatgctccgtagcgacggttgtcttcagcctgtctttcgcgcggtcgtttgtttcctcgcccgttcctttaagagggataataaacttccccccccagccgcatgcctgattttcgagtagaagaggcatatttcca

SEQ ID NO: 356668 - DNA, 13040 bp, Homo sapiens
  misc_feature (12697)..(12697): n is a, c, g, or t
  misc_feature (12699)..(12699): n is a, c, g, or t
  misc_feature (12703)..(12703): n is a, c, g, or t
  misc_feature (12811)..(12811): n is a, c, g, or t
gtgacctagaggttccgccacaagcgcgatctcaaaggtccaggtctctttggatgagcatttttctaagatggctgctgagactgatcctcataagtcgtctgagattaccaagaacctacttccagccacgctgcaactcattgacacctatgcatcgttcaccagagcctatttgctgcaaaactttaatgaagagggaacaactgagaaaccttccaaggagaaactgcaaggctttgctgctgttttggctattggctctagcaggtgcaaggcaaatactctgggtccgacactggttcagaatttgccatcgtcagtgcagactgtgtgtgagtcctggaacaacatcaataccaatgaatttcccaatattggatcctggcgcaatgcctttgccaatgacaccatcccttcagagagttatattagtgcagtgcaggctgcacacctggggactctctgtagccaaagtctgcccctggctgcttccctgaagcataccctcctctcactggtcaggttgactggagatcttattgtttggtcagatgagatgaacccaccacaggtaattcggacactgctacctcttcttttggaatcaagcactgagagtgttgccgagatcagtagcaactccctggaacgcatcttgggccctgctgagtctgatgagttcttggctcgtgtttatgagaagctgatcactggttgttacaacattctggccaatcatgcagatcctaacagtggactggatgaatccatcctggaggaatgtctccagtacttggaaaagcagctggaaagtagccaggctcgtaaagctatggaggagtttttctctgacagtggagaacttgtacagatcatgatggcaacagccaatgagaacctctctgctaaattctgtaaccgagttttgaaattcttcaccaaactcttccagctgactgagaagagccctaacccgagcctgttgcatctctgtggctccctggcacaactggcctgtgtggaacctgtgcgcctgcaggcctggctcacccgcatgactacatcgcccccaaaagattctgatcagctggatgtaattcaggagaaccggcagctgctgcagttactgaccacatacattgttcgggaaaacagccaagttggggaaggtgtgtgtgctgttcttctgggcaccctgactcccatggcaacagagatgctggccaacggtgatgggactggcttccctgaacttatggttgtgatggccactctggccagtgcaggtcaaggtgctggtcaccttcagcttcataatgctgctgtggattggctgagcagatgcaagaaatacctgtcacagaagaatgtagttgaaaaactgaatgccaatgtaatgcatggaaagcatgtgatgatcttggagtgcacatgccatatcatgtcttacttggctgatgtcacgaatgccctgagccagagtaatggtcaaggcccaagtcatctctcagtggatggggaagagcgggccattgaagtagactcagactgggtggaggagttggcggtggaagaggaagattcccaggctgaggattcagatgaagattctctttgcaataaactctgcacttttacgatcacacagaaagaattcatgaaccagcattggtaccactgtcacacctgtaaaatggtggatggcgtgggtgtctgcacagtgtgtgctaaggtgtgccacaaggatcatgagatttcctatgccaagtatggatccttcttctgtgactgtggagccaaggaagatggcagctgtttggctctggtgaagagaactcctagcagtggcatgagctctaccatgaaggagtcggcatttcagagtgaacccaggatttcagagagtctagtgcgtcatgccagcacctcctcgccagctgacaaagccaaggttaccatcagtgatggaaaggttgctgacgaagagaagcccaagaagagcagcctctgccgcacagtagagggctgccgggaggaattacagaaccaggccaatttctccttcgctcctctcgtgttagacatgcttaatttccttatggatgccattcagaccaacttccagcaagcttcagccgtcgggagcagcagccgtgctcagcaagccctcagtgagctacacactgtggagaaggcagtggagatgacagaccagctgatggttcccaccttagggtcccaggaaggtgcctttgagaatgtgcggatgaattacagtggagaccagggccagaccatccggcagctgatcagtgctcatgtgctcaggcgggtggctatgtgtgtgctctcctctccccatgggcgccgccaacatttggctgtcagccatgagaagggcaagatcaccgttctgcagctctctgcactcctgaagcaagcagattccagcaaaaggaagttaactctgacccgcttggcttctgccccagttccttttactgtgttgagcctcacaggaaatccctgcaaggaagactacttggcggtttgtgggctaaaggactgtcatgtgctcacctttagtagctcaggctctgtttcggatcacttggttttgcaccctcagttggcaacggggaacttcatcatcaaagccgtgtggttacctggttcacagaccgagttagcaattgtcaccgcagactttgttaagatttatgacctgtgtgttgatgccttgagtccaaccttctattttctcctgccaagctcaaagataagagatgttaccttccttttcaatgaggagggaaagaacatcattgttataatgtcttcggctgggtacatctatactcagcttatggaagaggccagcagtgcccagcagggacccttctatgtcactaatgtgttggaaatcaatcatgaggacctgaaggacagtaacagccaggtggcgggcggtggtgtgtccgtgtactactcccacgtgttgcagatgttgttcttcagctattgtcaaggcaaatcattcgcagccaccatcagcaggacaaccctggaggtgttgcaactcttccccatcaacatcaaaagttccaatggtggcagtaagacttctcctgctctttgccagtggtctgaggtgatgaaccaccctggcttggtgtgctgtgtccagcaaactacaggggtgccgctggtagttatggtgaaaccagacacttttcttatccaggagattaagactcttcctgctaaagcgaagatccaagacatggttgctattaggcacacggcctgcaatgagcagcagcggacaacaatgattctgctgtgtgaggatggcagcctgcgcatttacatggccaacgtggagaacacctcctactggctgcagccatccctgcagcccagcagtgtcatcagcatcatgaagcctgttcgaaagcgcaaaacagctacaatcacaacccgcacgtctagccaggtgactttccccattgacttttttgaacacaaccagcagctgacagatgtggagtttggtggtaacgacctcctacaggtctataatgcacaacagataaaacaccggctgaattccactggcatgtatgtggccaacaccaagcccggaggcttcaccattgagattagtaacaacaatagcactatggtgatgacaggcatgcggatccagattgggactcaagcaatagaacgggccccgtcatatatcgagatcttcggcagaactatgcagctcaacctgagtcgctcacgctggtttgacttccccttcaccagagaagaagccctgcaggctgataagaagctgaacctcttcattggggcctcggtggatccagcaggtgtcaccatgatagatgctgtaaaaatttatggcaagactaaggagcagtttggctggcctgatgagcccccagaagaattcccttctgcctctgtcagcaacatctgcccttcaaatctgaaccagagcaacggcactggagatagcgactcagctgcccccactacgaccagtggaactgtcctggagaggctggttgtgagttctttagaagccctggaaagctgctttgccgttggcccaatcatcgagaaggagagaaacaagaatgctgctcaggagctggccactttgctgttgtccctgccagcacctgccagtgtccagcagcagtccaagagccttctggccagcctgcacaccagccgctcggcctaccacagccacaaggatcaggccttgctgagcaaagctgtgcagtgtctcaacacatctagcaaagagggcaaggatttggaccctgaggtgttccagaggctagtgatcacagctcgctccattgccatcatgcgccccaacaaccttgtccactttacggagtcaaagctgccccagatggaaacagactgtttttttcctagatgtgcctgctggagtctagggatagttggcatattgattggggccccacttgaaactccctccccaggcaagcttccttgacctgagttaaccttaaaacaaattaaattccatctcagatttaccatcgttgataattttctttctcctgcttagaaggaatggatgaagggaaggaaccgcagaagcagttggaaggagattgctgtagtttcatcacccagcttgtgaaccacttctggaaactccatgcatccaaacccaagaatgccttcttggcacctgcctgccttccaggactaactcatattgaagctactgtcaatgctctggtggacatcatccatggctactgtacctgtgagctggattgtattaacacagcatccaagatctacatgcagatgctcttgtgtcctgatcctgctgtgagcttctcttgtaaacaagctctaattcgagtcctaaggcccaggaacaaacggagacatgtgactttaccctcttcccctcgaagcaacactccaatgggagacaaggatgatgatgacgatgatgatgcagatgagaaaatgcagtcatcagggatcccgaatggtggtcacatccgtcaggaaagccaggaacagagtgaggtggaccatggagattttgagatggtgtctgagtcgatggtcctggagacagctgaaaatgtcaacaatggcaacccctctcccctggaggccctgctggcaggcgcagagggcttcccccccatgctggacatcccacctgatgcagatgacgagaccatggttgaactagccattgccctgagcctgcagcaggaccaacaaggcagcagcagcagtgccctgggcctgcagagcctgggactgtccggccaggcacccagctcttcctctctggacgcaggaaccctctctgacaccacagcatcagctccagcctcagacgacgagggcagtacagcagcgacagatggttctacccttcggacctctcctgctgaccacggtggtagtgtgggctcggagagcgggggcagtgcagtggactcagtggctggcgagcacagtgtatctggccggagcagtgcttatggcgatgctacagctgaggggcatccggctggaccaggaagtgtcagctcaagcactggagccatcagcaccaccactgggcaccaggagggagatggctccgagggagaaggagaaggagaaactgaaggagatgtccacactagcaacaggctgcacatggtccgtctaatgctgttggagagattactgcagaccctgcctcaattacgaaacgttggcggtgtccgggccatcccatacatgcaggtcattctaatgctcactacagatctggatggagaagatgagaaagacaagggggccctagacaacctgctctcccagcttattgctgagttgggtatggataaaaaggatgtctccaagaagaatgagcgcagcgccctgaatgaagtccatctggtagtaatgagactcctgagtgtcttcatgtcccgcaccaaatctggatccaagtcttccatatgtgagtcatcttccctcatctccagtgccacagcagcagctctactgagctctggggctgtggactactgcctgcacgtgctcaaatcactgctggaatattggaagagccaacagaatgacgaggagcctgtggctaccagccagttgctgaaaccacatactacctcctccccacctgacatgagcccattctttctccgccagtatgtgaagggtcatgctgctgatgtgtttgaggcctatactcagcttctaacagaaatggtactgaggcttccttaccaaatcaaaaagattactgacaccaattctcgaatcccacctcctgtctttgaccactcgtggttttactttctctccgagtacctcatgatccagcagactccatttgtgcgccgtcaagtccgcaaacttctgctcttcatctgtggatccaaagagaagtaccgccagctccgggatttgcacaccctggactctcacgtgcgtgggatcaagaagctgctagaagagcaggggatattcctccgggcaagtgtggttacagccagctcaggctccgccttgcaatatgacacactcatcagcctgatggagcacctgaaagcctgtgcagagattgccgcccagcgaaccatcaactggcagaaattctgcatcaaagatgactccgtcctgtacttcctcctccaagtcagtttccttgtggatgagggcgtgtccccagtgctgctgcaactgctctcctgtgctctctgcggcagcaaggtgctcgctgcactggcagcctcttcgggatcctccagtgcttcttcctcctcagcccctgtggctgccagttctggacaagccacaacacagtccaagtcttccactaaaaagagcaagaaagaagaaaaagaaaaggagaaagatggtgagacctctggcagccaggaggaccagctgtgcacagctctggtgaaccagctgaacaaatttgccgataaggaaaccctgatccagttcctgcgttgtttcctgttagagtccaattcttcctcggtgcgctggcaggcccactgtctgacactgcacatctacagaaattccagcaaatctcaacaggagctcctgctagatctgatgtggtccatctggccagaactcccagcctatggtcgtaaggctgcccagtttgtggacctactaggatatttctccctgaaaactccacaaacagagaagaagttgaaggagtattcacagaaggctgtggagattctgcggactcaaaaccatattcttaccaaccaccccaactcgaacatttataacactttgtctggcttagtggagtttgatggctattacctggagagcgatccctgcctggtgtgtaataacccggaagtaccgttctgttatatcaagctgtcttccattaaagtggacacgcggtacaccaccacccagcaggttgtgaagctcattggcagtcacaccatcagcaaagtgacagtgaaaatcggggatctgaaacggaccaagatggtgcggaccatcaacctgtattataacaaccgaaccgtgcaggccatcgtggagttgaaaaacaagccagctcgctggcacaaagccaagaaggttcagctgacccctggacagacagaggtgaagattgacctgccgttgcccattgtggcctccaatctgatgattgagtttgcagacttctatgaaaactaccaggcctccacagagaccctgcagtgccctcgctgtagtgcctcggtccctgccaacccaggagtctgtggcaactgtggagagaatgtgtaccagtgtcacaaatgcagatccatcaactacgatgaaaaggatcccttcctctgcaatgcctgtggcttctgtaaatatgcccgcttcgacttcatgctctatgccaagccttgctgtgcagtggatcccattgagaatgaagaagaccggaagaaggctgtatccaacatcaatacacttttggacaaagctgatcgagtgtatcatcagctgatgggacaccggccacagctggagaacctgctctgcaaagtgaatgaggcagctccagaaaagccacaggatgactcaggaacagcagggggcatcagctccacttctgccagtgtgaatcgttacatcctgcagttggctcaggagtattgtggagactgcaagaactcttttgatgaactctccaaaatcatccagaaagtctttgcttcgcgcaaagagttgttggaatatgacctacagcagagggaagcagccactaaatcatcccggacctccgtgcagcccacattcactgccagccagtaccgtgccttatccgtcctgggctgtggccacacatcctccaccaagtgctatggctgcgcctcggctgtcacagaacattgtatcacactacttcgggccctggccaccaacccagccttgaggcacatccttgtctcccagggccttatccgggagctctttgattataatcttcgccgaggggctgcggccatgcgggaggaggtccgccagctcatgtgcctcctaactcgagacaacccagaagccacccaacagatgaatgacctgattattggcaaggtctccacagccctgaagggccactgggccaaccccgatctggcaagtagcctgcagtatgaaatgctgctgctgacggattctatctccaaggaggacagctgctgggagctccggttacgctgtgctctcagccttttcctcatggctgtgaacattaagactcctgtggtggttgaaaacattaccctcatgtgcctgaggatcttgcagaagctgataaaaccacctgctcccactagcaagaagaacaaggatgtccccgtcgaggccctcaccacggtgaagccatactgcaatgagatccatgcccaggctcaactgtggctcaagagagaccccaaggcatcctatgatgcctggaagaagtgtcttcctatcagagggatagatggcaatgggaaagcccccagcaaatcagagctccgccatctctatttgactgagaagtatgtgtggaggtggaaacagttcctgagtcgtcgggggaagaggacctcccccttggatctcaaactggggcataacaactggctgcgacaagtgcttttcactccagcaacgcaggccgcacggcaggcagcctgtaccattgtggaagctctagccaccattcccagccgcaagcagcaggtcctggacctgcttaccagttacctggatgagctgagcatagctggggagtgtgcagctgagtacctggctctctaccagaagctcatcacttctgcgcactggaaagtctacttggcagctcggggagtcctaccctatgtgggcaacctcatcaccaaggaaatagctcgtctgctggccctggaggaggctaccctgagtaccgatctgcagcagggttatgcccttaaaagtctcacaggccttctctcctcctttgttgaggtggaatccatcaaaagacattttaaaagtcgcttggtgggtactgtgctgaatggatacctgtgcttgcggaagctggtggtgcagaggaccaagctgatcgatgagacgcaggacatgctgctggagatgctggaggacatgaccacaggtacagaatcagaaaccaaggccttcatggctgtgtgcattgagacagccaagcgctacaatctggatgactaccggaccccggtgttcatcttcgagaggctctgcagcatcatttatcctgaggagaatgaagtcactgagttctttgtgaccctggagaaggatccccaacaagaagacttcttacagggcaggatgcctgggaacccgtatagcagcaatgagccaggcatcgggccgctgatgagggatataaagaacaagatttgccaggactgtgacttagtggccctcctggaagatgacagtggcatggagcttctagtgaacaataaaatcattagtttggaccttcctgtggctgaagtttacaagaaagtctggtgtaccacgaatgagggagagcccatgaggattgtttatcgtatgcgggggctgctgggcgatgccacagaggagttcattgagtccctggactctactacagatgaagaagaagatgaagaagaagtgtataaaatggctggtgtgatggcccagtgtgggggcctggaatgcatgcttaacagactcgcagggatcagagatttcaagcagggacgccaccttctaacagtgctactgaaattgttcagttactgcgtgaaggtgaaagtcaaccggcagcaactggtcaaactggaaatgaacaccttgaacgtcatgctggggaccctaaacctggcccttgtagctgaacaagaaagcaaggacagtgggggtgcagctgtggctgagcaggtgcttagcatcatggagatcattctagatgagtccaatgctgagcccctgagtgaggacaagggcaacctcctcctgacaggtgacaaggatcaactggtgatgctcttggaccagatcaacagcacctttgttcgctccaaccccagtgtgctccagggcctgcttcgcatcatcccgtacctttcctttggagaggtggagaaaatgcagatcttggtggagcgattcaaaccatactgcaactttgataaatatgatgaagatcacagtggtgatgataaagtcttcctggactgcttctgtaaaatagctgctggcatcaagaacaacagcaatgggcaccagctgaaggatctgattctccagaaggggatcacccagaatgcacttgactacatgaaaaagcacatccctagcgccaagaatttggatgccgacatctggaaaaagtttttgtctcgcccagccttgccatttatcctaaggctgcttcggggcctggccatccagcaccctggcacccaggttctgattggaactgattccatcccgaacctgcataagctggagcaggtgtccagtgatgagggcattgggaccttggcagagaacctgctggaagccctgcgggaacaccctgacgtaaacaagaagattgacgcagcccgcagggagacccgggcagagaagaaacgcatggccatggcaatgaggcagaaggccctgggcaccctgggcatgacgacaaatgaaaagggccaggtcgtgaccaagacagcactcctgaagcagatggaagagctgatcgaggagcctggcctcacgtgctgcatctgcagggagggatacaagttccagcccacaaaggtcctgggcatttataccttcacgaagcgggtagccttggaggagttggagaataagccccggaaacagcagggctacagcaccgtgtcccacttcaacattgtgcactacgactgccatctggctgccgtcaggttggctcgaggccgggaagagtgggagagtgccgccctgcagaatgccaacaccaagtgcaacgggctccttccggtctggggacctcatgtccctgaatcagcttttgccacttgcttggcaagacacaacacttacctccaggaatgtacaggccagcgggagcccacgtatcagctcaacatccacgacatcaaactgctcttcctgcgcttcgccatggagcagtcgttcagcgcagacactggcgggggcggccgggagagcaacatccacctgatcccgtacatcattcacactgtgctttacgtcctgaacacaacccgagcaacttcccgagaagagaagaacctccaaggctttctggaacagcccaaggagaagtgggtggagagtgcctttgaagtggacgggccctactatttcacagtcttggcccttcacatcctgccccctgagcagtggagagccacacgtgtggaaatcttgcggaggctgttggtgacctcgcaggctcgggcagtggctccaggtggagccaccaggctgacagataaggcagtgaaggactattccgcttaccgttcttcccttctcttttgggccctcgtcgatctcatttacaacatgtttaagaaggtgcctaccagtaacacagagggaggctggtcctgctctctcgctgagtacatccgccacaacgacatgcccatctacgaagctgccgacaaagccctgaaaaccttccaggaggagttcatgccagtggagaccttctcagagttcctcgatgtggccggtcttttatcagaaatcaccgatccagagagcttcctgaaggacctgttgaactcagtcccctgaccaccacacagcagctgcggcggcgaagacgaagctggcttgccttccaccctctgttctccctccttgtgcattaagttccctccgcgggatgctgcattgttaccccgccctcccctctctcatttttcttggtgtggcttggggtttttaggcttcctgttttatctcgtgtgtgtggtgcaccagctatgaggttgtctgtaacccaagccatcaaagggcctgtacatacctaggagccatgagttgtcccggccagcttcatacttgagtgtgcacatcttgagaaataaacaagtgacttaacacacattgaaaaaananaaanaaaaaaagaaaaaaaaaaacaaaaaaaaaaaaaaaaaaaaaaggggggggggcccccaaaaaatccccacgcggggggggccccaagatgatgccgcccccccgcagntattttgggtagatgacagaggaggggccccccccaatagagagggggcacccctatttattaataaaagcgcacagcgacgcgggccgccccgctatttacacaaacgcgcggcggacggaggtgagaaaacaacgtgccgacgcgggaggacaccttttgggaagggaccccccactgaccgcgggggggggggaacacacaagtggggccaccaacactccccgga

SEQ ID NO: 356669 - DNA, 12511 bp, Homo sapiens
gtgacctagaggttccgccacaagcgcgatctcaaaggtccaggtctctttggatgagcatttttctaagatggctgctgagactgatcctcataagtcgtctgagattaccaagaacctacttccagccacgctgcaactcattgacacctatgcatcgttcaccagagcctatttgctgcaaaactttaatgaagagggaacaactgagaaaccttccaaggagaaactgcaaggctttgctgctgttttggctattggctctagcaggtgcaaggcaaatactctgggtccgacactggttcagaatttgccatcgtcagtgcagactgtgtgtgagtcctggaacaacatcaataccaatgaatttcccaatattggatcctggcgcaatgcctttgccaatgacaccatcccttcagagagttatattagtgcagtgcaggctgcacacctggggactctctgtagccaaagtctgcccctggctgcttccctgaagcataccctcctctcactggtcaggttgactggagatcttattgtttggtcagatgagatgaacccaccacaggtaattcggacactgctacctcttcttttggaatcaagcactgagagtgttgccgagatcagtagcaactccctggaacgcatcttgggccctgctgagtctgatgagttcttggctcgtgtttatgagaagctgatcactggttgttacaacattctggccaatcatgcagatcctaacagtggactggatgaatccatcctggaggaatgtctccagtacttggaaaagcagctggaaagtagccaggctcgtaaagctatggaggagtttttctctgacagtggagaacttgtacagatcatgatggcaacagccaatgagaacctctctgctaaattctgtaaccgagttttgaaattcttcaccaaactcttccagctgactgagaagagccctaacccgagcctgttgcatctctgtggctccctggcacaactggcctgtgtggaacctgtgcgcctgcaggcctggctcacccgcatgactacatcgcccccaaaagattctgatcagctggatgtaattcaggagaaccggcagctgctgcagttactgaccacatacattgttcgggaaaacagccaagttggggaaggtgtgtgtgctgttcttctgggcaccctgactcccatggcaacagagatgctggccaacggtgatgggactggcttccctgaacttatggttgtgatggccactctggccagtgcaggtcaaggtgctggtcaccttcagcttcataatgctgctgtggattggctgagcagatgcaagaaatacctgtcacagaagaatgtagttgaaaaactgaatgccaatgtaatgcatggaaagcatgtgatgatcttggagtgcacatgccatatcatgtcttacttggctgatgtcacgaatgccctgagccagagtaatggtcaaggcccaagtcatctctcagtggatggggaagagcgggccattgaagtagactcagactgggtggaggagttggcggtggaagaggaagattcccaggctgaggattcagatgaagattctctttgcaataaactctgcacttttacgatcacacagaaagaattcatgaaccagcattggtaccactgtcacacctgtaaaatggtggatggcgtgggtgtctgcacagtgtgtgctaaggtgtgccacaaggatcatgagatttcctatgccaagtatggatccttcttctgtgactgtggagccaaggaagatggcagctgtttggctctggtgaagagaactcctagcagtggcatgagctctaccatgaaggagtcggcatttcagagtgaacccaggatttcagagagtctagtgcgtcatgccagcacctcctcgccagctgacaaagccaaggttaccatcagtgatggaaaggttgctgacgaagagaagcccaagaagagcagcctctgccgcacagtagagggctgccgggaggaattacagaaccaggccaatttctccttcgctcctctcgtgttagacatgcttaatttccttatggatgccattcagaccaacttccagcaagcttcagccgtcgggagcagcagccgtgctcagcaagccctcagtgagctacacactgtggagaaggcagtggagatgacagaccagctgatggttcccaccttagggtcccaggaaggtgcctttgagaatgtgcggatgaattacagtggagaccagggccagaccatccggcagctgatcagtgctcatgtgctcaggcgggtggctatgtgtgtgctctcctctccccatgggcgccgccaacatttggctgtcagccatgagaagggcaagatcaccgttctgcagctctctgcactcctgaagcaagcagattccagcaaaaggaagttaactctgacccgcttggcttctgccccagttccttttactgtgttgagcctcacaggaaatccctgcaaggaagactacttggcggtttgtgggctaaaggactgtcatgtgctcacctttagtagctcaggctctgtttcggatcacttggttttgcaccctcagttggcaacggggaacttcatcatcaaagccgtgtggttacctggttcacagaccgagttagcaattgtcaccgcagactttgttaagatttatgacctgtgtgttgatgccttgagtccaaccttctattttctcctgccaagctcaaagataagagatgttaccttccttttcaatgaggagggaaagaacatcattgttataatgtcttcggctgggtacatctatactcagcttatggaagaggccagcagtgcccagcagggacccttctatgtcactaatgtgttggaaatcaatcatgaggacctgaaggacagtaacagccaggtggcgggcggtggtgtgtccgtgtactactcccacgtgttgcagatgttgttcttcagctattgtcaaggcaaatcattcgcagccaccatcagcaggacaaccctggaggtgttgcaactcttccccatcaacatcaaaagttccaatggtggcagtaagacttctcctgctctttgccagtggtctgaggtgatgaaccaccctggcttggtgtgctgtgtccagcaaactacaggggtgccgctggtagttatggtgaaaccagacacttttcttatccaggagattaagactcttcctgctaaagcgaagatccaagacatggttgctattaggcacacggcctgcaatgagcagcagcggacaacaatgattctgctgtgtgaggatggcagcctgcgcatttacatggccaacgtggagaacacctcctactggctgcagccatccctgcagcccagcagtgtcatcagcatcatgaagcctgttcgaaagcgcaaaacagctacaatcacaacccgcacgtctagccaggtgactttccccattgacttttttgaacacaaccagcagctgacagatgtggagtttggtggtaacgacctcctacaggtctataatgcacaacagataaaacaccggctgaattccactggcatgtatgtggccaacaccaagcccggaggcttcaccattgagattagtaacaacaatagcactatggtgatgacaggcatgcggatccagattgggactcaagcaatagaacgggccccgtcatatatcgagatcttcggcagaactatgcagctcaacctgagtcgctcacgctggtttgacttccccttcaccagagaagaagccctgcaggctgataagaagctgaacctcttcattggggcctcggtggatccagcaggtgtcaccatgatagatgctgtaaaaatttatggcaagactaaggagcagtttggctggcctgatgagcccccagaagaattcccttctgcctctgtcagcaacatctgcccttcaaatctgaaccagagcaacggcactggagatagcgactcagctgcccccactacgaccagtggaactgtcctggagaggctggttgtgagttctttagaagccctggaaagctgctttgccgttggcccaatcatcgagaaggagagaaacaagaatgctgctcaggagctggccactttgctgttgtccctgccagcacctgccagtgtccagcagcagtccaagagccttctggccagcctgcacaccagccgctcggcctaccacagccacaaggatcaggccttgctgagcaaagctgtgcagtgtctcaacacatctagcaaagagggcaaggatttggaccctgaggtgttccagaggctagtgatcacagctcgctccattgccatcatgcgccccaacaaccttgtccactttacggagtcaaagctgccccagatggaaacagactgtttttttcctagatgtgcctgctggagtctagggatagttggcatattgattggggccccacttgaaactccctccccaggcaagcttccttgacctgagttaaccttaaaacaaattaaattccatctcagatttaccatcgttgataattttctttctcctgcttagaaggaatggatgaagggaaggaaccgcagaagcagttggaaggagattgctgtagtttcatcacccagcttgtgaaccacttctggaaactccatgcatccaaacccaagaatgccttcttggcacctgcctgccttccaggactaactcatattgaagctactgtcaatgctctggtggacatcatccatggctactgtacctgtgagctggattgtattaacacagcatccaagatctacatgcagatgctcttgtgtcctgatcctgctgtgagcttctcttgtaaacaagctctaattcgagtcctaaggcccaggaacaaacggagacatgtgactttaccctcttcccctcgaagcaacactccaatgggagacaaggatgatgatgacgatgatgatgcagatgagaaaatgcagtcatcagggatcccgaatggtggtcacatccgtcaggaaagccaggaacagagtgaggtggaccatggagattttgagatggtgtctgagtcgatggtcctggagacagctgaaaatgtcaacaatggcaacccctctcccctggaggccctgctggcaggcgcagagggcttcccccccatgctggacatcccacctgatgcagatgacgagaccatggttgaactagccattgccctgagcctgcagcaggaccaacaaggcagcagcagcagtgccctgggcctgcagagcctgggactgtccggccaggcacccagctcttcctctctggacgcaggaaccctctctgacaccacagcatcagctccagcctcagacgacgagggcagtacagcagcgacagatggttctacccttcggacctctcctgctgaccacggtggtagtgtgggctcggagagcgggggcagtgcagtggactcagtggctggcgagcacagtgtatctggccggagcagtgcttatggcgatgctacagctgaggggcatccggctggaccaggaagtgtcagctcaagcactggagccatcagcaccaccactgggcaccaggagggagatggctccgagggagaaggagaaggagaaactgaaggagatgtccacactagcaacaggctgcacatggtccgtctaatgctgttggagagattactgcagaccctgcctcaattacgaaacgttggcggtgtccgggccatcccatacatgcaggtcattctaatgctcactacagatctggatggagaagatgagaaagacaagggggccctagacaacctgctctcccagcttattgctgagttgggtatggataaaaaggatgtctccaagaagaatgagcgcagcgccctgaatgaagtccatctggtagtaatgagactcctgagtgtcttcatgtcccgcaccaaatctggatccaagtcttccatatgtgagtcatcttccctcatctccagtgccacagcagcagctctactgagctctggggctgtggactactgcctgcacgtgctcaaatcactgctggaatattggaagagccaacagaatgacgaggagcctgtggctaccagccagttgctgaaaccacatactacctcctccccacctgacatgagcccattctttctccgccagtatgtgaagggtcatgctgctgatgtgtttgaggcctatactcagcttctaacagaaatggtactgaggcttccttaccaaatcaaaaagattactgacaccaattctcgaatcccacctcctgtctttgaccactcgtggttttactttctctccgagtacctcatgatccagcagactccatttgtgcgccgtcaagtccgcaaacttctgctcttcatctgtggatccaaagagaagtaccgccagctccgggatttgcacaccctggactctcacgtgcgtgggatcaagaagctgctagaagagcaggggatattcctccgggcaagtgtggttacagccagctcaggctccgccttgcaatatgacacactcatcagcctgatggagcacctgaaagcctgtgcagagattgccgcccagcgaaccatcaactggcagaaattctgcatcaaagatgactccgtcctgtacttcctcctccaagtcagtttccttgtggatgagggcgtgtccccagtgctgctgcaactgctctcctgtgctctctgcggcagcaaggtgctcgctgcactggcagcctcttcgggatcctccagtgcttcttcctcctcagcccctgtggctgccagttctggacaagccacaacacagtccaagtcttccactaaaaagagcaagaaagaagaaaaagaaaaggagaaagatggtgagacctctggcagccaggaggaccagctgtgcacagctctggtgaaccagctgaacaaatttgccgataaggaaaccctgatccagttcctgcgttgtttcctgttagagtccaattcttcctcggtgcgctggcaggcccactgtctgacactgcacatctacagaaattccagcaaatctcaacaggagctcctgctagatctgatgtggtccatctggccagaactcccagcctatggtcgtaaggctgcccagtttgtggacctactaggatatttctccctgaaaactccacaaacagagaagaagttgaaggagtattcacagaaggctgtggagattctgcggactcaaaaccatattcttaccaaccaccccaactcgaacatttataacactttgtctggcttagtggagtttgatggctattacctggagagcgatccctgcctggtgtgtaataacccggaagtaccgttctgttatatcaagctgtcttccattaaagtggacacgcggtacaccaccacccagcaggttgtgaagctcattggcagtcacaccatcagcaaagtgacagtgaaaatcggggatctgaaacggaccaagatggtgcggaccatcaacctgtattataacaaccgaaccgtgcaggccatcgtggagttgaaaaacaagccagctcgctggcacaaagccaagaaggttcagctgacccctggacagacagaggtgaagattgacctgccgttgcccattgtggcctccaatctgatgattgagtttgcagacttctatgaaaactaccaggcctccacagagaccctgcagtgccctcgctgtagtgcctcggtccctgccaacccaggagtctgtggcaactgtggagagaatgtgtaccagtgtcacaaatgcagatccatcaactacgatgaaaaggatcccttcctctgcaatgcctgtggcttctgtaaatatgcccgcttcgacttcatgctctatgccaagccttgctgtgcagtggatcccattgagaatgaagaagaccggaagaaggctgtatccaacatcaatacacttttggacaaagctgatcgagtgtatcatcagctgatgggacaccggccacagctggagaacctgctctgcaaagtgaatgaggcagctccagaaaagccacaggatgactcaggaacagcagggggcatcagctccacttctgccagtgtgaatcgttacatcctgcagttggctcaggagtattgtggagactgcaagaactcttttgatgaactctccaaaatcatccagaaagtctttgcttcgcgcaaagagttgttggaatatgacctacagcagagggaagcagccactaaatcatcccggacctccgtgcagcccacattcactgccagccagtaccgtgccttatccgtcctgggctgtggccacacatcctccaccaagtgctatggctgcgcctcggctgtcacagaacattgtatcacactacttcgggccctggccaccaacccagccttgaggcacatccttgtctcccagggccttatccgggagctctttgattataatcttcgccgaggggctgcggccatgcgggaggaggtccgccagctcatgtgcctcctaactcgagacaacccagaagccacccaacagatgaatgacctgattattggcaaggtctccacagccctgaagggccactgggccaaccccgatctggcaagtagcctgcagtatgaaatgctgctgctgacggattctatctccaaggaggacagctgctgggagctccggttacgctgtgctctcagccttttcctcatggctgtgaacattaagactcctgtggtggttgaaaacattaccctcatgtgcctgaggatcttgcagaagctgataaaaccacctgctcccactagcaagaagaacaaggatgtccccgtcgaggccctcaccacggtgaagccatactgcaatgagatccatgcccaggctcaactgtggctcaagagagaccccaaggcatcctatgatgcctggaagaagtgtcttcctatcagagggatagatggcaatgggaaagcccccagcaaatcagagctccgccatctctatttgactgagaagtatgtgtggaggtggaaacagttcctgagtcgtcgggggaagaggacctcccccttggatctcaaactggggcataacaactggctgcgacaagtgcttttcactccagcaacgcaggccgcacggcaggcagcctgtaccattgtggaagctctagccaccattcccagccgcaagcagcaggtcctggacctgcttaccagttacctggatgagctgagcatagctggggagtgtgcagctgagtacctggctctctaccagaagctcatcacttctgcgcactggaaagtctacttggcagctcggggagtcctaccctatgtgggcaacctcatcaccaaggaaatagctcgtctgctggccctggaggaggctaccctgagtaccgatctgcagcagggttatgcccttaaaagtctcacaggccttctctcctcctttgttgaggtggaatccatcaaaagacattttaaaagtcgcttggtgggtactgtgctgaatggatacctgtgcttgcggaagctggtggtgcagaggaccaagctgatcgatgagacgcaggacatgctgctggagatgctggaggacatgaccacaggtacagaatcagaaaccaaggccttcatggctgtgtgcattgagacagccaagcgctacaatctggatgactaccggaccccggtgttcatcttcgagaggctctgcagcatcatttatcctgaggagaatgaagtcactgagttctttgtgaccctggagaaggatccccaacaagaagacttcttacagggcaggatgcctgggaacccgtatagcagcaatgagccaggcatcgggccgctgatgagggatataaagaacaagatttgccaggactgtgacttagtggccctcctggaagatgacagtggcatggagcttctagtgaacaataaaatcattagtttggaccttcctgtggctgaagtttacaagaaagtctggtgtaccacgaatgagggagagcccatgaggattgtttatcgtatgcgggggctgctgggcgatgccacagaggagttcattgagtccctggactctactacagatgaagaagaagatgaagaagaagtgtataaaatggctggtgtgatggcccagtgtgggggcctggaatgcatgcttaacagactcgcagggatcagagatttcaagcagggacgccaccttctaacagtgctactgaaattgttcagttactgcgtgaaggtgaaagtcaaccggcagcaactggtcaaactggaaatgaacaccttgaacgtcatgctggggaccctaaacctggcccttgtagctgaacaagaaagcaaggacagtgggggtgcagctgtggctgagcaggtgcttagcatcatggagatcattctagatgagtccaatgctgagcccctgagtgaggacaagggcaacctcctcctgacaggtgacaaggatcaactggtgatgctcttggaccagatcaacagcacctttgttcgctccaaccccagtgtgctccagggcctgcttcgcatcatcccgtacctttcctttggagaggtggagaaaatgcagatcttggtggagcgattcaaaccatactgcaactttgataaatatgatgaagatcacagtggtgatgataaagtcttcctggactgcttctgtaaaatagctgctggcatcaagaacaacagcaatgggcaccagctgaaggatctgattctccagaaggggatcacccagaatgcacttgactacatgaaaaagcacatccctagcgccaagaatttggatgccgacatctggaaaaagtttttgtctcgcccagccttgccatttatcctaaggctgcttcggggcctggccatccagcaccctggcacccaggttctgattggaactgattccatcccgaacctgcataagctggagcaggtgtccagtgatgagggcattgggaccttggcagagaacctgctggaagccctgcgggaacaccctgacgtaaacaagaagattgacgcagcccgcagggagacccgggcagagaagaaacgcatggccatggcaatgaggcagaaggccctgggcaccctgggcatgacgacaaatgaaaagggccaggtcgtgaccaagacagcactcctgaagcagatggaagagctgatcgaggagcctggcctcacgtgctgcatctgcagggagggatacaagttccagcccacaaaggtcctgggcatttataccttcacgaagcgggtagccttggaggagttggagaataagccccggaaacagcagggctacagcaccgtgtcccacttcaacattgtgcactacgactgccatctggctgccgtcaggttggctcgaggccgggaagagtgggagagtgccgccctgcagaatgccaacaccaagtgcaacgggctccttccggtctggggacctcatgtccctgaatcagcttttgccacttgcttggcaagacacaacacttacctccaggaatgtacaggccagcgggagcccacgtatcagctcaacatccacgacatcaaactgctcttcctgcgcttcgccatggagcagtcgttcagcgcagacactggcgggggcggccgggagagcaacatccacctgatcccgtacatcattcacactgtgctttacgtcctgaacacaacccgagcaacttcccgagaagagaagaacctccaaggctttctggaacagcccaaggagaagtgggtggagagtgcctttgaagtggacgggccctactatttcacagtcttggcccttcacatcctgccccctgagcagtggagagccacacgtgtggaaatcttgcggaggctgttggtgacctcgcaggctcgggcagtggctccaggtggagccaccaggctgacagataaggcagtgaaggactattccgcttaccgttcttcccttctcttttgggccctcgtcgatctcatttacaacatgtttaagaaggtgcctaccagtaacacagagggaggctggtcctgctctctcgctgagtacatccgccacaacgacatgcccatctacgaagctgccgacaaagccctgaaaaccttccaggaggagttcatgccagtggagaccttctcagagttcctcgatgtggccggttagtgtcaaggttttctcttttaaagatcctccgcagcaaagccccatgtcttcctccgtgggtcatccgtagctttatcttcacgaccagaggaaacgcagtatgaaccagcctgtcagctgccactgaaagccctgggaaagatgcgtaaatagcaagtcaccgataacgagaacagcagctctaacatgtactgagcac

SEQ ID NO: 356670 - DNA, 12111 bp, Homo sapiens
gtgacctagaggttccgccacaagcgcgatctcaaaggtccaggtctctttggatgagcatttttctaagatggctgctgagactgatcctcataagtcgtctgagattaccaagaacctacttccagccacgctgcaactcattgacacctatgcatcgttcaccagagcctatttgctgcaaaactttaatgaagagggaacaactgagaaaccttccaaggagaaactgcaaggctttgctgctgttttggctattggctctagcaggtgcaaggcaaatactctgggtccgacactggttcagaatttgccatcgtcagtgcagactgtgtgtgagtcctggaacaacatcaataccaatgaatttcccaatattggatcctggcgcaatgcctttgccaatgacaccatcccttcagagagttatattagtgcagtgcaggctgcacacctggggactctctgtagccaaagtctgcccctggctgcttccctgaagcataccctcctctcactggtcaggttgactggagatcttattgtttggtcagatgagatgaacccaccacaggtaattcggacactgctacctcttcttttggaatcaagcactgagagtgttgccgagatcagtagcaactccctggaacgcatcttgggccctgctgagtctgatgagttcttggctcgtgtttatgagaagctgatcactggttgttacaacattctggccaatcatgcagatcctaacagtggactggatgaatccatcctggaggaatgtctccagtacttggaaaagcagctggaaagtagccaggctcgtaaagctatggaggagtttttctctgacagtggagaacttgtacagatcatgatggcaacagccaatgagaacctctctgctaaattctgtaaccgagttttgaaattcttcaccaaactcttccagctgactgagaagagccctaacccgagcctgttgcatctctgtggctccctggcacaactggcctgtgtggaacctgtgcgcctgcaggcctggctcacccgcatgactacatcgcccccaaaagattctgatcagctggatgtaattcaggagaaccggcagctgctgcagttactgaccacatacattgttcgggaaaacagccaagttggggaaggtgtgtgtgctgttcttctgggcaccctgactcccatggcaacagagatgctggccaacggtgatgggactggcttccctgaacttatggttgtgatggccactctggccagtgcaggtcaaggtgctggtcaccttcagcttcataatgctgctgtggattggctgagcagatgcaagaaatacctgtcacagaagaatgtagttgaaaaactgaatgccaatgtaatgcatggaaagcatgtgatgatcttggagtgcacatgccatatcatgtcttacttggctgatgtcacgaatgccctgagccagagtaatggtcaaggcccaagtcatctctcagtggatggggaagagcgggccattgaagtagactcagactgggtggaggagttggcggtggaagaggaagattcccaggctgaggattcagatgaagattctctttgcaataaactctgcacttttacgatcacacagaaagaattcatgaaccagcattggtaccactgtcacacctgtaaaatggtggatggcgtgggtgtctgcacagtgtgtgctaaggtgtgccacaaggatcatgagatttcctatgccaagtatggatccttcttctgtgactgtggagccaaggaagatggcagctgtttggctctggtgaagagaactcctagcagtggcatgagctctaccatgaaggagtcggcatttcagagtgaacccaggatttcagagagtctagtgcgtcatgccagcacctcctcgccagctgacaaagccaaggttaccatcagtgatggaaaggttgctgacgaagagaagcccaagaagagcagcctctgccgcacagtagagggctgccgggaggaattacagaaccaggccaatttctccttcgctcctctcgtgttagacatgcttaatttccttatggatgccattcagaccaacttccagcaagcttcagccgtcgggagcagcagccgtgctcagcaagccctcagtgagctacacactgtggagaaggcagtggagatgacagaccagctgatggttcccaccttagggtcccaggaaggtgcctttgagaatgtgcggatgaattacagtggagaccagggccagaccatccggcagctgatcagtgctcatgtgctcaggcgggtggctatgtgtgtgctctcctctccccatgggcgccgccaacatttggctgtcagccatgagaagggcaagatcaccgttctgcagctctctgcactcctgaagcaagcagattccagcaaaaggaagttaactctgacccgcttggcttctgccccagttccttttactgtgttgagcctcacaggaaatccctgcaaggaagactacttggcggtttgtgggctaaaggactgtcatgtgctcacctttagtagctcaggctctgtttcggatcacttggttttgcaccctcagttggcaacggggaacttcatcatcaaagccgtgtggttacctggttcacagaccgagttagcaattgtcaccgcagactttgttaagatttatgacctgtgtgttgatgccttgagtccaaccttctattttctcctgccaagctcaaagataagagatgttaccttccttttcaatgaggagggaaagaacatcattgttataatgtcttcggctgggtacatctatactcagcttatggaagaggccagcagtgcccagcagggacccttctatgtcactaatgtgttggaaatcaatcatgaggacctgaaggacagtaacagccaggtggcgggcggtggtgtgtccgtgtactactcccacgtgttgcagatgttgttcttcagctattgtcaaggcaaatcattcgcagccaccatcagcaggacaaccctggaggtgttgcaactcttccccatcaacatcaaaagttccaatggtggcagtaagacttctcctgctctttgccagtggtctgaggtgatgaaccaccctggcttggtgtgctgtgtccagcaaactacaggggtgccgctggtagttatggtgaaaccagacacttttcttatccaggagattaagactcttcctgctaaagcgaagatccaagacatggttgctattaggcacacggcctgcaatgagcagcagcggacaacaatgattctgctgtgtgaggatggcagcctgcgcatttacatggccaacgtggagaacacctcctactggctgcagccatccctgcagcccagcagtgtcatcagcatcatgaagcctgttcgaaagcgcaaaacagctacaatcacaacccgcacgtctagccaggtgactttccccattgacttttttgaacacaaccagcagctgacagatgtggagtttggtggtaacgacctcctacaggtctataatgcacaacagataaaacaccggctgaattccactggcatgtatgtggccaacaccaagcccggaggcttcaccattgagattagtaacaacaatagcactatggtgatgacaggcatgcggatccagattgggactcaagcaatagaacgggccccgtcatatatcgagatcttcggcagaactatgcagctcaacctgagtcgctcacgctggtttgacttccccttcaccagagaagaagccctgcaggctgataagaagctgaacctcttcattggggcctcggtggatccagcaggtgtcaccatgatagatgctgtaaaaatttatggcaagactaaggagcagtttggctggcctgatgagcccccagaagaattcccttctgcctctgtcagcaacatctgcccttcaaatctgaaccagagcaacggcactggagatagcgactcagctgcccccactacgaccagtggaactgtcctggagaggctggttgtgagttctttagaagccctggaaagctgctttgccgttggcccaatcatcgagaaggagagaaacaagaatgctgctcaggagctggccactttgctgttgtccctgccagcacctgccagtgtccagcagcagtccaagagccttctggccagcctgcacaccagccgctcggcctaccacagccacaaggatcaggccttgctgagcaaagctgtgcagtgtctcaacacatctagcaaagagggcaaggatttggaccctgaggtgttccagaggctagtgatcacagctcgctccattgccatcatgcgccccaacaaccttgtccactttacggagtcaaagctgccccagatggaaacagactgtttttttcctagatgtgcctgctggagtctagggatagttggcatattgattggggccccacttgaaactccctccccaggcaagcttccttgacctgagttaaccttaaaacaaattaaattccatctcagatttaccatcgttgataattttctttctcctgcttagaaggaatggatgaagggaaggaaccgcagaagcagttggaaggagattgctgtagtttcatcacccagcttgtgaaccacttctggaaactccatgcatccaaacccaagaatgccttcttggcacctgcctgccttccaggactaactcatattgaagctactgtcaatgctctggtggacatcatccatggctactgtacctgtgagctggattgtattaacacagcatccaagatctacatgcagatgctcttgtgtcctgatcctgctgtgagcttctcttgtaaacaagctctaattcgagtcctaaggcccaggaacaaacggagacatgtgactttaccctcttcccctcgaagcaacactccaatgggagacaaggatgatgatgacgatgatgatgcagatgagaaaatgcagtcatcagggatcccgaatggtggtcacatccgtcaggaaagccaggaacagagtgaggtggaccatggagattttgagatggtgtctgagtcgatggtcctggagacagctgaaaatgtcaacaatggcaacccctctcccctggaggccctgctggcaggcgcagagggcttcccccccatgctggacatcccacctgatgcagatgacgagaccatggttgaactagccattgccctgagcctgcagcaggaccaacaaggcagcagcagcagtgccctgggcctgcagagcctgggactgtccggccaggcacccagctcttcctctctggacgcaggaaccctctctgacaccacagcatcagctccagcctcagacgacgagggcagtacagcagcgacagatggttctacccttcggacctctcctgctgaccacggtggtagtgtgggctcggagagcgggggcagtgcagtggactcagtggctggcgagcacagtgtatctggccggagcagtgcttatggcgatgctacagctgaggggcatccggctggaccaggaagtgtcagctcaagcactggagccatcagcaccaccactgggcaccaggagggagatggctccgagggagaaggagaaggagaaactgaaggagatgtccacactagcaacaggctgcacatggtccgtctaatgctgttggagagattactgcagaccctgcctcaattacgaaacgttggcggtgtccgggccatcccatacatgcaggtcattctaatgctcactacagatctggatggagaagatgagaaagacaagggggccctagacaacctgctctcccagcttattgctgagttgggtatggataaaaaggatgtctccaagaagaatgagcgcagcgccctgaatgaagtccatctggtagtaatgagactcctgagtgtcttcatgtcccgcaccaaatctggatccaagtcttccatatgtgagtcatcttccctcatctccagtgccacagcagcagctctactgagctctggggctgtggactactgcctgcacgtgctcaaatcactgctggaatattggaagagccaacagaatgacgaggagcctgtggctaccagccagttgctgaaaccacatactacctcctccccacctgacatgagcccattctttctccgccagtatgtgaagggtcatgctgctgatgtgtttgaggcctatactcagcttctaacagaaatggtactgaggcttccttaccaaatcaaaaagattactgacaccaattctcgaatcccacctcctgtctttgaccactcgtggttttactttctctccgagtacctcatgatccagcagactccatttgtgcgccgtcaagtccgcaaacttctgctcttcatctgtggatccaaagagaagtaccgccagctccgggatttgcacaccctggactctcacgtgcgtgggatcaagaagctgctagaagagcaggggatattcctccgggcaagtgtggttacagccagctcaggctccgccttgcaatatgacacactcatcagcctgatggagcacctgaaagcctgtgcagagattgccgcccagcgaaccatcaactggcagaaattctgcatcaaagatgactccgtcctgtacttcctcctccaagtcagtttccttgtggatgagggcgtgtccccagtgctgctgcaactgctctcctgtgctctctgcggcagcaaggtgctcgctgcactggcagcctcttcgggatcctccagtgcttcttcctcctcagcccctgtggctgccagttctggacaagccacaacacagtccaagtcttccactaaaaagagcaagaaagaagaaaaagaaaaggagaaagatggtgagacctctggcagccaggaggaccagctgtgcacagctctggtgaaccagctgaacaaatttgccgataaggaaaccctgatccagttcctgcgttgtttcctgttagagtccaattcttcctcggtgcgctggcaggcccactgtctgacactgcacatctacagaaattccagcaaatctcaacaggagctcctgctagatctgatgtggtccatctggccagaactcccagcctatggtcgtaaggctgcccagtttgtggacctactaggatatttctccctgaaaactccacaaacagagaagaagttgaaggagtattcacagaaggctgtggagattctgcggactcaaaaccatattcttaccaaccaccccaactcgaacatttataacactttgtctggcttagtggagtttgatggctattacctggagagcgatccctgcctggtgtgtaataacccggaagtaccgttctgttatatcaagctgtcttccattaaagtggacacgcggtacaccaccacccagcaggttgtgaagctcattggcagtcacaccatcagcaaagtgacagtgaaaatcggggatctgaaacggaccaagatggtgcggaccatcaacctgtattataacaaccgaaccgtgcaggccatcgtggagttgaaaaacaagccagctcgctggcacaaagccaagaaggttcagctgacccctggacagacagaggtgaagattgacctgccgttgcccattgtggcctccaatctgatgattgagtttgcagacttctatgaaaactaccaggcctccacagagaccctgcagtgccctcgctgtagtgcctcggtccctgccaacccaggagtctgtggcaactgtggagagaatgtgtaccagtgtcacaaatgcagatccatcaactacgatgaaaaggatcccttcctctgcaatgcctgtggcttctgtaaatatgcccgcttcgacttcatgctctatgccaagccttgctgtgcagtggatcccattgagaatgaagaagaccggaagaaggctgtatccaacatcaatacacttttggacaaagctgatcgagtgtatcatcagctgatgggacaccggccacagctggagaacctgctctgcaaagtgaatgaggcagctccagaaaagccacaggatgactcaggaacagcagggggcatcagctccacttctgccagtgtgaatcgttacatcctgcagttggctcaggagtattgtggagactgcaagaactcttttgatgaactctccaaaatcatccagaaagtctttgcttcgcgcaaagagttgttggaatatgacctacagcagagggaagcagccactaaatcatcccggacctccgtgcagcccacattcactgccagccagtaccgtgccttatccgtcctgggctgtggccacacatcctccaccaagtgctatggctgcgcctcggctgtcacagaacattgtatcacactacttcgggccctggccaccaacccagccttgaggcacatccttgtctcccagggccttatccgggagctctttgattataatcttcgccgaggggctgcggccatgcgggaggaggtccgccagctcatgtgcctcctaactcgagacaacccagaagccacccaacagatgaatgacctgattattggcaaggtctccacagccctgaagggccactgggccaaccccgatctggcaagtagcctgcagtatgaaatgctgctgctgacggattctatctccaaggaggacagctgctgggagctccggttacgctgtgctctcagccttttcctcatggctgtgaacattaagactcctgtggtggttgaaaacattaccctcatgtgcctgaggatcttgcagaagctgataaaaccacctgctcccactagcaagaagaacaaggatgtccccgtcgaggccctcaccacggtgaagccatactgcaatgagatccatgcccaggctcaactgtggctcaagagagaccccaaggcatcctatgatgcctggaagaagtgtcttcctatcagagggatagatggcaatgggaaagcccccagcaaatcagagctccgccatctctatttgactgagaagtatgtgtggaggtggaaacagttcctgagtcgtcgggggaagaggacctcccccttggatctcaaactggggcataacaactggctgcgacaagtgcttttcactccagcaacgcaggccgcacggcaggcagcctgtaccattgtggaagctctagccaccattcccagccgcaagcagcaggtcctggacctgcttaccagttacctggatgagctgagcatagctggggagtgtgcagctgagtacctggctctctaccagaagctcatcacttctgcgcactggaaagtctacttggcagctcggggagtcctaccctatgtgggcaacctcatcaccaaggaaatagctcgtctgctggccctggaggaggctaccctgagtaccgatctgcagcagggttatgcccttaaaagtctcacaggccttctctcctcctttgttgaggtggaatccatcaaaagacattttaaaagtcgcttggtgggtactgtgctgaatggatacctgtgcttgcggaagctggtggtgcagaggaccaagctgatcgatgagacgcaggacatgctgctggagatgctggaggacatgaccacaggtacagaatcagaaaccaaggccttcatggctgtgtgcattgagacagccaagcgctacaatctggatgactaccggaccccggtgttcatcttcgagaggctctgcagcatcatttatcctgaggagaatgaagtcactgagttctttgtgaccctggagaaggatccccaacaagaagacttcttacagggcaggatgcctgggaacccgtatagcagcaatgagccaggcatcgggccgctgatgagggatataaagaacaagatttgccaggactgtgacttagtggccctcctggaagatgacagtggcatggagcttctagtgaacaataaaatcattagtttggaccttcctgtggctgaagtttacaagaaagtctggtgtaccacgaatgagggagagcccatgaggattgtttatcgtatgcgggggctgctgggcgatgccacagaggagttcattgagtccctggactctactacagatgaagaagaagatgaagaagaagtgtataaaatggctggtgtgatggcccagtgtgggggcctggaatgcatgcttaacagactcgcagggatcagagatttcaagcagggacgccaccttctaacagtgctactgaaattgttcagttactgcgtgaaggtgaaagtcaaccggcagcaactggtcaaactggaaatgaacaccttgaacgtcatgctggggaccctaaacctggcccttgtagctgaacaagaaagcaaggacagtgggggtgcagctgtggctgagcaggtgcttagcatcatggagatcattctagatgagtccaatgctgagcccctgagtgaggacaagggcaacctcctcctgacaggtgacaaggatcaactggtgatgctcttggaccagatcaacagcacctttgttcgctccaaccccagtgtgctccagggcctgcttcgcatcatcccgtacctttcctttggagaggtggagaaaatgcagatcttggtggagcgattcaaaccatactgcaactttgataaatatgatgaagatcacagtggtgatgataaagtcttcctggactgcttctgtaaaatagctgctggcatcaagaacaacagcaatgggcaccagctgaaggatctgattctccagaaggggatcacccagaatgcacttgactacatgaaaaagcacatccctagcgccaagaatttggatgccgacatctggaaaaagtttttgtctcgcccagccttgccatttatcctaaggctgcttcggggcctggccatccagcaccctggcacccaggttctgattggaactgattccatcccgaacctgcataagctggagcaggtgtccagtgatgagggcattgggaccttggcagagaacctgctggaagccctgcgggaacaccctgacgtaaacaagaagattgacgcagcccgcagggagacccgggcagagaagaaacgcatggccatggcaatgaggcagaaggccctgggcaccctgggcatgacgacaaatgaaaagggccaggtcgtgaccaagacagcactcctgaagcagatggaagagctgatcgaggagcctggcctcacgtgctgcatctgcagggagggatacaagttccagcccacaaaggtcctgggcatttataccttcacgaagcgggtagccttggaggagttggagaataagccccggaaacagcagggctacagcaccgtgtcccacttcaacattgtgcactacgactgccatctggctgccgtcaggttggctcgaggccgggaagagtgggagagtgccgccctgcagaatgccaacaccaagtgcaacgggctccttccggtctggggacctcatgtccctgaatcagcttttgccacttgcttggcaagacacaacacttacctccaggaatgtacaggccagcgggagcccacgtatcagctcaacatccacgacatcaaactgctcttcctgcgcttcgccatggagcagtcgttcagcgcagacactggcgggggcggccgggagagcaacatccacctgatcccgtacatcattcacactgtgctttacgtcctgaacacaacccgagcaacttcccgagaagagaagaacctccaaggctttctggaacagcccaaggagaagtgggtggagagtgcctttgaagtggacgggccctactatttcacagtcttggcccttcacatcctgccccctgagcagtggagagccacacgtgtggaaatcttgcggaggctgttggtgacctcgcaggctcgggcagtggctccaggtggagccaccaggtcagtacctgcttccggaagctgctgctcactatttcccatcatcagttttgaaaag

SEQ ID NO: 356671 - DNA, 11733 bp, Homo sapiens
gtgacctagaggttccgccacaagcgcgatctcaaaggtccaggtctctttggatgagcatttttctaagatggctgctgagactgatcctcataagtcgtctgagattaccaagaacctacttccagccacgctgcaactcattgacacctatgcatcgttcaccagagcctatttgctgcaaaactttaatgaagagggaacaactgagaaaccttccaaggagaaactgcaaggctttgctgctgttttggctattggctctagcaggtgcaaggcaaatactctgggtccgacactggttcagaatttgccatcgtcagtgcagactgtgtgtgagtcctggaacaacatcaataccaatgaatttcccaatattggatcctggcgcaatgcctttgccaatgacaccatcccttcagagagttatattagtgcagtgcaggctgcacacctggggactctctgtagccaaagtctgcccctggctgcttccctgaagcataccctcctctcactggtcaggttgactggagatcttattgtttggtcagatgagatgaacccaccacaggtaattcggacactgctacctcttcttttggaatcaagcactgagagtgttgccgagatcagtagcaactccctggaacgcatcttgggccctgctgagtctgatgagttcttggctcgtgtttatgagaagctgatcactggttgttacaacattctggccaatcatgcagatcctaacagtggactggatgaatccatcctggaggaatgtctccagtacttggaaaagcagctggaaagtagccaggctcgtaaagctatggaggagtttttctctgacagtggagaacttgtacagatcatgatggcaacagccaatgagaacctctctgctaaattctgtaaccgagttttgaaattcttcaccaaactcttccagctgactgagaagagccctaacccgagcctgttgcatctctgtggctccctggcacaactggcctgtgtggaacctgtgcgcctgcaggcctggctcacccgcatgactacatcgcccccaaaagattctgatcagctggatgtaattcaggagaaccggcagctgctgcagttactgaccacatacattgttcgggaaaacagccaagttggggaaggtgtgtgtgctgttcttctgggcaccctgactcccatggcaacagagatgctggccaacggtgatgggactggcttccctgaacttatggttgtgatggccactctggccagtgcaggtcaaggtgctggtcaccttcagcttcataatgctgctgtggattggctgagcagatgcaagaaatacctgtcacagaagaatgtagttgaaaaactgaatgccaatgtaatgcatggaaagcatgtgatgatcttggagtgcacatgccatatcatgtcttacttggctgatgtcacgaatgccctgagccagagtaatggtcaaggcccaagtcatctctcagtggatggggaagagcgggccattgaagtagactcagactgggtggaggagttggcggtggaagaggaagattcccaggctgaggattcagatgaagattctctttgcaataaactctgcacttttacgatcacacagaaagaattcatgaaccagcattggtaccactgtcacacctgtaaaatggtggatggcgtgggtgtctgcacagtgtgtgctaaggtgtgccacaaggatcatgagatttcctatgccaagtatggatccttcttctgtgactgtggagccaaggaagatggcagctgtttggctctggtgaagagaactcctagcagtggcatgagctctaccatgaaggagtcggcatttcagagtgaacccaggatttcagagagtctagtgcgtcatgccagcacctcctcgccagctgacaaagccaaggttaccatcagtgatggaaaggttgctgacgaagagaagcccaagaagagcagcctctgccgcacagtagagggctgccgggaggaattacagaaccaggccaatttctccttcgctcctctcgtgttagacatgcttaatttccttatggatgccattcagaccaacttccagcaagcttcagccgtcgggagcagcagccgtgctcagcaagccctcagtgagctacacactgtggagaaggcagtggagatgacagaccagctgatggttcccaccttagggtcccaggaaggtgcctttgagaatgtgcggatgaattacagtggagaccagggccagaccatccggcagctgatcagtgctcatgtgctcaggcgggtggctatgtgtgtgctctcctctccccatgggcgccgccaacatttggctgtcagccatgagaagggcaagatcaccgttctgcagctctctgcactcctgaagcaagcagattccagcaaaaggaagttaactctgacccgcttggcttctgccccagttccttttactgtgttgagcctcacaggaaatccctgcaaggaagactacttggcggtttgtgggctaaaggactgtcatgtgctcacctttagtagctcaggctctgtttcggatcacttggttttgcaccctcagttggcaacggggaacttcatcatcaaagccgtgtggttacctggttcacagaccgagttagcaattgtcaccgcagactttgttaagatttatgacctgtgtgttgatgccttgagtccaaccttctattttctcctgccaagctcaaagataagagatgttaccttccttttcaatgaggagggaaagaacatcattgttataatgtcttcggctgggtacatctatactcagcttatggaagaggccagcagtgcccagcagggacccttctatgtcactaatgtgttggaaatcaatcatgaggacctgaaggacagtaacagccaggtggcgggcggtggtgtgtccgtgtactactcccacgtgttgcagatgttgttcttcagctattgtcaaggcaaatcattcgcagccaccatcagcaggacaaccctggaggtgttgcaactcttccccatcaacatcaaaagttccaatggtggcagtaagacttctcctgctctttgccagtggtctgaggtgatgaaccaccctggcttggtgtgctgtgtccagcaaactacaggggtgccgctggtagttatggtgaaaccagacacttttcttatccaggagattaagactcttcctgctaaagcgaagatccaagacatggttgctattaggcacacggcctgcaatgagcagcagcggacaacaatgattctgctgtgtgaggatggcagcctgcgcatttacatggccaacgtggagaacacctcctactggctgcagccatccctgcagcccagcagtgtcatcagcatcatgaagcctgttcgaaagcgcaaaacagctacaatcacaacccgcacgtctagccaggtgactttccccattgacttttttgaacacaaccagcagctgacagatgtggagtttggtggtaacgacctcctacaggtctataatgcacaacagataaaacaccggctgaattccactggcatgtatgtggccaacaccaagcccggaggcttcaccattgagattagtaacaacaatagcactatggtgatgacaggcatgcggatccagattgggactcaagcaatagaacgggccccgtcatatatcgagatcttcggcagaactatgcagctcaacctgagtcgctcacgctggtttgacttccccttcaccagagaagaagccctgcaggctgataagaagctgaacctcttcattggggcctcggtggatccagcaggtgtcaccatgatagatgctgtaaaaatttatggcaagactaaggagcagtttggctggcctgatgagcccccagaagaattcccttctgcctctgtcagcaacatctgcccttcaaatctgaaccagagcaacggcactggagatagcgactcagctgcccccactacgaccagtggaactgtcctggagaggctggttgtgagttctttagaagccctggaaagctgctttgccgttggcccaatcatcgagaaggagagaaacaagaatgctgctcaggagctggccactttgctgttgtccctgccagcacctgccagtgtccagcagcagtccaagagccttctggccagcctgcacaccagccgctcggcctaccacagccacaaggatcaggccttgctgagcaaagctgtgcagtgtctcaacacatctagcaaagagggcaaggatttggaccctgaggtgttccagaggctagtgatcacagctcgctccattgccatcatgcgccccaacaaccttgtccactttacggagtcaaagctgccccagatggaaacagactgtttttttcctagatgtgcctgctggagtctagggatagttggcatattgattggggccccacttgaaactccctccccaggcaagcttccttgacctgagttaaccttaaaacaaattaaattccatctcagatttaccatcgttgataattttctttctcctgcttagaaggaatggatgaagggaaggaaccgcagaagcagttggaaggagattgctgtagtttcatcacccagcttgtgaaccacttctggaaactccatgcatccaaacccaagaatgccttcttggcacctgcctgccttccaggactaactcatattgaagctactgtcaatgctctggtggacatcatccatggctactgtacctgtgagctggattgtattaacacagcatccaagatctacatgcagatgctcttgtgtcctgatcctgctgtgagcttctcttgtaaacaagctctaattcgagtcctaaggcccaggaacaaacggagacatgtgactttaccctcttcccctcgaagcaacactccaatgggagacaaggatgatgatgacgatgatgatgcagatgagaaaatgcagtcatcagggatcccgaatggtggtcacatccgtcaggaaagccaggaacagagtgaggtggaccatggagattttgagatggtgtctgagtcgatggtcctggagacagctgaaaatgtcaacaatggcaacccctctcccctggaggccctgctggcaggcgcagagggcttcccccccatgctggacatcccacctgatgcagatgacgagaccatggttgaactagccattgccctgagcctgcagcaggaccaacaaggcagcagcagcagtgccctgggcctgcagagcctgggactgtccggccaggcacccagctcttcctctctggacgcaggaaccctctctgacaccacagcatcagctccagcctcagacgacgagggcagtacagcagcgacagatggttctacccttcggacctctcctgctgaccacggtggtagtgtgggctcggagagcgggggcagtgcagtggactcagtggctggcgagcacagtgtatctggccggagcagtgcttatggcgatgctacagctgaggggcatccggctggaccaggaagtgtcagctcaagcactggagccatcagcaccaccactgggcaccaggagggagatggctccgagggagaaggagaaggagaaactgaaggagatgtccacactagcaacaggctgcacatggtccgtctaatgctgttggagagattactgcagaccctgcctcaattacgaaacgttggcggtgtccgggccatcccatacatgcaggtcattctaatgctcactacagatctggatggagaagatgagaaagacaagggggccctagacaacctgctctcccagcttattgctgagttgggtatggataaaaaggatgtctccaagaagaatgagcgcagcgccctgaatgaagtccatctggtagtaatgagactcctgagtgtcttcatgtcccgcaccaaatctggatccaagtcttccatatgtgagtcatcttccctcatctccagtgccacagcagcagctctactgagctctggggctgtggactactgcctgcacgtgctcaaatcactgctggaatattggaagagccaacagaatgacgaggagcctgtggctaccagccagttgctgaaaccacatactacctcctccccacctgacatgagcccattctttctccgccagtatgtgaagggtcatgctgctgatgtgtttgaggcctatactcagcttctaacagaaatggtactgaggcttccttaccaaatcaaaaagattactgacaccaattctcgaatcccacctcctgtctttgaccactcgtggttttactttctctccgagtacctcatgatccagcagactccatttgtgcgccgtcaagtccgcaaacttctgctcttcatctgtggatccaaagagaagtaccgccagctccgggatttgcacaccctggactctcacgtgcgtgggatcaagaagctgctagaagagcaggggatattcctccgggcaagtgtggttacagccagctcaggctccgccttgcaatatgacacactcatcagcctgatggagcacctgaaagcctgtgcagagattgccgcccagcgaaccatcaactggcagaaattctgcatcaaagatgactccgtcctgtacttcctcctccaagtcagtttccttgtggatgagggcgtgtccccagtgctgctgcaactgctctcctgtgctctctgcggcagcaaggtgctcgctgcactggcagcctcttcgggatcctccagtgcttcttcctcctcagcccctgtggctgccagttctggacaagccacaacacagtccaagtcttccactaaaaagagcaagaaagaagaaaaagaaaaggagaaagatggtgagacctctggcagccaggaggaccagctgtgcacagctctggtgaaccagctgaacaaatttgccgataaggaaaccctgatccagttcctgcgttgtttcctgttagagtccaattcttcctcggtgcgctggcaggcccactgtctgacactgcacatctacagaaattccagcaaatctcaacaggagctcctgctagatctgatgtggtccatctggccagaactcccagcctatggtcgtaaggctgcccagtttgtggacctactaggatatttctccctgaaaactccacaaacagagaagaagttgaaggagtattcacagaaggctgtggagattctgcggactcaaaaccatattcttaccaaccaccccaactcgaacatttataacactttgtctggcttagtggagtttgatggctattacctggagagcgatccctgcctggtgtgtaataacccggaagtaccgttctgttatatcaagctgtcttccattaaagtggacacgcggtacaccaccacccagcaggttgtgaagctcattggcagtcacaccatcagcaaagtgacagtgaaaatcggggatctgaaacggaccaagatggtgcggaccatcaacctgtattataacaaccgaaccgtgcaggccatcgtggagttgaaaaacaagccagctcgctggcacaaagccaagaaggttcagctgacccctggacagacagaggtgaagattgacctgccgttgcccattgtggcctccaatctgatgattgagtttgcagacttctatgaaaactaccaggcctccacagagaccctgcagtgccctcgctgtagtgcctcggtccctgccaacccaggagtctgtggcaactgtggagagaatgtgtaccagtgtcacaaatgcagatccatcaactacgatgaaaaggatcccttcctctgcaatgcctgtggcttctgtaaatatgcccgcttcgacttcatgctctatgccaagccttgctgtgcagtggatcccattgagaatgaagaagaccggaagaaggctgtatccaacatcaatacacttttggacaaagctgatcgagtgtatcatcagctgatgggacaccggccacagctggagaacctgctctgcaaagtgaatgaggcagctccagaaaagccacaggatgactcaggaacagcagggggcatcagctccacttctgccagtgtgaatcgttacatcctgcagttggctcaggagtattgtggagactgcaagaactcttttgatgaactctccaaaatcatccagaaagtctttgcttcgcgcaaagagttgttggaatatgacctacagcagagggaagcagccactaaatcatcccggacctccgtgcagcccacattcactgccagccagtaccgtgccttatccgtcctgggctgtggccacacatcctccaccaagtgctatggctgcgcctcggctgtcacagaacattgtatcacactacttcgggccctggccaccaacccagccttgaggcacatccttgtctcccagggccttatccgggagctctttgattataatcttcgccgaggggctgcggccatgcgggaggaggtccgccagctcatgtgcctcctaactcgagacaacccagaagccacccaacagatgaatgacctgattattggcaaggtctccacagccctgaagggccactgggccaaccccgatctggcaagtagcctgcagtatgaaatgctgctgctgacggattctatctccaaggaggacagctgctgggagctccggttacgctgtgctctcagccttttcctcatggctgtgaacattaagactcctgtggtggttgaaaacattaccctcatgtgcctgaggatcttgcagaagctgataaaaccacctgctcccactagcaagaagaacaaggatgtccccgtcgaggccctcaccacggtgaagccatactgcaatgagatccatgcccaggctcaactgtggctcaagagagaccccaaggcatcctatgatgcctggaagaagtgtcttcctatcagagggatagatggcaatgggaaagcccccagcaaatcagagctccgccatctctatttgactgagaagtatgtgtggaggtggaaacagttcctgagtcgtcgggggaagaggacctcccccttggatctcaaactggggcataacaactggctgcgacaagtgcttttcactccagcaacgcaggccgcacggcaggcagcctgtaccattgtggaagctctagccaccattcccagccgcaagcagcaggtcctggacctgcttaccagttacctggatgagctgagcatagctggggagtgtgcagctgagtacctggctctctaccagaagctcatcacttctgcgcactggaaagtctacttggcagctcggggagtcctaccctatgtgggcaacctcatcaccaaggaaatagctcgtctgctggccctggaggaggctaccctgagtaccgatctgcagcagggttatgcccttaaaagtctcacaggccttctctcctcctttgttgaggtggaatccatcaaaagacattttaaaagtcgcttggtgggtactgtgctgaatggatacctgtgcttgcggaagctggtggtgcagaggaccaagctgatcgatgagacgcaggacatgctgctggagatgctggaggacatgaccacaggtacagaatcagaaaccaaggccttcatggctgtgtgcattgagacagccaagcgctacaatctggatgactaccggaccccggtgttcatcttcgagaggctctgcagcatcatttatcctgaggagaatgaagtcactgagttctttgtgaccctggagaaggatccccaacaagaagacttcttacagggcaggatgcctgggaacccgtatagcagcaatgagccaggcatcgggccgctgatgagggatataaagaacaagatttgccaggactgtgacttagtggccctcctggaagatgacagtggcatggagcttctagtgaacaataaaatcattagtttggaccttcctgtggctgaagtttacaagaaagtctggtgtaccacgaatgagggagagcccatgaggattgtttatcgtatgcgggggctgctgggcgatgccacagaggagttcattgagtccctggactctactacagatgaagaagaagatgaagaagaagtgtataaaatggctggtgtgatggcccagtgtgggggcctggaatgcatgcttaacagactcgcagggatcagagatttcaagcagggacgccaccttctaacagtgctactgaaattgttcagttactgcgtgaaggtgaaagtcaaccggcagcaactggtcaaactggaaatgaacaccttgaacgtcatgctggggaccctaaacctggcccttgtagctgaacaagaaagcaaggacagtgggggtgcagctgtggctgagcaggtgcttagcatcatggagatcattctagatgagtccaatgctgagcccctgagtgaggacaagggcaacctcctcctgacaggtgacaaggatcaactggtgatgctcttggaccagatcaacagcacctttgttcgctccaaccccagtgtgctccagggcctgcttcgcatcatcccgtacctttcctttggagaggtggagaaaatgcagatcttggtggagcgattcaaaccatactgcaactttgataaatatgatgaagatcacagtggtgatgataaagtcttcctggactgcttctgtaaaatagctgctggcatcaagaacaacagcaatgggcaccagctgaaggatctgattctccagaaggggatcacccagaatgcacttgactacatgaaaaagcacatccctagcgccaagaatttggatgccgacatctggaaaaagtttttgtctcgcccagccttgccatttatcctaaggctgcttcggggcctggccatccagcaccctggcacccaggttctgattggaactgattccatcccgaacctgcataagctggagcaggtgtccagtgatgagggcattgggaccttggcagagaacctgctggaagccctgcgggaacaccctgacgtaaacaagaagattgacgcagcccgcagggagacccgggcagagaagaaacgcatggccatggcaatgaggcagaaggccctgggcaccctgggcatgacgacaaatgaaaagggccaggtcgtgaccaagacagcactcctgaagcagatggaagagctgatcgaggagcctggcctcacgtgctgcatctgcagggagggatacaagttccagcccacaaaggtcctgggcatttataccttcacgaagcgggtagccttggaggagttggagaataagccccggaaacagcagggctacagcaccgtgtcccacttcaacattgtgcactacgactgccatctggctgccgtcaggttggctcgaggccgggaagagtgggagagtgccgccctgcagaatgccaacaccaagtgcaacgggctccttccggtctggggacctcatgtccctgaatcagcttttgccacttgcttggcaagggcctgtacatacctaggagccatgagttgtcccggccagcttcatacttgagtgtgcacatcttgagaaataaacaagtgacttaacacacattgaaaa

SEQ ID NO: 356672 - DNA, 1380 bp, Homo sapiens
gagcacatatactaaaattggaacgatacagagaagattagcatggcccctgcgcaaggatgacacgcaaattcgtgaagcgttccatattttaggcggtatgagtttggctgggggccgggcaccccggaagaccgctgggaaccggctttctgggcttttggaggcagaggaggaagatgagttctaccagacgacttatgggggtttcacagaggaatccggagatgatgagtatcaaggggaccagtcagacacagaggacgaagtggactctgactttgacattgatgaaggggatgaaccatccagtgatggagaagcagaagagccaagaaggaagcgccgagtagtcaccaaggcctataaggaacctctcaagagcttaaggcctcgaaaggtcaacaccccggctggtagctctcagaaggcgcgagaagagaaggcactactgccattagaactacaagatgacggctctgacagtcggaagtctatgcgtcagtctacagctgagcatacacgacaaacgttccttcgggtacaggagaggcagggccagtcaagacggcgaaaggggccccactgtgagcggccactaacccaggaggaactgctccgggaggccaagatcacagaagagcttaatttacggtcactggagacatatgagcggctcgaggctgataaaaagaagcaggttcataagaagcggaagtgccccgggcccataatcacctatcattcagtgacagtgccacttgttggggagccaggccccaaggaagagaacgttgacatagaaggacttgatcctgctccctcggtgtctgcattgactcctcatgctgggactggacccgtcaacccccctgctcgctgctcacgtaccttcatcacttttagtgatgatgcaactttcgaggaatggttcccccaagggcggcccccaaaagtccctgttcgtgaggtctgtccagtgacccatcgtccagccctataccgggaccctgttacagacataccctatgccactgctcgagccttcaagatcattcgtgaggcttacaagaagtacattactgcccatggactgccgcccactgcctcagccctgggccccggcccgccacctcctgagcccctccctggctctgggccccgagccttgcgccagaaaattgtcattaaatgaagagatgtctagtcctcagaaacttctttcctgccctgattggggctcttgctgttccgtttcttctccctgcttctcccctttgtcatctctgatctttgcctaatctgtttctttttccttttcccctagttcttacaggtttcgttgtgttttttaatctaataaaatagaaagatcccttt

SEQ ID NO: 356673 - DNA, 644 bp, Homo sapiens
gtgagatcgtttcgccccagacctctaatattccgcttaccgttcttcccttctcttttgggccctcgtcgatctcatttacaacatgtttaagaaggtgcctaccagtaacacagagggaggctggtcctgctctctcgctgagtacatccgccacaacgacatgcccatctacgaagctgccgacaaagccctgaaaaccttccaggaggagttcatgccagtggagaccttctcagagttcctcgatgtggccggtcttttatcagaaatcaccgatccagagagcttcctgaaggacctgttgaactcagtcccctgaccaccacacagcagctgcggcggcgaagacgaagctggcttgccttccaccctctgttctccctccttgtgcattaagttccctccgcgggatgctgcattgttaccccgccctcccctctctcatttttcttggtgtggcttggggtttttaggcttcctgttttatctcgtgtgtgtggtgcaccagctatgaggttgtctgtaacccaagccatcaaagggcctgtacatacctaggagccatgagttgtcccggccagcttcatacttgagtgtgcacatcttgagaaataaacaagtgacttaacacacattgaaaa

SEQ ID NO: 356674 - DNA, 9973 bp, Homo sapiens
gtgacctagaggttccgccacaagcgcgatctcaaaggtccaggtctctttggatgagcatttttctaagatggctgctgagactgatcctcataagtcgtctgagattaccaagaacctacttccagccacgctgcaactcattgacacctatgcatcgttcaccagagcctatttgctgcaaaactttaatgaagagggaacaactgagaaaccttccaaggagaaactgcaaggctttgctgctgttttggctattggctctagcaggtgcaaggcaaatactctgggtccgacactggttcagaatttgccatcgtcagtgcagactgtgtgtgagtcctggaacaacatcaataccaatgaatttcccaatattggatcctggcgcaatgcctttgccaatgacaccatcccttcagagagttatattagtgcagtgcaggctgcacacctggggactctctgtagccaaagtctgcccctggctgcttccctgaagcataccctcctctcactggtcaggttgactggagatcttattgtttggtcagatgagatgaacccaccacaggtaattcggacactgctacctcttcttttggaatcaagcactgagagtgttgccgagatcagtagcaactccctggaacgcatcttgggccctgctgagtctgatgagttcttggctcgtgtttatgagaagctgatcactggttgttacaacattctggccaatcatgcagatcctaacagtggactggatgaatccatcctggaggaatgtctccagtacttggaaaagcagctggaaagtagccaggctcgtaaagctatggaggagtttttctctgacagtggagaacttgtacagatcatgatggcaacagccaatgagaacctctctgctaaattctgtaaccgagttttgaaattcttcaccaaactcttccagctgactgagaagagccctaacccgagcctgttgcatctctgtggctccctggcacaactggcctgtgtggaacctgtgcgcctgcaggcctggctcacccgcatgactacatcgcccccaaaagattctgatcagctggatgtaattcaggagaaccggcagctgctgcagttactgaccacatacattgttcgggaaaacagccaagttggggaaggtgtgtgtgctgttcttctgggcaccctgactcccatggcaacagagatgctggccaacggtgatgggactggcttccctgaacttatggttgtgatggccactctggccagtgcaggtcaaggtgctggtcaccttcagcttcataatgctgctgtggattggctgagcagatgcaagaaatacctgtcacagaagaatgtagttgaaaaactgaatgccaatgtaatgcatggaaagcatgtgatgatcttggagtgcacatgccatatcatgtcttacttggctgatgtcacgaatgccctgagccagagtaatggtcaaggcccaagtcatctctcagtggatggggaagagcgggccattgaagtagactcagactgggtggaggagttggcggtggaagaggaagattcccaggctgaggattcagatgaagattctctttgcaataaactctgcacttttacgatcacacagaaagaattcatgaaccagcattggtaccactgtcacacctgtaaaatggtggatggcgtgggtgtctgcacagtgtgtgctaaggtgtgccacaaggatcatgagatttcctatgccaagtatggatccttcttctgtgactgtggagccaaggaagatggcagctgtttggctctggtgaagagaactcctagcagtggcatgagctctaccatgaaggagtcggcatttcagagtgaacccaggatttcagagagtctagtgcgtcatgccagcacctcctcgccagctgacaaagccaaggttaccatcagtgatggaaaggttgctgacgaagagaagcccaagaagagcagcctctgccgcacagtagagggctgccgggaggaattacagaaccaggccaatttctccttcgctcctctcgtgttagacatgcttaatttccttatggatgccattcagaccaacttccagcaagcttcagccgtcgggagcagcagccgtgctcagcaagccctcagtgagctacacactgtggagaaggcagtggagatgacagaccagctgatggttcccaccttagggtcccaggaaggtgcctttgagaatgtgcggatgaattacagtggagaccagggccagaccatccggcagctgatcagtgctcatgtgctcaggcgggtggctatgtgtgtgctctcctctccccatgggcgccgccaacatttggctgtcagccatgagaagggcaagatcaccgttctgcagctctctgcactcctgaagcaagcagattccagcaaaaggaagttaactctgacccgcttggcttctgccccagttccttttactgtgttgagcctcacaggaaatccctgcaaggaagactacttggcggtttgtgggctaaaggactgtcatgtgctcacctttagtagctcaggctctgtttcggatcacttggttttgcaccctcagttggcaacggggaacttcatcatcaaagccgtgtggttacctggttcacagaccgagttagcaattgtcaccgcagactttgttaagatttatgacctgtgtgttgatgccttgagtccaaccttctattttctcctgccaagctcaaagataagagatgttaccttccttttcaatgaggagggaaagaacatcattgttataatgtcttcggctgggtacatctatactcagcttatggaagaggccagcagtgcccagcagggacccttctatgtcactaatgtgttggaaatcaatcatgaggacctgaaggacagtaacagccaggtggcgggcggtggtgtgtccgtgtactactcccacgtgttgcagatgttgttcttcagctattgtcaaggcaaatcattcgcagccaccatcagcaggacaaccctggaggtgttgcaactcttccccatcaacatcaaaagttccaatggtggcagtaagacttctcctgctctttgccagtggtctgaggtgatgaaccaccctggcttggtgtgctgtgtccagcaaactacaggggtgccgctggtagttatggtgaaaccagacacttttcttatccaggagattaagactcttcctgctaaagcgaagatccaagacatggttgctattaggcacacggcctgcaatgagcagcagcggacaacaatgattctgctgtgtgaggatggcagcctgcgcatttacatggccaacgtggagaacacctcctactggctgcagccatccctgcagcccagcagtgtcatcagcatcatgaagcctgttcgaaagcgcaaaacagctacaatcacaacccgcacgtctagccaggtgactttccccattgacttttttgaacacaaccagcagctgacagatgtggagtttggtggtaacgacctcctacaggtctataatgcacaacagataaaacaccggctgaattccactggcatgtatgtggccaacaccaagcccggaggcttcaccattgagattagtaacaacaatagcactatggtgatgacaggcatgcggatccagattgggactcaagcaatagaacgggccccgtcatatatcgagatcttcggcagaactatgcagctcaacctgagtcgctcacgctggtttgacttccccttcaccagagaagaagccctgcaggctgataagaagctgaacctcttcattggggcctcggtggatccagcaggtgtcaccatgatagatgctgtaaaaatttatggcaagactaaggagcagtttggctggcctgatgagcccccagaagaattcccttctgcctctgtcagcaacatctgcccttcaaatctgaaccagagcaacggcactggagatagcgactcagctgcccccactacgaccagtggaactgtcctggagaggctggttgtgagttctttagaagccctggaaagctgctttgccgttggcccaatcatcgagaaggagagaaacaagaatgctgctcaggagctggccactttgctgttgtccctgccagcacctgccagtgtccagcagcagtccaagagccttctggccagcctgcacaccagccgctcggcctaccacagccacaaggatcaggccttgctgagcaaagctgtgcagtgtctcaacacatctagcaaagagggcaaggatttggaccctgaggtgttccagaggctagtgatcacagctcgctccattgccatcatgcgccccaacaaccttgtccactttacggagtcaaagctgccccagatggaaacagactgtttttttcctagatgtgcctgctggagtctagggatagttggcatattgattggggccccacttgaaactccctccccaggcaagcttccttgacctgagttaaccttaaaacaaattaaattccatctcagatttaccatcgttgataattttctttctcctgcttagaaggaatggatgaagggaaggaaccgcagaagcagttggaaggagattgctgtagtttcatcacccagcttgtgaaccacttctggaaactccatgcatccaaacccaagaatgccttcttggcacctgcctgccttccaggactaactcatattgaagctactgtcaatgctctggtggacatcatccatggctactgtacctgtgagctggattgtattaacacagcatccaagatctacatgcagatgctcttgtgtcctgatcctgctgtgagcttctcttgtaaacaagctctaattcgagtcctaaggcccaggaacaaacggagacatgtgactttaccctcttcccctcgaagcaacactccaatgggagacaaggatgatgatgacgatgatgatgcagatgagaaaatgcagtcatcagggatcccgaatggtggtcacatccgtcaggaaagccaggaacagagtgaggtggaccatggagattttgagatggtgtctgagtcgatggtcctggagacagctgaaaatgtcaacaatggcaacccctctcccctggaggccctgctggcaggcgcagagggcttcccccccatgctggacatcccacctgatgcagatgacgagaccatggttgaactagccattgccctgagcctgcagcaggaccaacaaggcagcagcagcagtgccctgggcctgcagagcctgggactgtccggccaggcacccagctcttcctctctggacgcaggaaccctctctgacaccacagcatcagctccagcctcagacgacgagggcagtacagcagcgacagatggttctacccttcggacctctcctgctgaccacggtggtagtgtgggctcggagagcgggggcagtgcagtggactcagtggctggcgagcacagtgtatctggccggagcagtgcttatggcgatgctacagctgaggggcatccggctggaccaggaagtgtcagctcaagcactggagccatcagcaccaccactgggcaccaggagggagatggctccgagggagaaggagaaggagaaactgaaggagatgtccacactagcaacaggctgcacatggtccgtctaatgctgttggagagattactgcagaccctgcctcaattacgaaacgttggcggtgtccgggccatcccatacatgcaggtcattctaatgctcactacagatctggatggagaagatgagaaagacaagggggccctagacaacctgctctcccagcttattgctgagttgggtatggataaaaaggatgtctccaagaagaatgagcgcagcgccctgaatgaagtccatctggtagtaatgagactcctgagtgtcttcatgtcccgcaccaaatctggatccaagtcttccatatgtgagtcatcttccctcatctccagtgccacagcagcagctctactgagctctggggctgtggactactgcctgcacgtgctcaaatcactgctggaatattggaagagccaacagaatgacgaggagcctgtggctaccagccagttgctgaaaccacatactacctcctccccacctgacatgagcccattctttctccgccagtatgtgaagggtcatgctgctgatgtgtttgaggcctatactcagcttctaacagaaatggtactgaggcttccttaccaaatcaaaaagattactgacaccaattctcgaatcccacctcctgtctttgaccactcgtggttttactttctctccgagtacctcatgatccagcagactccatttgtgcgccgtcaagtccgcaaacttctgctcttcatctgtggatccaaagagaagtaccgccagctccgggatttgcacaccctggactctcacgtgcgtgggatcaagaagctgctagaagagcaggggatattcctccgggcaagtgtggttacagccagctcaggctccgccttgcaatatgacacactcatcagcctgatggagcacctgaaagcctgtgcagagattgccgcccagcgaaccatcaactggcagaaattctgcatcaaagatgactccgtcctgtacttcctcctccaagtcagtttccttgtggatgagggcgtgtccccagtgctgctgcaactgctctcctgtgctctctgcggcagcaaggtgctcgctgcactggcagcctcttcgggatcctccagtgcttcttcctcctcagcccctgtggctgccagttctggacaagccacaacacagtccaagtcttccactaaaaagagcaagaaagaagaaaaagaaaaggagaaagatggtgagacctctggcagccaggaggaccagctgtgcacagctctggtgaaccagctgaacaaatttgccgataaggaaaccctgatccagttcctgcgttgtttcctgttagagtccaattcttcctcggtgcgctggcaggcccactgtctgacactgcacatctacagaaattccagcaaatctcaacaggagctcctgctagatctgatgtggtccatctggccagaactcccagcctatggtcgtaaggctgcccagtttgtggacctactaggatatttctccctgaaaactccacaaacagagaagaagttgaaggagtattcacagaaggctgtggagattctgcggactcaaaaccatattcttaccaaccaccccaactcgaacatttataacactttgtctggcttagtggagtttgatggctattacctggagagcgatccctgcctggtgtgtaataacccggaagtaccgttctgttatatcaagctgtcttccattaaagtggacacgcggtacaccaccacccagcaggttgtgaagctcattggcagtcacaccatcagcaaagtgacagtgaaaatcggggatctgaaacggaccaagatggtgcggaccatcaacctgtattataacaaccgaaccgtgcaggccatcgtggagttgaaaaacaagccagctcgctggcacaaagccaagaaggttcagctgacccctggacagacagaggtgaagattgacctgccgttgcccattgtggcctccaatctgatgattgagtttgcagacttctatgaaaactaccaggcctccacagagaccctgcagtgccctcgctgtagtgcctcggtccctgccaacccaggagtctgtggcaactgtggagagaatgtgtaccagtgtcacaaatgcagatccatcaactacgatgaaaaggatcccttcctctgcaatgcctgtggcttctgtaaatatgcccgcttcgacttcatgctctatgccaagccttgctgtgcagtggatcccattgagaatgaagaagaccggaagaaggctgtatccaacatcaatacacttttggacaaagctgatcgagtgtatcatcagctgatgggacaccggccacagctggagaacctgctctgcaaagtgaatgaggcagctccagaaaagccacaggatgactcaggaacagcagggggcatcagctccacttctgccagtgtgaatcgttacatcctgcagttggctcaggagtattgtggagactgcaagaactcttttgatgaactctccaaaatcatccagaaagtctttgcttcgcgcaaagagttgttggaatatgacctacagcagagggaagcagccactaaatcatcccggacctccgtgcagcccacattcactgccagccagtaccgtgccttatccgtcctgggctgtggccacacatcctccaccaagtgctatggctgcgcctcggctgtcacagaacattgtatcacactacttcgggccctggccaccaacccagccttgaggcacatccttgtctcccagggccttatccgggagctctttgattataatcttcgccgaggggctgcggccatgcgggaggaggtccgccagctcatgtgcctcctaactcgagacaacccagaagccacccaacagatgaatgacctgattattggcaaggtctccacagccctgaagggccactgggccaaccccgatctggcaagtagcctgcagtatgaaatgctgctgctgacggattctatctccaaggaggacagctgctgggagctccggttacgctgtgctctcagccttttcctcatggctgtgaacattaagactcctgtggtggttgaaaacattaccctcatgtgcctgaggatcttgcagaagctgataaaaccacctgctcccactagcaagaagaacaaggatgtccccgtcgaggccctcaccacggtgaagccatactgcaatgagatccatgcccaggctcaactgtggctcaagagagaccccaaggcatcctatgatgcctggaagaagtgtcttcctatcagagggatagatggcaatgggaaagcccccagcaaatcagagctccgccatctctatttgactgagaagtatgtgtggaggtggaaacagttcctgagtcgtcgggggaagaggacctcccccttggatctcaaactggggcataacaactggctgcgacaagtgcttttcactccagcaacgcaggccgcacggcaggcagcctgtaccattgtggaagctctagccaccattcccagccgcaagcagcaggtcctggacctgcttaccagttacctggatgagctgagcatagctggggagtgtgcagctgagtacctggctctctaccagaagctcatcacttctgcgcactggaaagtctacttggcagctcggggagtcctaccctatgtgggcaacctcatcaccaaggaaatagctcgtctgctggccctggaggaggctaccctgagtaccgatctgcagcagggttatgcccttaaaagtctcacaggccttctctcctcctttgttgaggtggaatccatcaaaagacattttaaaagtcgcttggtgggtactgtgctgaatggatacctgtgcttgcggaagctggtggtgcagaggaccaagctgatcgatgagacgcaggacatgctgctggagatgctggaggacatgaccacaggtacagaatcagaaaccaaggccttcatggctgtgtgcattgagacagccaagcgctacaatctggatgactaccggaccccggtgttcatcttcgagaggctctgcagcatcatttatcctgaggagaatgaagtcactgagttctttgtgaccctggagaaggatccccaacaagaagacttcttacagggcaggatgcctgggaacccgtatagcagcatctcgctttgaaaggtccgagctcgatttc

SEQ ID NO: 356675 - DNA, 1540 bp, Homo sapiens
gagcacatatactaaaattggaacgatacagagaagattagcatggcccctgcgcaaggatgacacgcaaattcgtgaagcgttccatattttaggcggtatgagtttggctgggggccgggcaccccggaagaccgctgggaaccggctttctgggcttttggaggcagaggaggaagatgagttctaccagacgacttatgggggtttcacagaggaatccggagatgatgagtatcaaggggaccagtcagacacagaggacgaagtggactctgactttgacattgatgaaggggatgaaccatccagtgatggagaagcagaagagccaagaaggaagcgccgagtagtcaccaaggcctataaggaacctctcaagagcttaaggcctcgaaaggtcaacaccccggctggtagctctcagaaggcgcgagaagagaaggcactactgccattagaactacaagatgacggctctgacagtcggaagtctatgcgtcagtctacagctgagcatacacgacaaacgttccttcgggtacaggagaggcagggccagtcaagacggcgaaaggggccccactgtgagcggccactaacccaggaggaactgctccgggaggccaagatcacagaagagcttaatttacggtcactggagacatatgagcggctcgaggctgataaaaagaagcaggttcataagaagcggaagtgccccgggcccataatcacctatcattcagtgacagtgccacttgttggggagccaggccccaaggaagagaacgttgacatagaaggacttgatcctgctccctcggtgtctgcattgactcctcatgctgggactggacccgtcaacccccctgctcgctgctcacgtaccttcatcacttttagtgatgatgcaactttcgaggaatggttcccccaagggcggcccccaaaagtccctgttcgtgaggtctgtccagtgacccatcgtccagccctataccgggaccctgttacagacataccctatgccactgctcgagccttcaagatcattcgtgaggcttacaagaagtacattactgcccatggactgccgcccactgcctcagccctgggccccggcccgccacctcctgagcccctccctggctctgggccccgagccttgcgccagaaaattgtcattaaatgaagagatgtctagtcctcagaaacttctttcctgccctgattggggctcttgctgttccgtttcttctccctgcttctcccctttgtcatctctgatctttgcctaatctgtttctttttccttttcccctagttcttacaggtttcgttgtgttttttaatctaataaaatagaaagatcccttttgtctggtgtccagtctagggttgggagcaagaagtatttgaatacctgcatatatttgggtctttattcgatagcatttattatgagctgtcctttctaaattgtattcattcctccaactaaattataaacatctgaaaattgcacaccaaaacacat

SEQ ID NO: 356676 - DNA, 1726 bp, Homo sapiens
  misc_feature (1383)..(1383): n is a, c, g, or t
  misc_feature (1385)..(1385): n is a, c, g, or t
  misc_feature (1389)..(1389): n is a, c, g, or t
  misc_feature (1497)..(1497): n is a, c, g, or t
gagcacatatactaaaattggaacgatacagagaagattagcatggcccctgcgcaaggatgacacgcaaattcgtgaagcgttccatattttaggcggtatgagtttggctgggggccgggcaccccggaagaccgctgggaaccggctttctgggcttttggaggcagaggaggaagatgagttctaccagacgacttatgggggtttcacagaggaatccggagatgatgagtatcaaggggaccagtcagacacagaggacgaagtggactctgactttgacattgatgaaggggatgaaccatccagtgatggagaagcagaagagccaagaaggaagcgccgagtagtcaccaaggcctataaggaacctctcaagagcttaaggcctcgaaaggtcaacaccccggctggtagctctcagaaggcgcgagaagagaaggcactactgccattagaactacaagatgacggctctgacagtcggaagtctatgcgtcagtctacagctgagcatacacgacaaacgttccttcgggtacaggagaggcagggccagtcaagacggcgaaaggggccccactgtgagcggccactaacccaggaggaactgctccgggaggccaagatcacagaagagcttaatttacggtcactggagacatatgagcggctcgaggctgataaaaagaagcaggttcataagaagcggaagtgccccgggcccataatcacctatcattcagtgacagtgccacttgttggggagccaggccccaaggaagagaacgttgacatagaaggacttgatcctgctccctcggtgtctgcattgactcctcatgctgggactggacccgtcaacccccctgctcgctgctcacgtaccttcatcacttttagtgatgatgcaactttcgaggaatggttcccccaagggcggcccccaaaagtccctgttcgtgaggtctgtccagtgacccatcgtccagccctataccgggaccctgttacagacataccctatgccactgctcgagccttcaagatcattcgtgaggcttacaagaagtacattactgcccatggactgccgcccactgcctcagccctgggccccggcccgccacctcctgagcccctccctggctctgggccccgagccttgcgccagaaaattgtcattaaatgaagagatgtctagtcctcagaaacttctttcctgccctgattggggctcttgctgttccgtttcttctccctgcttctcccctttgtcatctctgatctttgcctaatctgtttctttttccttttcccctagttcttacaggtttcgttgtgttttttaatctaataaaatagaaagatccctttaananaaanaaaaaaagaaaaaaaaaaacaaaaaaaaaaaaaaaaaaaaaaggggggggggcccccaaaaaatccccacgcggggggggccccaagatgatgccgcccccccgcagntattttgggtagatgacagaggaggggccccccccaatagagagggggcacccctatttattaataaaagcgcacagcgacgcgggccgccccgctatttacacaaacgcgcggcggacggaggtgagaaaacaacgtgccgacgcgggaggacaccttttgggaagggaccccccactgaccgcgggggggggggaacacacaagtggggccaccaacactccccgga

SEQ ID NO: 356677 - DNA, 6827 bp, Homo sapiens
gtgacctagaggttccgccacaagcgcgatctcaaaggtccaggtctctttggatgagcatttttctaagatggctgctgagactgatcctcataagtcgtctgagattaccaagaacctacttccagccacgctgcaactcattgacacctatgcatcgttcaccagagcctatttgctgcaaaactttaatgaagagggaacaactgagaaaccttccaaggagaaactgcaaggctttgctgctgttttggctattggctctagcaggtgcaaggcaaatactctgggtccgacactggttcagaatttgccatcgtcagtgcagactgtgtgtgagtcctggaacaacatcaataccaatgaatttcccaatattggatcctggcgcaatgcctttgccaatgacaccatcccttcagagagttatattagtgcagtgcaggctgcacacctggggactctctgtagccaaagtctgcccctggctgcttccctgaagcataccctcctctcactggtcaggttgactggagatcttattgtttggtcagatgagatgaacccaccacaggtaattcggacactgctacctcttcttttggaatcaagcactgagagtgttgccgagatcagtagcaactccctggaacgcatcttgggccctgctgagtctgatgagttcttggctcgtgtttatgagaagctgatcactggttgttacaacattctggccaatcatgcagatcctaacagtggactggatgaatccatcctggaggaatgtctccagtacttggaaaagcagctggaaagtagccaggctcgtaaagctatggaggagtttttctctgacagtggagaacttgtacagatcatgatggcaacagccaatgagaacctctctgctaaattctgtaaccgagttttgaaattcttcaccaaactcttccagctgactgagaagagccctaacccgagcctgttgcatctctgtggctccctggcacaactggcctgtgtggaacctgtgcgcctgcaggcctggctcacccgcatgactacatcgcccccaaaagattctgatcagctggatgtaattcaggagaaccggcagctgctgcagttactgaccacatacattgttcgggaaaacagccaagttggggaaggtgtgtgtgctgttcttctgggcaccctgactcccatggcaacagagatgctggccaacggtgatgggactggcttccctgaacttatggttgtgatggccactctggccagtgcaggtcaaggtgctggtcaccttcagcttcataatgctgctgtggattggctgagcagatgcaagaaatacctgtcacagaagaatgtagttgaaaaactgaatgccaatgtaatgcatggaaagcatgtgatgatcttggagtgcacatgccatatcatgtcttacttggctgatgtcacgaatgccctgagccagagtaatggtcaaggcccaagtcatctctcagtggatggggaagagcgggccattgaagtagactcagactgggtggaggagttggcggtggaagaggaagattcccaggctgaggattcagatgaagattctctttgcaataaactctgcacttttacgatcacacagaaagaattcatgaaccagcattggtaccactgtcacacctgtaaaatggtggatggcgtgggtgtctgcacagtgtgtgctaaggtgtgccacaaggatcatgagatttcctatgccaagtatggatccttcttctgtgactgtggagccaaggaagatggcagctgtttggctctggtgaagagaactcctagcagtggcatgagctctaccatgaaggagtcggcatttcagagtgaacccaggatttcagagagtctagtgcgtcatgccagcacctcctcgccagctgacaaagccaaggttaccatcagtgatggaaaggttgctgacgaagagaagcccaagaagagcagcctctgccgcacagtagagggctgccgggaggaattacagaaccaggccaatttctccttcgctcctctcgtgttagacatgcttaatttccttatggatgccattcagaccaacttccagcaagcttcagccgtcgggagcagcagccgtgctcagcaagccctcagtgagctacacactgtggagaaggcagtggagatgacagaccagctgatggttcccaccttagggtcccaggaaggtgcctttgagaatgtgcggatgaattacagtggagaccagggccagaccatccggcagctgatcagtgctcatgtgctcaggcgggtggctatgtgtgtgctctcctctccccatgggcgccgccaacatttggctgtcagccatgagaagggcaagatcaccgttctgcagctctctgcactcctgaagcaagcagattccagcaaaaggaagttaactctgacccgcttggcttctgccccagttccttttactgtgttgagcctcacaggaaatccctgcaaggaagactacttggcggtttgtgggctaaaggactgtcatgtgctcacctttagtagctcaggctctgtttcggatcacttggttttgcaccctcagttggcaacggggaacttcatcatcaaagccgtgtggttacctggttcacagaccgagttagcaattgtcaccgcagactttgttaagatttatgacctgtgtgttgatgccttgagtccaaccttctattttctcctgccaagctcaaagataagagatgttaccttccttttcaatgaggagggaaagaacatcattgttataatgtcttcggctgggtacatctatactcagcttatggaagaggccagcagtgcccagcagggacccttctatgtcactaatgtgttggaaatcaatcatgaggacctgaaggacagtaacagccaggtggcgggcggtggtgtgtccgtgtactactcccacgtgttgcagatgttgttcttcagctattgtcaaggcaaatcattcgcagccaccatcagcaggacaaccctggaggtgttgcaactcttccccatcaacatcaaaagttccaatggtggcagtaagacttctcctgctctttgccagtggtctgaggtgatgaaccaccctggcttggtgtgctgtgtccagcaaactacaggggtgccgctggtagttatggtgaaaccagacacttttcttatccaggagattaagactcttcctgctaaagcgaagatccaagacatggttgctattaggcacacggcctgcaatgagcagcagcggacaacaatgattctgctgtgtgaggatggcagcctgcgcatttacatggccaacgtggagaacacctcctactggctgcagccatccctgcagcccagcagtgtcatcagcatcatgaagcctgttcgaaagcgcaaaacagctacaatcacaacccgcacgtctagccaggtgactttccccattgacttttttgaacacaaccagcagctgacagatgtggagtttggtggtaacgacctcctacaggtctataatgcacaacagataaaacaccggctgaattccactggcatgtatgtggccaacaccaagcccggaggcttcaccattgagattagtaacaacaatagcactatggtgatgacaggcatgcggatccagattgggactcaagcaatagaacgggccccgtcatatatcgagatcttcggcagaactatgcagctcaacctgagtcgctcacgctggtttgacttccccttcaccagagaagaagccctgcaggctgataagaagctgaacctcttcattggggcctcggtggatccagcaggtgtcaccatgatagatgctgtaaaaatttatggcaagactaaggagcagtttggctggcctgatgagcccccagaagaattcccttctgcctctgtcagcaacatctgcccttcaaatctgaaccagagcaacggcactggagatagcgactcagctgcccccactacgaccagtggaactgtcctggagaggctggttgtgagttctttagaagccctggaaagctgctttgccgttggcccaatcatcgagaaggagagaaacaagaatgctgctcaggagctggccactttgctgttgtccctgccagcacctgccagtgtccagcagcagtccaagagccttctggccagcctgcacaccagccgctcggcctaccacagccacaaggatcaggccttgctgagcaaagctgtgcagtgtctcaacacatctagcaaagagggcaaggatttggaccctgaggtgttccagaggctagtgatcacagctcgctccattgccatcatgcgccccaacaaccttgtccactttacggagtcaaagctgccccagatggaaacagactgtttttttcctagatgtgcctgctggagtctagggatagttggcatattgattggggccccacttgaaactccctccccaggcaagcttccttgacctgagttaaccttaaaacaaattaaattccatctcagatttaccatcgttgataattttctttctcctgcttagaaggaatggatgaagggaaggaaccgcagaagcagttggaaggagattgctgtagtttcatcacccagcttgtgaaccacttctggaaactccatgcatccaaacccaagaatgccttcttggcacctgcctgccttccaggactaactcatattgaagctactgtcaatgctctggtggacatcatccatggctactgtacctgtgagctggattgtattaacacagcatccaagatctacatgcagatgctcttgtgtcctgatcctgctgtgagcttctcttgtaaacaagctctaattcgagtcctaaggcccaggaacaaacggagacatgtgactttaccctcttcccctcgaagcaacactccaatgggagacaaggatgatgatgacgatgatgatgcagatgagaaaatgcagtcatcagggatcccgaatggtggtcacatccgtcaggaaagccaggaacagagtgaggtggaccatggagattttgagatggtgtctgagtcgatggtcctggagacagctgaaaatgtcaacaatggcaacccctctcccctggaggccctgctggcaggcgcagagggcttcccccccatgctggacatcccacctgatgcagatgacgagaccatggttgaactagccattgccctgagcctgcagcaggaccaacaaggcagcagcagcagtgccctgggcctgcagagcctgggactgtccggccaggcacccagctcttcctctctggacgcaggaaccctctctgacaccacagcatcagctccagcctcagacgacgagggcagtacagcagcgacagatggttctacccttcggacctctcctgctgaccacggtggtagtgtgggctcggagagcgggggcagtgcagtggactcagtggctggcgagcacagtgtatctggccggagcagtgcttatggcgatgctacagctgaggggcatccggctggaccaggaagtgtcagctcaagcactggagccatcagcaccaccactgggcaccaggagggagatggctccgagggagaaggagaaggagaaactgaaggagatgtccacactagcaacaggctgcacatggtccgtctaatgctgttggagagattactgcagaccctgcctcaattacgaaacgttggcggtgtccgggccatcccatacatgcaggtcattctaatgctcactacagatctggatggagaagatgagaaagacaagggggccctagacaacctgctctcccagcttattgctgagttgggtatggataaaaaggatgtctccaagaagaatgagcgcagcgccctgaatgaagtccatctggtagtaatgagactcctgagtgtcttcatgtcccgcaccaaatctggatccaagtcttccatatgtgagtcatcttccctcatctccagtgccacagcagcagctctactgagctctggggctgtggactactgcctgcacgtgctcaaatcactgctggaatattggaagagccaacagaatgacgaggagcctgtggctaccagccagttgctgaaaccacatactacctcctccccacctgacatgagcccattctttctccgccagtatgtgaagggtcatgctgctgatgtgtttgaggcctatactcagcttctaacagaaatggtactgaggcttccttaccaaatcaaaaagattactgacaccaattctcgaatcccacctcctgtctttgaccactcgtggttttactttctctccgagtacctcatgatccagcagactccatttgtgcgccgtcaagtccgcaaacttctgctcttcatctgtggatccaaagagaagtaccgccagctccgggatttgcacaccctggactctcacgtgcgtgggatcaagaagctgctagaagagcaggggatattcctccgggcaagtgtggttacagccagctcaggctccgccttgcaatatgacacactcatcagcctgatggagcacctgaaagcctgtgcagagattgccgcccagcgaaccatcaactggcagaaattctgcatcaaagatgactccgtcctgtacttcctcctcccaagggaaagtgtttttgtatataatgtattttttcacttttggaggattctttttgtataacttcaataaagattgtaagcaaaggttga

SEQ ID NO: 356678 - DNA, 6442 bp, Homo sapiens
gtgacctagaggttccgccacaagcgcgatctcaaaggtccaggtctctttggatgagcatttttctaagatggctgctgagactgatcctcataagtcgtctgagattaccaagaacctacttccagccacgctgcaactcattgacacctatgcatcgttcaccagagcctatttgctgcaaaactttaatgaagagggaacaactgagaaaccttccaaggagaaactgcaaggctttgctgctgttttggctattggctctagcaggtgcaaggcaaatactctgggtccgacactggttcagaatttgccatcgtcagtgcagactgtgtgtgagtcctggaacaacatcaataccaatgaatttcccaatattggatcctggcgcaatgcctttgccaatgacaccatcccttcagagagttatattagtgcagtgcaggctgcacacctggggactctctgtagccaaagtctgcccctggctgcttccctgaagcataccctcctctcactggtcaggttgactggagatcttattgtttggtcagatgagatgaacccaccacaggtaattcggacactgctacctcttcttttggaatcaagcactgagagtgttgccgagatcagtagcaactccctggaacgcatcttgggccctgctgagtctgatgagttcttggctcgtgtttatgagaagctgatcactggttgttacaacattctggccaatcatgcagatcctaacagtggactggatgaatccatcctggaggaatgtctccagtacttggaaaagcagctggaaagtagccaggctcgtaaagctatggaggagtttttctctgacagtggagaacttgtacagatcatgatggcaacagccaatgagaacctctctgctaaattctgtaaccgagttttgaaattcttcaccaaactcttccagctgactgagaagagccctaacccgagcctgttgcatctctgtggctccctggcacaactggcctgtgtggaacctgtgcgcctgcaggcctggctcacccgcatgactacatcgcccccaaaagattctgatcagctggatgtaattcaggagaaccggcagctgctgcagttactgaccacatacattgttcgggaaaacagccaagttggggaaggtgtgtgtgctgttcttctgggcaccctgactcccatggcaacagagatgctggccaacggtgatgggactggcttccctgaacttatggttgtgatggccactctggccagtgcaggtcaaggtgctggtcaccttcagcttcataatgctgctgtggattggctgagcagatgcaagaaatacctgtcacagaagaatgtagttgaaaaactgaatgccaatgtaatgcatggaaagcatgtgatgatcttggagtgcacatgccatatcatgtcttacttggctgatgtcacgaatgccctgagccagagtaatggtcaaggcccaagtcatctctcagtggatggggaagagcgggccattgaagtagactcagactgggtggaggagttggcggtggaagaggaagattcccaggctgaggattcagatgaagattctctttgcaataaactctgcacttttacgatcacacagaaagaattcatgaaccagcattggtaccactgtcacacctgtaaaatggtggatggcgtgggtgtctgcacagtgtgtgctaaggtgtgccacaaggatcatgagatttcctatgccaagtatggatccttcttctgtgactgtggagccaaggaagatggcagctgtttggctctggtgaagagaactcctagcagtggcatgagctctaccatgaaggagtcggcatttcagagtgaacccaggatttcagagagtctagtgcgtcatgccagcacctcctcgccagctgacaaagccaaggttaccatcagtgatggaaaggttgctgacgaagagaagcccaagaagagcagcctctgccgcacagtagagggctgccgggaggaattacagaaccaggccaatttctccttcgctcctctcgtgttagacatgcttaatttccttatggatgccattcagaccaacttccagcaagcttcagccgtcgggagcagcagccgtgctcagcaagccctcagtgagctacacactgtggagaaggcagtggagatgacagaccagctgatggttcccaccttagggtcccaggaaggtgcctttgagaatgtgcggatgaattacagtggagaccagggccagaccatccggcagctgatcagtgctcatgtgctcaggcgggtggctatgtgtgtgctctcctctccccatgggcgccgccaacatttggctgtcagccatgagaagggcaagatcaccgttctgcagctctctgcactcctgaagcaagcagattccagcaaaaggaagttaactctgacccgcttggcttctgccccagttccttttactgtgttgagcctcacaggaaatccctgcaaggaagactacttggcggtttgtgggctaaaggactgtcatgtgctcacctttagtagctcaggctctgtttcggatcacttggttttgcaccctcagttggcaacggggaacttcatcatcaaagccgtgtggttacctggttcacagaccgagttagcaattgtcaccgcagactttgttaagatttatgacctgtgtgttgatgccttgagtccaaccttctattttctcctgccaagctcaaagataagagatgttaccttccttttcaatgaggagggaaagaacatcattgttataatgtcttcggctgggtacatctatactcagcttatggaagaggccagcagtgcccagcagggacccttctatgtcactaatgtgttggaaatcaatcatgaggacctgaaggacagtaacagccaggtggcgggcggtggtgtgtccgtgtactactcccacgtgttgcagatgttgttcttcagctattgtcaaggcaaatcattcgcagccaccatcagcaggacaaccctggaggtgttgcaactcttccccatcaacatcaaaagttccaatggtggcagtaagacttctcctgctctttgccagtggtctgaggtgatgaaccaccctggcttggtgtgctgtgtccagcaaactacaggggtgccgctggtagttatggtgaaaccagacacttttcttatccaggagattaagactcttcctgctaaagcgaagatccaagacatggttgctattaggcacacggcctgcaatgagcagcagcggacaacaatgattctgctgtgtgaggatggcagcctgcgcatttacatggccaacgtggagaacacctcctactggctgcagccatccctgcagcccagcagtgtcatcagcatcatgaagcctgttcgaaagcgcaaaacagctacaatcacaacccgcacgtctagccaggtgactttccccattgacttttttgaacacaaccagcagctgacagatgtggagtttggtggtaacgacctcctacaggtctataatgcacaacagataaaacaccggctgaattccactggcatgtatgtggccaacaccaagcccggaggcttcaccattgagattagtaacaacaatagcactatggtgatgacaggcatgcggatccagattgggactcaagcaatagaacgggccccgtcatatatcgagatcttcggcagaactatgcagctcaacctgagtcgctcacgctggtttgacttccccttcaccagagaagaagccctgcaggctgataagaagctgaacctcttcattggggcctcggtggatccagcaggtgtcaccatgatagatgctgtaaaaatttatggcaagactaaggagcagtttggctggcctgatgagcccccagaagaattcccttctgcctctgtcagcaacatctgcccttcaaatctgaaccagagcaacggcactggagatagcgactcagctgcccccactacgaccagtggaactgtcctggagaggctggttgtgagttctttagaagccctggaaagctgctttgccgttggcccaatcatcgagaaggagagaaacaagaatgctgctcaggagctggccactttgctgttgtccctgccagcacctgccagtgtccagcagcagtccaagagccttctggccagcctgcacaccagccgctcggcctaccacagccacaaggatcaggccttgctgagcaaagctgtgcagtgtctcaacacatctagcaaagagggcaaggatttggaccctgaggtgttccagaggctagtgatcacagctcgctccattgccatcatgcgccccaacaaccttgtccactttacggagtcaaagctgccccagatggaaacagactgtttttttcctagatgtgcctgctggagtctagggatagttggcatattgattggggccccacttgaaactccctccccaggcaagcttccttgacctgagttaaccttaaaacaaattaaattccatctcagatttaccatcgttgataattttctttctcctgcttagaaggaatggatgaagggaaggaaccgcagaagcagttggaaggagattgctgtagtttcatcacccagcttgtgaaccacttctggaaactccatgcatccaaacccaagaatgccttcttggcacctgcctgccttccaggactaactcatattgaagctactgtcaatgctctggtggacatcatccatggctactgtacctgtgagctggattgtattaacacagcatccaagatctacatgcagatgctcttgtgtcctgatcctgctgtgagcttctcttgtaaacaagctctaattcgagtcctaaggcccaggaacaaacggagacatgtgactttaccctcttcccctcgaagcaacactccaatgggagacaaggatgatgatgacgatgatgatgcagatgagaaaatgcagtcatcagggatcccgaatggtggtcacatccgtcaggaaagccaggaacagagtgaggtggaccatggagattttgagatggtgtctgagtcgatggtcctggagacagctgaaaatgtcaacaatggcaacccctctcccctggaggccctgctggcaggcgcagagggcttcccccccatgctggacatcccacctgatgcagatgacgagaccatggttgaactagccattgccctgagcctgcagcaggaccaacaaggcagcagcagcagtgccctgggcctgcagagcctgggactgtccggccaggcacccagctcttcctctctggacgcaggaaccctctctgacaccacagcatcagctccagcctcagacgacgagggcagtacagcagcgacagatggttctacccttcggacctctcctgctgaccacggtggtagtgtgggctcggagagcgggggcagtgcagtggactcagtggctggcgagcacagtgtatctggccggagcagtgcttatggcgatgctacagctgaggggcatccggctggaccaggaagtgtcagctcaagcactggagccatcagcaccaccactgggcaccaggagggagatggctccgagggagaaggagaaggagaaactgaaggagatgtccacactagcaacaggctgcacatggtccgtctaatgctgttggagagattactgcagaccctgcctcaattacgaaacgttggcggtgtccgggccatcccatacatgcaggtcattctaatgctcactacagatctggatggagaagatgagaaagacaagggggccctagacaacctgctctcccagcttattgctgagttgggtatggataaaaaggatgtctccaagaagaatgagcgcagcgccctgaatgaagtccatctggtagtaatgagactcctgagtgtcttcatgtcccgcaccaaatctggatccaagtcttccatatgtgagtcatcttccctcatctccagtgccacagcagcagctctactgagctctggggctgtggactactgcctgcacgtgctcaaatcactgctggaatattggaagagccaacagaatgacgaggagcctgtggctaccagccagttgctgaaaccacatactacctcctccccacctgacatgagcccattctttctccgccagtatgtgaagggtcatgctgctgatgtgtttgaggcctatactcagcttctaacagaaatggtactgaggcttccttaccaaatcaaaaagattactgacaccaattctcgaatcccacctcctgtctttgaccactcgtggttttactttctctccgagtacctcatgtcaaacattgggccgagctcgatga

SEQ ID NO: 356679 - DNA, 5467 bp, Homo sapiens
gtgacctagaggttccgccacaagcgcgatctcaaaggtccaggtctctttggatgagcatttttctaagatggctgctgagactgatcctcataagtcgtctgagattaccaagaacctacttccagccacgctgcaactcattgacacctatgcatcgttcaccagagcctatttgctgcaaaactttaatgaagagggaacaactgagaaaccttccaaggagaaactgcaaggctttgctgctgttttggctattggctctagcaggtgcaaggcaaatactctgggtccgacactggttcagaatttgccatcgtcagtgcagactgtgtgtgagtcctggaacaacatcaataccaatgaatttcccaatattggatcctggcgcaatgcctttgccaatgacaccatcccttcagagagttatattagtgcagtgcaggctgcacacctggggactctctgtagccaaagtctgcccctggctgcttccctgaagcataccctcctctcactggtcaggttgactggagatcttattgtttggtcagatgagatgaacccaccacaggtaattcggacactgctacctcttcttttggaatcaagcactgagagtgttgccgagatcagtagcaactccctggaacgcatcttgggccctgctgagtctgatgagttcttggctcgtgtttatgagaagctgatcactggttgttacaacattctggccaatcatgcagatcctaacagtggactggatgaatccatcctggaggaatgtctccagtacttggaaaagcagctggaaagtagccaggctcgtaaagctatggaggagtttttctctgacagtggagaacttgtacagatcatgatggcaacagccaatgagaacctctctgctaaattctgtaaccgagttttgaaattcttcaccaaactcttccagctgactgagaagagccctaacccgagcctgttgcatctctgtggctccctggcacaactggcctgtgtggaacctgtgcgcctgcaggcctggctcacccgcatgactacatcgcccccaaaagattctgatcagctggatgtaattcaggagaaccggcagctgctgcagttactgaccacatacattgttcgggaaaacagccaagttggggaaggtgtgtgtgctgttcttctgggcaccctgactcccatggcaacagagatgctggccaacggtgatgggactggcttccctgaacttatggttgtgatggccactctggccagtgcaggtcaaggtgctggtcaccttcagcttcataatgctgctgtggattggctgagcagatgcaagaaatacctgtcacagaagaatgtagttgaaaaactgaatgccaatgtaatgcatggaaagcatgtgatgatcttggagtgcacatgccatatcatgtcttacttggctgatgtcacgaatgccctgagccagagtaatggtcaaggcccaagtcatctctcagtggatggggaagagcgggccattgaagtagactcagactgggtggaggagttggcggtggaagaggaagattcccaggctgaggattcagatgaagattctctttgcaataaactctgcacttttacgatcacacagaaagaattcatgaaccagcattggtaccactgtcacacctgtaaaatggtggatggcgtgggtgtctgcacagtgtgtgctaaggtgtgccacaaggatcatgagatttcctatgccaagtatggatccttcttctgtgactgtggagccaaggaagatggcagctgtttggctctggtgaagagaactcctagcagtggcatgagctctaccatgaaggagtcggcatttcagagtgaacccaggatttcagagagtctagtgcgtcatgccagcacctcctcgccagctgacaaagccaaggttaccatcagtgatggaaaggttgctgacgaagagaagcccaagaagagcagcctctgccgcacagtagagggctgccgggaggaattacagaaccaggccaatttctccttcgctcctctcgtgttagacatgcttaatttccttatggatgccattcagaccaacttccagcaagcttcagccgtcgggagcagcagccgtgctcagcaagccctcagtgagctacacactgtggagaaggcagtggagatgacagaccagctgatggttcccaccttagggtcccaggaaggtgcctttgagaatgtgcggatgaattacagtggagaccagggccagaccatccggcagctgatcagtgctcatgtgctcaggcgggtggctatgtgtgtgctctcctctccccatgggcgccgccaacatttggctgtcagccatgagaagggcaagatcaccgttctgcagctctctgcactcctgaagcaagcagattccagcaaaaggaagttaactctgacccgcttggcttctgccccagttccttttactgtgttgagcctcacaggaaatccctgcaaggaagactacttggcggtttgtgggctaaaggactgtcatgtgctcacctttagtagctcaggctctgtttcggatcacttggttttgcaccctcagttggcaacggggaacttcatcatcaaagccgtgtggttacctggttcacagaccgagttagcaattgtcaccgcagactttgttaagatttatgacctgtgtgttgatgccttgagtccaaccttctattttctcctgccaagctcaaagataagagatgttaccttccttttcaatgaggagggaaagaacatcattgttataatgtcttcggctgggtacatctatactcagcttatggaagaggccagcagtgcccagcagggacccttctatgtcactaatgtgttggaaatcaatcatgaggacctgaaggacagtaacagccaggtggcgggcggtggtgtgtccgtgtactactcccacgtgttgcagatgttgttcttcagctattgtcaaggcaaatcattcgcagccaccatcagcaggacaaccctggaggtgttgcaactcttccccatcaacatcaaaagttccaatggtggcagtaagacttctcctgctctttgccagtggtctgaggtgatgaaccaccctggcttggtgtgctgtgtccagcaaactacaggggtgccgctggtagttatggtgaaaccagacacttttcttatccaggagattaagactcttcctgctaaagcgaagatccaagacatggttgctattaggcacacggcctgcaatgagcagcagcggacaacaatgattctgctgtgtgaggatggcagcctgcgcatttacatggccaacgtggagaacacctcctactggctgcagccatccctgcagcccagcagtgtcatcagcatcatgaagcctgttcgaaagcgcaaaacagctacaatcacaacccgcacgtctagccaggtgactttccccattgacttttttgaacacaaccagcagctgacagatgtggagtttggtggtaacgacctcctacaggtctataatgcacaacagataaaacaccggctgaattccactggcatgtatgtggccaacaccaagcccggaggcttcaccattgagattagtaacaacaatagcactatggtgatgacaggcatgcggatccagattgggactcaagcaatagaacgggccccgtcatatatcgagatcttcggcagaactatgcagctcaacctgagtcgctcacgctggtttgacttccccttcaccagagaagaagccctgcaggctgataagaagctgaacctcttcattggggcctcggtggatccagcaggtgtcaccatgatagatgctgtaaaaatttatggcaagactaaggagcagtttggctggcctgatgagcccccagaagaattcccttctgcctctgtcagcaacatctgcccttcaaatctgaaccagagcaacggcactggagatagcgactcagctgcccccactacgaccagtggaactgtcctggagaggctggttgtgagttctttagaagccctggaaagctgctttgccgttggcccaatcatcgagaaggagagaaacaagaatgctgctcaggagctggccactttgctgttgtccctgccagcacctgccagtgtccagcagcagtccaagagccttctggccagcctgcacaccagccgctcggcctaccacagccacaaggatcaggccttgctgagcaaagctgtgcagtgtctcaacacatctagcaaagagggcaaggatttggaccctgaggtgttccagaggctagtgatcacagctcgctccattgccatcatgcgccccaacaaccttgtccactttacggagtcaaagctgccccagatggaaacagactgtttttttcctagatgtgcctgctggagtctagggatagttggcatattgattggggccccacttgaaactccctccccaggcaagcttccttgacctgagttaaccttaaaacaaattaaattccatctcagatttaccatcgttgataattttctttctcctgcttagaaggaatggatgaagggaaggaaccgcagaagcagttggaaggagattgctgtagtttcatcacccagcttgtgaaccacttctggaaactccatgcatccaaacccaagaatgccttcttggcacctgcctgccttccaggactaactcatattgaagctactgtcaatgctctggtggacatcatccatggctactgtacctgtgagctggattgtattaacacagcatccaagatctacatgcagatgctcttgtgtcctgatcctgctgtgagcttctcttgtaaacaagctctaattcgagtcctaaggcccaggaacaaacggagacatgtgactttaccctcttcccctcgaagcaacactccaatgggagacaaggatgatgatgacgatgatgatgcagatgagaaaatgcagtcatcagggatcccgaatggtggtcacatccgtcaggaaagccaggaacagagtgaggtggaccatggagattttgagatggtgtctgagtcgatggtcctggagacagctgaaaatgtcaacaatggcaacccctctcccctggaggccctgctggcaggcgcagagggcttcccccccatgctggacatcccacctgatgcagatgacgagaccatggttgaactagccattgccctgagcctgcagcaggaccaacaaggtagaaggccatgccaagaacaaagcggcccattggccttgcacaggaaaagagggtttggcagttactgatatccagctgacttagtttgtccccagatatggggagaggttgatctgggtgagagctgttcagagatacaggtggagagtgagaggg

SEQ ID NO: 356680 - DNA, 924 bp, Homo sapiens
gagcacatatactaaaattggaacgatacagagaagattagcatggcccctgcgcaaggatgacacgcaaattcgtgaagcgttccatattttaggcggtatgagtttggctgggggccgggcaccccggaagaccgctgggaaccggctttctgggcttttggaggcagaggaggaagatgagttctaccagacgacttatgggggtttcacagaggaatccggagatgatgagtatcaaggggaccagtcagacacagaggacgaagtggactctgactttgacattgatgaaggggatgaaccatccagtgatggagaagcagaagagccaagaaggaagcgccgagtagtcaccaaggcctataaggaacctctcaagagcttaaggcctcgaaaggtcaacaccccggctggtagctctcagaaggcgcgagaagagaaggcactactgccattagaactacaagatgacggctctgacagtcggaagtctatgcgtcagtctacagctgagcatacacgacaaacgttccttcgggtacaggagaggcagggccagtcaagacggcgaaaggggccccactgtgagcggccactaacccaggaggaactgctccgggaggccaagatcacagaagagcttaatttacggtcactggagacatatgagcggctcgaggctgataaaaagaagcaggttcataagaagcggaagtgccccgggcccataatcacctatcattcagtgacagtgccacttgttggggagccaggccccaaggaagagaacgttgacatagaagggtcgccagcaaaagaagagataacactgcatttccctttaccaactagcgctgggagcactggacacttaaatcctcatctgtcctcctttcctgtaaataaaagcccttctatcca

SEQ ID NO: 356681 - DNA, 295 bp, Homo sapiens
tgacatgatacgagtcgagctcggtaccgaattcgacaagtgtgcattaagttccctccgcgggatgctgcattgttaccccgccctcccctctctcatttttcttggtgtggcttggggtttttaggcttcctgttttatctcgtgtgtgtggtgcaccagctatgaggttgtctgtaacccaagccatcaaagggcctgtacatacctaggagccatgagttgtcccggccagcttcatacttgagtgtgcacatcttgagaaataaacaagtgacttaacacacattgaaaa

SEQ ID NO: 356682 - DNA, 1117 bp, Homo sapiens
gagcacatatactaaaattggaacgatacagagaagattagcatggcccctgcgcaaggatgacacgcaaattcgtgaagcgttccatattttaggcggtatgagtttggctgggggccgggcaccccggaagaccgctgggaaccggctttctgggcttttggaggcagaggaggaagatgagttctaccagacgacttatgggggtttcacagaggaatccggagatgatgagtatcaaggggaccagtcagacacagaggacgaagtggactctgactttgacattgatgaaggggatgaaccatccagtgatggagaagcagaagagccaagaaggaagcgccgagtagtcaccaaggcctataaggaacctctcaagagcttaaggcctcgaaaggtcaacaccccggctggtagctctcagaaggcgcgagaagagaaggcactactgccattagaactacaagatgacggctctgacagtcggaagtctatgcgtcagtctacagctgagcatacacgacaaacgttccttcgggtacaggagaggcagggccagtcaagacggcgaaaggggccccactgtgagcggccactaacccaggaggaactgctccgggaggccaagatcacagaagagcttaatttacggtcactggacttgatcctgctccctcggtgtctgcattgactcctcatgctgggactggacccgtcaacccccctgctcgctgctcacgtaccttcatcacttttagtgatgatgcaactttcgaggaatggttcccccaagggcggcccccaaaagtccctgttcgtgaggtctgtccagtgacccatcgtccagcctgggccccggcccgccacctcctgagcccctccctggctctgggccccgagccttgcgccagaaaattgtcattaaatgaagagatgtctagtcctcagaaacttctttcctgccctgattggggctcttgctgttccgtttcttctccctgcttctcccctttgtcatctctgatctttgcctaatctgtttctttttccttttcccctagttcttacaggtttcgttgtgttttttaatctaataaaatagaaagatcccttt

SEQ ID NO: 356683 - DNA, 809 bp, Homo sapiens
gagcacatatactaaaattggaacgatacagagaagattagcatggcccctgcgcaaggatgacacgcaaattcgtgaagcgttccatattttaggcggtatgagtttggctgggggccgggcaccccggaagaccgctgggaaccggctttctgggcttttggaggcagaggaggaagatgagttctaccagacgacttatgggggtttcacagaggaatccggagatgatgagtatcaaggggaccagtcagacacagaggacgaagtggactctgactttgacattgatgaaggggatgaaccatccagtgatggagaagcagaagagccaagaaggaagcgccgagtagtcaccaaggcctataaggaacctctcaagagcttaaggcctcgaaaggtcaacaccccggctggtagctctcagaaggcgcgagaagagaaggcactactgccattagaactacaagatgacggctctgacagtcggaagtctatgcgtcagtctacagctgagcatacacgacaaacgttccttcgggtacaggagaggcagggccagtcaagacggcgaaaggggccccactgtgagcggccactaacccaggaggaactgctccgggaggccaagatcacagaagagcttaatttacggtcactgggtaagtctgtggtttcagaaaaagtgagtagaggggctgaggggcatgagaaaaaccatgagacctggaggaccaaagaactggagagatggaaatttgggatgatggaatcagaaggaagaaatggcggagcagttccacttagct

SEQ ID NO: 356684 - DNA, 537 bp, Homo sapiens
gagcacatatactaaaattggaacgatacagagaagattagcatggcccctgcgcaaggatgacacgcaaattcgtgaagcgttccatattttaggcggtatgagtttggctgggggccgggcaccccggaagaccgctgggaaccggctttctgggcttttggaggcagaggaggaagatgagttctaccagacgacttatgggggtttcacagaggaatccggagatgatgagtatcaaggggaccagtcagacacagaggacgaagtggactctgactttgacattgatgaaggggatgaaccatccagtgatggagaagcagaagagcagaaaattgtcattaaatgaagagatgtctagtcctcagaaacttctttcctgccctgattggggctcttgctgttccgtttcttctccctgcttctcccctttgtcatctctgatctttgcctaatctgtttctttttccttttcccctagttcttacaggtttcgttgtgttttttaatctaataaaatagaaagatcccttt

SEQ ID NO: 356685 - DNA, 410 bp, Homo sapiens
caaaatggtttaacaggaacacatatttgggcataagagatacacgtgttgatcctcctgatcttcttgcctttgcacatcaccccctggggcaccagtgccatgctgttggggctatggctcaggtgtgcccttgagcgccctcaccttgctccacttgcctcctccaggatgtccccgtcgaggccctcaccacggtgaagccatactgcaatgagatccatgcccaggctcaactgtggctcaagagagaccccaaggcatcctatgatgcctggaagaagtgtcttcctatcagaggtatatctttctcttcaagacgccgggaagtcctgcctgcgctctgacagccctgccttctgtcactctcatttacttacctactacccctgcaacccttggccttgcag

SEQ ID NO: 356686 - DNA, 348 bp, Homo sapiens
gcaggccatcgtggagttgaaaaacaagtacgggctttttaggcctcgggaggggcagcaggttgtaaggctgaagctcagttgctgccttcggttcctggaatggagtaaggcagcacatccctagaggcctaatacatcctcttggcccctccattcatgaccaaaggacaaaagtgaaacaacagttctaagcatgttgacaaagattatttctaaattagcccagtggagccataggggtctgtggaagttcctcaacagcctgcctagggaggggaagctgagtgaggggacctccaggcttctcatgcccattttaactattcttacacaaaggtctagact

SEQ ID NO: 356687 - DNA, 377 bp, Homo sapiens
gaaagcctgtgcagagattgccgcccagcgaaccatcaactggcagaaattctgcatcaaagatgactgtaagcaatgctgctccttttgattgctgttattcattcattcaggaactgttaaggcctactatatgccaagcactgaactggatgctggagatatagctgtgaacaagatagactagacagaactctgtctagcaaagaagacaagtaaaaatctaaaagagtggtgagggctggtcgtcaaagtttggggagctgtagaagcacaaagtaggagtctctgacctccaggtagtggcagtaaagtcaaagaggagtaggtggagtctagagaaccccttattcaaaggagcagggggctctggtcgg

SEQ ID NO: 356688 - DNA, 547 bp, Homo sapiens
agcaagcaccttcaggtgactggggtttctttgactcaggagacaaggatgatgatgacgatgatgatgcagatgagaaaatgcagtcatcagggatcccgaatggtggtcacatccgtcaggaaagccaggaacagagtgaggtggaccatggagattttgagatggtggtgagtctctggcagcaggagaaggggaggaggagcttcacaactctcctctagctcttattcagtggacttccaaaagttaccacttaccatgggacactgacagagctttctctctgcagtctgagtcgatggtcctggagacagctgaaaatgtcaacaatggcaacccctctcccctggaggccctgctggcaggcgcagagggcttcccccccatgctggacatcccacctgatgcagatgacgagaccatggttgaactagccattgccctgagcctgcagcaggaccaacaaggtagaaggccatgccaagaacaaagcggcccattggccttgcacaggaaaagagggtttggcagttactgatatcca

SEQ ID NO: 356689 - DNA, 578 bp, Homo sapiens
tgcagtccatggagcataacctagccctggtggcctagaaggaaggaagggcaggcagagtgtagatagttcattctgccttgagttggtggggttagtgataaccctgctgtcttttgccttaggagagaaacaagaatgctgctcaggagctggccactttgctgttgtccctgccagcacctgccagtgtccagcagcagtccaagagccttctggccagcctgcacaccagccgctcggcctaccacagccacaaggtaactgttctctcagggaaaggaaattgcagtgctgacagggaatcaaataagttagcttttcattgtaaagcaacagcacagcaaagtaaggtagagggaggatagcattcagattagacctacattttacagagtttctcctgagaaattctcaagtgccactcaaaaccgagggtaagccagtgactgggcccctggtttgtacttatttttctgtcactctaacaggatcaacaagacttaagaaagagaaggagggatattgagcgtgggtagccttctcgctggaaaagggtgaggtgagggagtccctca

SEQ ID NO: 356690 - DNA, 310 bp, Homo sapiens
gtgacaaggatcaactggtgatgctcttggaccagatcaacagcacctttgttcgctccaaccccagtgtgctccagggcctgcttcgcatcatcccgtacctttcctttggagaggtggagaaaatgcagatcttggtggagcgattcaaaccatactgcaactttgataagtatgttactttgatttcatatagtgaaatgagagtctccactaaaacgccgaactaggtctgtgagatgaggaagaatcctctgaatacctattagatttttgtgtcctcgttctggcttttaaggagctcagtcta

SEQ ID NO: 356691 - DNA, 359 bp, Homo sapiens
gtactttgggaggctaagatgggaggatcccctgagcccaggggttttagaccagcctgggcaagatggtgagaccccatctctacaaaatattttttaaaaaattaaatagaaacttcatcttgtggatgaagagtgggttacactgatgaatttttaaaaaggcagtacgagtcttgaactaataccatgttttgtgaactcttgtatttagtatatcaagctgtcttccattaaagtggacacgcggtacaccaccacccagcaggttgtgaagctcattggcagtcacaccatcagcaaagtgacagtgaaaatcggggatctgaaacggaccaagatggtgcggaccatcaacc

SEQ ID NO: 356692 - DNA, 787 bp, Homo sapiens
tgagcctggccccaattatgtggaccaagcggaatagcccttcacatcctgccccctgagcagtggagagccacacgtgtggaaatcttgcggaggctgttggtgacctcgcaggctcgggcagtggctccaggtggagccaccaggctgacagataaggcagtgaaggactattccgcttaccgttcttcccttctcttttgggccctcgtcgatctcatttacaacatgtttaagaaggtgcctaccagtaacacagagggaggctggtcctgctctctcgctgagtacatccgccacaacgacatgcccatctacgaagctgccgacaaagccctgaaaaccttccaggaggagttcatgccagtggagaccttctcagagttcctcgatgtggccggtcttttatcagaaatcaccgatccagagagcttcctgaaggacctgttgaactcagtcccctgaccaccacacagcagctgcggcggcgaagacgaagctggcttgccttccaccctctgttctccctccttgtgcattaagttccctccgcgggatgctgcattgttaccccgccctcccctctctcatttttcttggtgtggcttggggtttttaggcttcctgttttatctcgtgtgtgtggtgcaccagctatgaggttgtctgtaacccaagccatcaaagggcctgtacatacctaggagccatgagttgtcccggccagcttcatacttgagtgtgcacatcttgagaaataaacaagtgacttaacacacattgaaaa

SEQ ID NO: 356693 - DNA, 427 bp, Homo sapiens
aatcagctcggtcctttcacagcggagatgctggaggacatgaccacaggtacagaatcagaaaccaaggccttcatggctgtgtgcattgagacagccaagcgctacaatctggatgactaccggaccccggtgttcatcttcgagaggctctgcagcatcatttatcctgaggagaatgaagtcactgagttctttgtgaccctggagaaggatccccaacaagaagacttcttacagggcaggatgcctgggaacccgtatagcagcatctccgctttggaaatttccaaacgcggagatgctgcccagaagacagatacatcccaccatgatcaggatcacccaaccttcaacaagatcacccccaacctggctgagttccttcagcctataccgccagctgcacaccagtccacagcatcgg

SEQ ID NO: 356694 - DNA, 12694 bp, Homo sapiens
gtgacctagaggttccgccacaagcgcgatctcaaaggtccaggtctctttggatgagcatttttctaagatggctgctgagactgatcctcataagtcgtctgagattaccaagaacctacttccagccacgctgcaactcattgacacctatgcatcgttcaccagagcctatttgctgcaaaactttaatgaagagggaacaactgagaaaccttccaaggagaaactgcaaggctttgctgctgttttggctattggctctagcaggtgcaaggcaaatactctgggtccgacactggttcagaatttgccatcgtcagtgcagactgtgtgtgagtcctggaacaacatcaataccaatgaatttcccaatattggatcctggcgcaatgcctttgccaatgacaccatcccttcagagagttatattagtgcagtgcaggctgcacacctggggactctctgtagccaaagtctgcccctggctgcttccctgaagcataccctcctctcactggtcaggttgactggagatcttattgtttggtcagatgagatgaacccaccacaggtaattcggacactgctacctcttcttttggaatcaagcactgagagtgttgccgagatcagtagcaactccctggaacgcatcttgggccctgctgagtctgatgagttcttggctcgtgtttatgagaagctgatcactggttgttacaacattctggccaatcatgcagatcctaacagtggactggatgaatccatcctggaggaatgtctccagtacttggaaaagcagctggaaagtagccaggctcgtaaagctatggaggagtttttctctgacagtggagaacttgtacagatcatgatggcaacagccaatgagaacctctctgctaaattctgtaaccgagttttgaaattcttcaccaaactcttccagctgactgagaagagccctaacccgagcctgttgcatctctgtggctccctggcacaactggcctgtgtggaacctgtgcgcctgcaggcctggctcacccgcatgactacatcgcccccaaaagattctgatcagctggatgtaattcaggagaaccggcagctgctgcagttactgaccacatacattgttcgggaaaacagccaagttggggaaggtgtgtgtgctgttcttctgggcaccctgactcccatggcaacagagatgctggccaacggtgatgggactggcttccctgaacttatggttgtgatggccactctggccagtgcaggtcaaggtgctggtcaccttcagcttcataatgctgctgtggattggctgagcagatgcaagaaatacctgtcacagaagaatgtagttgaaaaactgaatgccaatgtaatgcatggaaagcatgtgatgatcttggagtgcacatgccatatcatgtcttacttggctgatgtcacgaatgccctgagccagagtaatggtcaaggcccaagtcatctctcagtggatggggaagagcgggccattgaagtagactcagactgggtggaggagttggcggtggaagaggaagattcccaggctgaggattcagatgaagattctctttgcaataaactctgcacttttacgatcacacagaaagaattcatgaaccagcattggtaccactgtcacacctgtaaaatggtggatggcgtgggtgtctgcacagtgtgtgctaaggtgtgccacaaggatcatgagatttcctatgccaagtatggatccttcttctgtgactgtggagccaaggaagatggcagctgtttggctctggtgaagagaactcctagcagtggcatgagctctaccatgaaggagtcggcatttcagagtgaacccaggatttcagagagtctagtgcgtcatgccagcacctcctcgccagctgacaaagccaaggttaccatcagtgatggaaaggttgctgacgaagagaagcccaagaagagcagcctctgccgcacagtagagggctgccgggaggaattacagaaccaggccaatttctccttcgctcctctcgtgttagacatgcttaatttccttatggatgccattcagaccaacttccagcaagcttcagccgtcgggagcagcagccgtgctcagcaagccctcagtgagctacacactgtggagaaggcagtggagatgacagaccagctgatggttcccaccttagggtcccaggaaggtgcctttgagaatgtgcggatgaattacagtggagaccagggccagaccatccggcagctgatcagtgctcatgtgctcaggcgggtggctatgtgtgtgctctcctctccccatgggcgccgccaacatttggctgtcagccatgagaagggcaagatcaccgttctgcagctctctgcactcctgaagcaagcagattccagcaaaaggaagttaactctgacccgcttggcttctgccccagttccttttactgtgttgagcctcacaggaaatccctgcaaggaagactacttggcggtttgtgggctaaaggactgtcatgtgctcacctttagtagctcaggctctgtttcggatcacttggttttgcaccctcagttggcaacggggaacttcatcatcaaagccgtgtggttacctggttcacagaccgagttagcaattgtcaccgcagactttgttaagatttatgacctgtgtgttgatgccttgagtccaaccttctattttctcctgccaagctcaaagataagagatgttaccttccttttcaatgaggagggaaagaacatcattgttataatgtcttcggctgggtacatctatactcagcttatggaagaggccagcagtgcccagcagggacccttctatgtcactaatgtgttggaaatcaatcatgaggacctgaaggacagtaacagccaggtggcgggcggtggtgtgtccgtgtactactcccacgtgttgcagatgttgttcttcagctattgtcaaggcaaatcattcgcagccaccatcagcaggacaaccctggaggtgttgcaactcttccccatcaacatcaaaagttccaatggtggcagtaagacttctcctgctctttgccagtggtctgaggtgatgaaccaccctggcttggtgtgctgtgtccagcaaactacaggggtgccgctggtagttatggtgaaaccagacacttttcttatccaggagattaagactcttcctgctaaagcgaagatccaagacatggttgctattaggcacacggcctgcaatgagcagcagcggacaacaatgattctgctgtgtgaggatggcagcctgcgcatttacatggccaacgtggagaacacctcctactggctgcagccatccctgcagcccagcagtgtcatcagcatcatgaagcctgttcgaaagcgcaaaacagctacaatcacaacccgcacgtctagccaggtgactttccccattgacttttttgaacacaaccagcagctgacagatgtggagtttggtggtaacgacctcctacaggtctataatgcacaacagataaaacaccggctgaattccactggcatgtatgtggccaacaccaagcccggaggcttcaccattgagattagtaacaacaatagcactatggtgatgacaggcatgcggatccagattgggactcaagcaatagaacgggccccgtcatatatcgagatcttcggcagaactatgcagctcaacctgagtcgctcacgctggtttgacttccccttcaccagagaagaagccctgcaggctgataagaagctgaacctcttcattggggcctcggtggatccagcaggtgtcaccatgatagatgctgtaaaaatttatggcaagactaaggagcagtttggctggcctgatgagcccccagaagaattcccttctgcctctgtcagcaacatctgcccttcaaatctgaaccagagcaacggcactggagatagcgactcagctgcccccactacgaccagtggaactgtcctggagaggctggttgtgagttctttagaagccctggaaagctgctttgccgttggcccaatcatcgagaaggagagaaacaagaatgctgctcaggagctggccactttgctgttgtccctgccagcacctgccagtgtccagcagcagtccaagagccttctggccagcctgcacaccagccgctcggcctaccacagccacaaggatcaggccttgctgagcaaagctgtgcagtgtctcaacacatctagcaaagagggcaaggatttggaccctgaggtgttccagaggctagtgatcacagctcgctccattgccatcatgcgccccaacaaccttgtccactttacggagtcaaagctgccccagatggaaacagactgtttttttcctagatgtgcctgctggagtctagggatagttggcatattgattggggccccacttgaaactccctccccaggcaagcttccttgacctgagttaaccttaaaacaaattaaattccatctcagatttaccatcgttgataattttctttctcctgcttagaaggaatggatgaagggaaggaaccgcagaagcagttggaaggagattgctgtagtttcatcacccagcttgtgaaccacttctggaaactccatgcatccaaacccaagaatgccttcttggcacctgcctgccttccaggactaactcatattgaagctactgtcaatgctctggtggacatcatccatggctactgtacctgtgagctggattgtattaacacagcatccaagatctacatgcagatgctcttgtgtcctgatcctgctgtgagcttctcttgtaaacaagctctaattcgagtcctaaggcccaggaacaaacggagacatgtgactttaccctcttcccctcgaagcaacactccaatgggagacaaggatgatgatgacgatgatgatgcagatgagaaaatgcagtcatcagggatcccgaatggtggtcacatccgtcaggaaagccaggaacagagtgaggtggaccatggagattttgagatggtgtctgagtcgatggtcctggagacagctgaaaatgtcaacaatggcaacccctctcccctggaggccctgctggcaggcgcagagggcttcccccccatgctggacatcccacctgatgcagatgacgagaccatggttgaactagccattgccctgagcctgcagcaggaccaacaaggcagcagcagcagtgccctgggcctgcagagcctgggactgtccggccaggcacccagctcttcctctctggacgcaggaaccctctctgacaccacagcatcagctccagcctcagacgacgagggcagtacagcagcgacagatggttctacccttcggacctctcctgctgaccacggtggtagtgtgggctcggagagcgggggcagtgcagtggactcagtggctggcgagcacagtgtatctggccggagcagtgcttatggcgatgctacagctgaggggcatccggctggaccaggaagtgtcagctcaagcactggagccatcagcaccaccactgggcaccaggagggagatggctccgagggagaaggagaaggagaaactgaaggagatgtccacactagcaacaggctgcacatggtccgtctaatgctgttggagagattactgcagaccctgcctcaattacgaaacgttggcggtgtccgggccatcccatacatgcaggtcattctaatgctcactacagatctggatggagaagatgagaaagacaagggggccctagacaacctgctctcccagcttattgctgagttgggtatggataaaaaggatgtctccaagaagaatgagcgcagcgccctgaatgaagtccatctggtagtaatgagactcctgagtgtcttcatgtcccgcaccaaatctggatccaagtcttccatatgtgagtcatcttccctcatctccagtgccacagcagcagctctactgagctctggggctgtggactactgcctgcacgtgctcaaatcactgctggaatattggaagagccaacagaatgacgaggagcctgtggctaccagccagttgctgaaaccacatactacctcctccccacctgacatgagcccattctttctccgccagtatgtgaagggtcatgctgctgatgtgtttgaggcctatactcagcttctaacagaaatggtactgaggcttccttaccaaatcaaaaagattactgacaccaattctcgaatcccacctcctgtctttgaccactcgtggttttactttctctccgagtacctcatgatccagcagactccatttgtgcgccgtcaagtccgcaaacttctgctcttcatctgtggatccaaagagaagtaccgccagctccgggatttgcacaccctggactctcacgtgcgtgggatcaagaagctgctagaagagcaggggatattcctccgggcaagtgtggttacagccagctcaggctccgccttgcaatatgacacactcatcagcctgatggagcacctgaaagcctgtgcagagattgccgcccagcgaaccatcaactggcagaaattctgcatcaaagatgactccgtcctgtacttcctcctccaagtcagtttccttgtggatgagggcgtgtccccagtgctgctgcaactgctctcctgtgctctctgcggcagcaaggtgctcgctgcactggcagcctcttcgggatcctccagtgcttcttcctcctcagcccctgtggctgccagttctggacaagccacaacacagtccaagtcttccactaaaaagagcaagaaagaagaaaaagaaaaggagaaagatggtgagacctctggcagccaggaggaccagctgtgcacagctctggtgaaccagctgaacaaatttgccgataaggaaaccctgatccagttcctgcgttgtttcctgttagagtccaattcttcctcggtgcgctggcaggcccactgtctgacactgcacatctacagaaattccagcaaatctcaacaggagctcctgctagatctgatgtggtccatctggccagaactcccagcctatggtcgtaaggctgcccagtttgtggacctactaggatatttctccctgaaaactccacaaacagagaagaagttgaaggagtattcacagaaggctgtggagattctgcggactcaaaaccatattcttaccaaccaccccaactcgaacatttataacactttgtctggcttagtggagtttgatggctattacctggagagcgatccctgcctggtgtgtaataacccggaagtaccgttctgttatatcaagctgtcttccattaaagtggacacgcggtacaccaccacccagcaggttgtgaagctcattggcagtcacaccatcagcaaagtgacagtgaaaatcggggatctgaaacggaccaagatggtgcggaccatcaacctgtattataacaaccgaaccgtgcaggccatcgtggagttgaaaaacaagccagctcgctggcacaaagccaagaaggttcagctgacccctggacagacagaggtgaagattgacctgccgttgcccattgtggcctccaatctgatgattgagtttgcagacttctatgaaaactaccaggcctccacagagaccctgcagtgccctcgctgtagtgcctcggtccctgccaacccaggagtctgtggcaactgtggagagaatgtgtaccagtgtcacaaatgcagatccatcaactacgatgaaaaggatcccttcctctgcaatgcctgtggcttctgtaaatatgcccgcttcgacttcatgctctatgccaagccttgctgtgcagtggatcccattgagaatgaagaagaccggaagaaggctgtatccaacatcaatacacttttggacaaagctgatcgagtgtatcatcagctgatgggacaccggccacagctggagaacctgctctgcaaagtgaatgaggcagctccagaaaagccacaggatgactcaggaacagcagggggcatcagctccacttctgccagtgtgaatcgttacatcctgcagttggctcaggagtattgtggagactgcaagaactcttttgatgaactctccaaaatcatccagaaagtctttgcttcgcgcaaagagttgttggaatatgacctacagcagagggaagcagccactaaatcatcccggacctccgtgcagcccacattcactgccagccagtaccgtgccttatccgtcctgggctgtggccacacatcctccaccaagtgctatggctgcgcctcggctgtcacagaacattgtatcacactacttcgggccctggccaccaacccagccttgaggcacatccttgtctcccagggccttatccgggagctctttgattataatcttcgccgaggggctgcggccatgcgggaggaggtccgccagctcatgtgcctcctaactcgagacaacccagaagccacccaacagatgaatgacctgattattggcaaggtctccacagccctgaagggccactgggccaaccccgatctggcaagtagcctgcagtatgaaatgctgctgctgacggattctatctccaaggaggacagctgctgggagctccggttacgctgtgctctcagccttttcctcatggctgtgaacattaagactcctgtggtggttgaaaacattaccctcatgtgcctgaggatcttgcagaagctgataaaaccacctgctcccactagcaagaagaacaaggatgtccccgtcgaggccctcaccacggtgaagccatactgcaatgagatccatgcccaggctcaactgtggctcaagagagaccccaaggcatcctatgatgcctggaagaagtgtcttcctatcagagggatagatggcaatgggaaagcccccagcaaatcagagctccgccatctctatttgactgagaagtatgtgtggaggtggaaacagttcctgagtcgtcgggggaagaggacctcccccttggatctcaaactggggcataacaactggctgcgacaagtgcttttcactccagcaacgcaggccgcacggcaggcagcctgtaccattgtggaagctctagccaccattcccagccgcaagcagcaggtcctggacctgcttaccagttacctggatgagctgagcatagctggggagtgtgcagctgagtacctggctctctaccagaagctcatcacttctgcgcactggaaagtctacttggcagctcggggagtcctaccctatgtgggcaacctcatcaccaaggaaatagctcgtctgctggccctggaggaggctaccctgagtaccgatctgcagcagggttatgcccttaaaagtctcacaggccttctctcctcctttgttgaggtggaatccatcaaaagacattttaaaagtcgcttggtgggtactgtgctgaatggatacctgtgcttgcggaagctggtggtgcagaggaccaagctgatcgatgagacgcaggacatgctgctggagatgctggaggacatgaccacaggtacagaatcagaaaccaaggccttcatggctgtgtgcattgagacagccaagcgctacaatctggatgactaccggaccccggtgttcatcttcgagaggctctgcagcatcatttatcctgaggagaatgaagtcactgagttctttgtgaccctggagaaggatccccaacaagaagacttcttacagggcaggatgcctgggaacccgtatagcagcaatgagccaggcatcgggccgctgatgagggatataaagaacaagatttgccaggactgtgacttagtggccctcctggaagatgacagtggcatggagcttctagtgaacaataaaatcattagtttggaccttcctgtggctgaagtttacaagaaagtctggtgtaccacgaatgagggagagcccatgaggattgtttatcgtatgcgggggctgctgggcgatgccacagaggagttcattgagtccctggactctactacagatgaagaagaagatgaagaagaagtgtataaaatggctggtgtgatggcccagtgtgggggcctggaatgcatgcttaacagactcgcagggatcagagatttcaagcagggacgccaccttctaacagtgctactgaaattgttcagttactgcgtgaaggtgaaagtcaaccggcagcaactggtcaaactggaaatgaacaccttgaacgtcatgctggggaccctaaacctggcccttgtagctgaacaagaaagcaaggacagtgggggtgcagctgtggctgagcaggtgcttagcatcatggagatcattctagatgagtccaatgctgagcccctgagtgaggacaagggcaacctcctcctgacaggtgacaaggatcaactggtgatgctcttggaccagatcaacagcacctttgttcgctccaaccccagtgtgctccagggcctgcttcgcatcatcccgtacctttcctttggagaggtggagaaaatgcagatcttggtggagcgattcaaaccatactgcaactttgataaatatgatgaagatcacagtggtgatgataaagtcttcctggactgcttctgtaaaatagctgctggcatcaagaacaacagcaatgggcaccagctgaaggatctgattctccagaaggggatcacccagaatgcacttgactacatgaaaaagcacatccctagcgccaagaatttggatgccgacatctggaaaaagtttttgtctcgcccagccttgccatttatcctaaggctgcttcggggcctggccatccagcaccctggcacccaggttctgattggaactgattccatcccgaacctgcataagctggagcaggtgtccagtgatgagggcattgggaccttggcagagaacctgctggaagccctgcgggaacaccctgacgtaaacaagaagattgacgcagcccgcagggagacccgggcagagaagaaacgcatggccatggcaatgaggcagaaggccctgggcaccctgggcatgacgacaaatgaaaagggccaggtcgtgaccaagacagcactcctgaagcagatggaagagctgatcgaggagcctggcctcacgtgctgcatctgcagggagggatacaagttccagcccacaaaggtcctgggcatttataccttcacgaagcgggtagccttggaggagttggagaataagccccggaaacagcagggctacagcaccgtgtcccacttcaacattgtgcactacgactgccatctggctgccgtcaggttggctcgaggccgggaagagtgggagagtgccgccctgcagaatgccaacaccaagtgcaacgggctccttccggtctggggacctcatgtccctgaatcagcttttgccacttgcttggcaagacacaacacttacctccaggaatgtacaggccagcgggagcccacgtatcagctcaacatccacgacatcaaactgctcttcctgcgcttcgccatggagcagtcgttcagcgcagacactggcgggggcggccgggagagcaacatccacctgatcccgtacatcattcacactgtgctttacgtcctgaacacaacccgagcaacttcccgagaagagaagaacctccaaggctttctggaacagcccaaggagaagtgggtggagagtgcctttgaagtggacgggccctactatttcacagtcttggcccttcacatcctgccccctgagcagtggagagccacacgtgtggaaatcttgcggaggctgttggtgacctcgcaggctcgggcagtggctccaggtggagccaccaggctgacagataaggcagtgaaggactattccgcttaccgttcttcccttctcttttgggccctcgtcgatctcatttacaacatgtttaagaaggtgcctaccagtaacacagagggaggctggtcctgctctctcgctgagtacatccgccacaacgacatgcccatctacgaagctgccgacaaagccctgaaaaccttccaggaggagttcatgccagtggagaccttctcagagttcctcgatgtggccggtcttttatcagaaatcaccgatccagagagcttcctgaaggacctgttgaactcagtcccctgaccaccacacagcagctgcggcggcgaagacgaagctggcttgccttccaccctctgttctccctccttgtgcattaagttccctccgcgggatgctgcattgttaccccgccctcccctctctcatttttcttggtgtggcttggggtttttaggcttcctgttttatctcgtgtgtgtggtgcaccagctatgaggttgtctgtaacccaagccatcaaagggcctgtacatacctaggagccatgagttgtcccggccagcttcatacttgagtgtgcacatcttgagaaataaacaagtgacttaacacacattgaaaa

SEQ ID NO: 356695 - DNA, 13642 bp, Homo sapiens
  misc_feature (8480)..(8480): n is a, c, g, or t
gtgacctagaggttccgccacaagcgcgatctcaaaggtccaggtctctttggatgagcatttttctaagatggctgctgagactgatcctcataagtcgtctgagattaccaagaacctacttccagccacgctgcaactcattgacacctatgcatcgttcaccagagcctatttgctgcaaaactttaatgaagagggaacaactgagaaaccttccaaggagaaactgcaaggctttgctgctgttttggctattggctctagcaggtgcaaggcaaatactctgggtccgacactggttcagaatttgccatcgtcagtgcagactgtgtgtgagtcctggaacaacatcaataccaatgaatttcccaatattggatcctggcgcaatgcctttgccaatgacaccatcccttcagagagttatattagtgcagtgcaggctgcacacctggggactctctgtagccaaagtctgcccctggctgcttccctgaagcataccctcctctcactggtcaggttgactggagatcttattgtttggtcagatgagatgaacccaccacaggtaattcggacactgctacctcttcttttggaatcaagcactgagagtgttgccgagatcagtagcaactccctggaacgcatcttgggccctgctgagtctgatgagttcttggctcgtgtttatgagaagctgatcactggttgttacaacattctggccaatcatgcagatcctaacagtggactggatgaatccatcctggaggaatgtctccagtacttggaaaagcagctggaaagtagccaggctcgtaaagctatggaggagtttttctctgacagtggagaacttgtacagatcatgatggcaacagccaatgagaacctctctgctaaattctgtaaccgagttttgaaattcttcaccaaactcttccagctgactgagaagagccctaacccgagcctgttgcatctctgtggctccctggcacaactggcctgtgtggaacctgtgcgcctgcaggcctggctcacccgcatgactacatcgcccccaaaagattctgatcagctggatgtaattcaggagaaccggcagctgctgcagttactgaccacatacattgttcgggaaaacagccaagttggggaaggtgtgtgtgctgttcttctgggcaccctgactcccatggcaacagagatgctggccaacggtgatgggactggcttccctgaacttatggttgtgatggccactctggccagtgcaggtcaaggtgctggtcaccttcagcttcataatgctgctgtggattggctgagcagatgcaagaaatacctgtcacagaagaatgtagttgaaaaactgaatgccaatgtaatgcatggaaagcatgtgatgatcttggagtgcacatgccatatcatgtcttacttggctgatgtcacgaatgccctgagccagagtaatggtcaaggcccaagtcatctctcagtggatggggaagagcgggccattgaagtagactcagactgggtggaggagttggcggtggaagaggaagattcccaggctgaggattcagatgaagattctctttgcaataaactctgcacttttacgatcacacagaaagaattcatgaaccagcattggtaccactgtcacacctgtaaaatggtggatggcgtgggtgtctgcacagtgtgtgctaaggtgtgccacaaggatcatgagatttcctatgccaagtatggatccttcttctgtgactgtggagccaaggaagatggcagctgtttggctctggtgaagagaactcctagcagtggcatgagctctaccatgaaggagtcggcatttcagagtgaacccaggatttcagagagtctagtgcgtcatgccagcacctcctcgccagctgacaaagccaaggttaccatcagtgatggaaaggttgctgacgaagagaagcccaagaagagcagcctctgccgcacagtagagggctgccgggaggaattacagaaccaggccaatttctccttcgctcctctcgtgttagacatgcttaatttccttatggatgccattcagaccaacttccagcaagcttcagccgtcgggagcagcagccgtgctcagcaagccctcagtgagctacacactgtggagaaggcagtggagatgacagaccagctgatggttcccaccttagggtcccaggaaggtgcctttgagaatgtgcggatgaattacagtggagaccagggccagaccatccggcagctgatcagtgctcatgtgctcaggcgggtggctatgtgtgtgctctcctctccccatgggcgccgccaacatttggctgtcagccatgagaagggcaagatcaccgttctgcagctctctgcactcctgaagcaagcagattccagcaaaaggaagttaactctgacccgcttggcttctgccccagttccttttactgtgttgagcctcacaggaaatccctgcaaggaagactacttggcggtttgtgggctaaaggactgtcatgtgctcacctttagtagctcaggctctgtttcggatcacttggttttgcaccctcagttggcaacggggaacttcatcatcaaagccgtgtggttacctggttcacagaccgagttagcaattgtcaccgcagactttgttaagatttatgacctgtgtgttgatgccttgagtccaaccttctattttctcctgccaagctcaaagataagagatgttaccttccttttcaatgaggagggaaagaacatcattgttataatgtcttcggctgggtacatctatactcagcttatggaagaggccagcagtgcccagcagggacccttctatgtcactaatgtgttggaaatcaatcatgaggacctgaaggacagtaacagccaggtggcgggcggtggtgtgtccgtgtactactcccacgtgttgcagatgttgttcttcagctattgtcaaggcaaatcattcgcagccaccatcagcaggacaaccctggaggtgttgcaactcttccccatcaacatcaaaagttccaatggtggcagtaagacttctcctgctctttgccagtggtctgaggtgatgaaccaccctggcttggtgtgctgtgtccagcaaactacaggggtgccgctggtagttatggtgaaaccagacacttttcttatccaggagattaagactcttcctgctaaagcgaagatccaagacatggttgctattaggcacacggcctgcaatgagcagcagcggacaacaatgattctgctgtgtgaggatggcagcctgcgcatttacatggccaacgtggagaacacctcctactggctgcagccatccctgcagcccagcagtgtcatcagcatcatgaagcctgttcgaaagcgcaaaacagctacaatcacaacccgcacgtctagccaggtgactttccccattgacttttttgaacacaaccagcagctgacagatgtggagtttggtggtaacgacctcctacaggtctataatgcacaacagataaaacaccggctgaattccactggcatgtatgtggccaacaccaagcccggaggcttcaccattgagattagtaacaacaatagcactatggtgatgacaggcatgcggatccagattgggactcaagcaatagaacgggccccgtcatatatcgagatcttcggcagaactatgcagctcaacctgagtcgctcacgctggtttgacttccccttcaccagagaagaagccctgcaggctgataagaagctgaacctcttcattggggcctcggtggatccagcaggtgtcaccatgatagatgctgtaaaaatttatggcaagactaaggagcagtttggctggcctgatgagcccccagaagaattcccttctgcctctgtcagcaacatctgcccttcaaatctgaaccagagcaacggcactggagatagcgactcagctgcccccactacgaccagtggaactgtcctggagaggctggttgtgagttctttagaagccctggaaagctgctttgccgttggcccaatcatcgagaaggagagaaacaagaatgctgctcaggagctggccactttgctgttgtccctgccagcacctgccagtgtccagcagcagtccaagagccttctggccagcctgcacaccagccgctcggcctaccacagccacaaggatcaggccttgctgagcaaagctgtgcagtgtctcaacacatctagcaaagagggcaaggatttggaccctgaggtgttccagaggctagtgatcacagctcgctccattgccatcatgcgccccaacaaccttgtccactttacggagtcaaagctgccccagatggaaacagactgtttttttcctagatgtgcctgctggagtctagggatagttggcatattgattggggccccacttgaaactccctccccaggcaagcttccttgacctgagttaaccttaaaacaaattaaattccatctcagatttaccatcgttgataattttctttctcctgcttagaaggaatggatgaagggaaggaaccgcagaagcagttggaaggagattgctgtagtttcatcacccagcttgtgaaccacttctggaaactccatgcatccaaacccaagaatgccttcttggcacctgcctgccttccaggactaactcatattgaagctactgtcaatgctctggtggacatcatccatggctactgtacctgtgagctggattgtattaacacagcatccaagatctacatgcagatgctcttgtgtcctgatcctgctgtgagcttctcttgtaaacaagctctaattcgagtcctaaggcccaggaacaaacggagacatgtgactttaccctcttcccctcgaagcaacactccaatgggagacaaggatgatgatgacgatgatgatgcagatgagaaaatgcagtcatcagggatcccgaatggtggtcacatccgtcaggaaagccaggaacagagtgaggtggaccatggagattttgagatggtgtctgagtcgatggtcctggagacagctgaaaatgtcaacaatggcaacccctctcccctggaggccctgctggcaggcgcagagggcttcccccccatgctggacatcccacctgatgcagatgacgagaccatggttgaactagccattgccctgagcctgcagcaggaccaacaaggcagcagcagcagtgccctgggcctgcagagcctgggactgtccggccaggcacccagctcttcctctctggacgcaggaaccctctctgacaccacagcatcagctccagcctcagacgacgagggcagtacagcagcgacagatggttctacccttcggacctctcctgctgaccacggtggtagtgtgggctcggagagcgggggcagtgcagtggactcagtggctggcgagcacagtgtatctggccggagcagtgcttatggcgatgctacagctgaggggcatccggctggaccaggaagtgtcagctcaagcactggagccatcagcaccaccactgggcaccaggagggagatggctccgagggagaaggagaaggagaaactgaaggagatgtccacactagcaacaggctgcacatggtccgtctaatgctgttggagagattactgcagaccctgcctcaattacgaaacgttggcggtgtccgggccatcccatacatgcaggtcattctaatgctcactacagatctggatggagaagatgagaaagacaagggggccctagacaacctgctctcccagcttattgctgagttgggtatggataaaaaggatgtctccaagaagaatgagcgcagcgccctgaatgaagtccatctggtagtaatgagactcctgagtgtcttcatgtcccgcaccaaatctggatccaagtcttccatatgtgagtcatcttccctcatctccagtgccacagcagcagctctactgagctctggggctgtggactactgcctgcacgtgctcaaatcactgctggaatattggaagagccaacagaatgacgaggagcctgtggctaccagccagttgctgaaaccacatactacctcctccccacctgacatgagcccattctttctccgccagtatgtgaagggtcatgctgctgatgtgtttgaggcctatactcagcttctaacagaaatggtactgaggcttccttaccaaatcaaaaagattactgacaccaattctcgaatcccacctcctgtctttgaccactcgtggttttactttctctccgagtacctcatgatccagcagactccatttgtgcgccgtcaagtccgcaaacttctgctcttcatctgtggatccaaagagaagtaccgccagctccgggatttgcacaccctggactctcacgtgcgtgggatcaagaagctgctagaagagcaggggatattcctccgggcaagtgtggttacagccagctcaggctccgccttgcaatatgacacactcatcagcctgatggagcacctgaaagcctgtgcagagattgccgcccagcgaaccatcaactggcagaaattctgcatcaaagatgactccgtcctgtacttcctcctccaagtcagtttccttgtggatgagggcgtgtccccagtgctgctgcaactgctctcctgtgctctctgcggcagcaaggtgctcgctgcactggcagcctcttcgggatcctccagtgcttcttcctcctcagcccctgtggctgccagttctggacaagccacaacacagtccaagtcttccactaaaaagagcaagaaagaagaaaaagaaaaggagaaagatggtgagacctctggcagccaggaggaccagctgtgcacagctctggtgaaccagctgaacaaatttgccgataaggaaaccctgatccagttcctgcgttgtttcctgttagagtccaattcttcctcggtgcgctggcaggcccactgtctgacactgcacatctacagaaattccagcaaatctcaacaggagctcctgctagatctgatgtggtccatctggccagaactcccagcctatggtcgtaaggctgcccagtttgtggacctactaggatatttctccctgaaaactccacaaacagagaagaagttgaaggagtattcacagaaggctgtggagattctgcggactcaaaaccatattcttaccaaccaccccaactcgaacatttataacactttgtctggcttagtggagtttgatggctattacctggagagcgatccctgcctggtgtgtaataacccggaagtaccgttctgttatatcaagctgtcttccattaaagtggacacgcggtacaccaccacccagcaggttgtgaagctcattggcagtcacaccatcagcaaagtgacagtgaaaatcggggatctgaaacggaccaagatggtgcggaccatcaacctgtattataacaaccgaaccgtgcaggccatcgtggagttgaaaaacaagccagctcgctggcacaaagccaagaaggttcagctgacccctggacagacagaggtgaagattgacctgccgttgcccattgtggcctccaatctgatgattgagtttgcagacttctatgaaaactaccaggcctccacagagaccctgcagtgccctcgctgtagtgcctcggtccctgccaacccaggagtctgtggcaactgtggagagaatgtgtaccagtgtcacaaatgcagatccatcaactacgatgaaaaggatcccttcctctgcaatgcctgtggcttctgtaaatatgcccgcttcgacttcatgctctatgccaagccttgctgtgcagtggatcccattgagaatgaagaagaccggaagaaggctgtatccaacatcaatacacttttggacaaagctgatcgagtgtatcatcagctgatgggacaccggccacagctggagaacctgctctgcaaagtgaatgaggcagctccagaaaagccacaggtagtcccacgctgcaaagggcatttggataagggcttgggtcttgatcagaagactgcctcctaggtgagatcaccttaggtggggagcctgacagcttacctcttggggttgcaggatgactcaggaacagcagggggcatcagctccacttctgccagtgtgaatcgttacatcctgcagttggctcaggagtattgtggagactgcaagaactcttttgatgaactctccaaaatcatccaggtagagagcggggagcagcttttgggtgtgttttgtccaagtgttactggtgttgttttcacagcagtcctgctgctctctcatcnagcagtccaggtcttggtgttgtccctgcccaatctagctgaaaaggcaggcagatggctgcaccaaacggcatctcccccaccgtgatttatggcgctggtcagaatgctgagttcatgctagataactgaacatactggtgatgggaaggtaacacagataagggttttttttagccattaacaacccatctcttagtagaggggttactggtcttaaaaaatttgatgccaagattctgttccctcttctgataacgccgtgtttgcaggctgtagggtaagggcataccaactgcaatcaaccagggtgggccttgtgtcagttgcaatgtcacagacctaatctccatgagatgggaggctggccatagacagaggtacctcatataaggagagcatccagtttaccttccccctcaaccccaaattgctggagtgccatctttgctacacgtgtattagcttctgacctttgtctttgttacatgggagttaagagcataagcctgccatctgagtctgagttctgactctgccacttatcttggtcaagccactttctccaagcttcagtttccttctctgtaaaatggagataaagcatctaaccagttgggttattgagaagattaagttatataatgcatgtaaagttttttctaaagcaaaactaattttctaattaacatcctcttcttattttaattgctaattcccattattgttgcctttttgttcttagaaagtctttgcttcgcgcaaagagttgttggaatatgacctacagcagagggaagcagccactaaatcatcccggacctccgtgcagcccacattcactgccagccagtaccgtgccttatccgtcctgggctgtggccacacatcctccaccaagtgctatggctgcgcctcggctgtcacagaacattgtatcacactacttcgggccctggccaccaacccagccttgaggcacatccttgtctcccagggccttatccgggagctctttgattataatcttcgccgaggggctgcggccatgcgggaggaggtccgccagctcatgtgcctcctaactcgagacaacccagaagccacccaacagatgaatgacctgattattggcaaggtctccacagccctgaagggccactgggccaaccccgatctggcaagtagcctgcagtatgaaatgctgctgctgacggattctatctccaaggaggacagctgctgggagctccggttacgctgtgctctcagccttttcctcatggctgtgaacattaagactcctgtggtggttgaaaacattaccctcatgtgcctgaggatcttgcagaagctgataaaaccacctgctcccactagcaagaagaacaaggatgtccccgtcgaggccctcaccacggtgaagccatactgcaatgagatccatgcccaggctcaactgtggctcaagagagaccccaaggcatcctatgatgcctggaagaagtgtcttcctatcagagggatagatggcaatgggaaagcccccagcaaatcagagctccgccatctctatttgactgagaagtatgtgtggaggtggaaacagttcctgagtcgtcgggggaagaggacctcccccttggatctcaaactggggcataacaactggctgcgacaagtgcttttcactccagcaacgcaggccgcacggcaggcagcctgtaccattgtggaagctctagccaccattcccagccgcaagcagcaggtcctggacctgcttaccagttacctggatgagctgagcatagctggggagtgtgcagctgagtacctggctctctaccagaagctcatcacttctgcgcactggaaagtctacttggcagctcggggagtcctaccctatgtgggcaacctcatcaccaaggaaatagctcgtctgctggccctggaggaggctaccctgagtaccgatctgcagcagggttatgcccttaaaagtctcacaggccttctctcctcctttgttgaggtggaatccatcaaaagacattttaaaagtcgcttggtgggtactgtgctgaatggatacctgtgcttgcggaagctggtggtgcagaggaccaagctgatcgatgagacgcaggacatgctgctggagatgctggaggacatgaccacaggtacagaatcagaaaccaaggccttcatggctgtgtgcattgagacagccaagcgctacaatctggatgactaccggaccccggtgttcatcttcgagaggctctgcagcatcatttatcctgaggagaatgaagtcactgagttctttgtgaccctggagaaggatccccaacaagaagacttcttacagggcaggatgcctgggaacccgtatagcagcaatgagccaggcatcgggccgctgatgagggatataaagaacaagatttgccaggactgtgacttagtggccctcctggaagatgacagtggcatggagcttctagtgaacaataaaatcattagtttggaccttcctgtggctgaagtttacaagaaagtctggtgtaccacgaatgagggagagcccatgaggattgtttatcgtatgcgggggctgctgggcgatgccacagaggagttcattgagtccctggactctactacagatgaagaagaagatgaagaagaagtgtataaaatggctggtgtgatggcccagtgtgggggcctggaatgcatgcttaacagactcgcagggatcagagatttcaagcagggacgccaccttctaacagtgctactgaaattgttcagttactgcgtgaaggtgaaagtcaaccggcagcaactggtcaaactggaaatgaacaccttgaacgtcatgctggggaccctaaacctggcccttgtagctgaacaagaaagcaaggacagtgggggtgcagctgtggctgagcaggtgcttagcatcatggagatcattctagatgagtccaatgctgagcccctgagtgaggacaagggcaacctcctcctgacaggtgacaaggatcaactggtgatgctcttggaccagatcaacagcacctttgttcgctccaaccccagtgtgctccagggcctgcttcgcatcatcccgtacctttcctttggagaggtggagaaaatgcagatcttggtggagcgattcaaaccatactgcaactttgataaatatgatgaagatcacagtggtgatgataaagtcttcctggactgcttctgtaaaatagctgctggcatcaagaacaacagcaatgggcaccagctgaaggatctgattctccagaaggggatcacccagaatgcacttgactacatgaaaaagcacatccctagcgccaagaatttggatgccgacatctggaaaaagtttttgtctcgcccagccttgccatttatcctaaggctgcttcggggcctggccatccagcaccctggcacccaggttctgattggaactgattccatcccgaacctgcataagctggagcaggtgtccagtgatgagggcattgggaccttggcagagaacctgctggaagccctgcgggaacaccctgacgtaaacaagaagattgacgcagcccgcagggagacccgggcagagaagaaacgcatggccatggcaatgaggcagaaggccctgggcaccctgggcatgacgacaaatgaaaagggccaggtcgtgaccaagacagcactcctgaagcagatggaagagctgatcgaggagcctggcctcacgtgctgcatctgcagggagggatacaagttccagcccacaaaggtcctgggcatttataccttcacgaagcgggtagccttggaggagttggagaataagccccggaaacagcagggctacagcaccgtgtcccacttcaacattgtgcactacgactgccatctggctgccgtcaggttggctcgaggccgggaagagtgggagagtgccgccctgcagaatgccaacaccaagtgcaacgggctccttccggtctggggacctcatgtccctgaatcagcttttgccacttgcttggcaagacacaacacttacctccaggaatgtacaggccagcgggagcccacgtatcagctcaacatccacgacatcaaactgctcttcctgcgcttcgccatggagcagtcgttcagcgcagacactggcgggggcggccgggagagcaacatccacctgatcccgtacatcattcacactgtgctttacgtcctgaacacaacccgagcaacttcccgagaagagaagaacctccaaggctttctggaacagcccaaggagaagtgggtggagagtgcctttgaagtggacgggccctactatttcacagtcttggcccttcacatcctgccccctgagcagtggagagccacacgtgtggaaatcttgcggaggctgttggtgacctcgcaggctcgggcagtggctccaggtggagccaccaggctgacagataaggcagtgaaggactattccgcttaccgttcttcccttctcttttgggccctcgtcgatctcatttacaacatgtttaagaaggtgcctaccagtaacacagagggaggctggtcctgctctctcgctgagtacatccgccacaacgacatgcccatctacgaagctgccgacaaagccctgaaaaccttccaggaggagttcatgccagtggagaccttctcagagttcctcgatgtggccggtcttttatcagaaatcaccgatccagagagcttcctgaaggacctgttgaactcagtcccctgaccaccacacagcagctgcggcggcgaagacgaagctggcttgccttccaccctctgttctccctccttgtgcattaagttccctccgcgggatgctgcattgttaccccgccctcccctctctcatttttcttggtgtggcttggggtttttaggcttcctgttttatctcgtgtgtgtggtgcaccagctatgaggttgtctgtaacccaagccatcaaagggcctgtacatacctaggagccatgagttgtcccggccagcttcatacttgagtgtgcacatcttgagaaataaacaagtgacttaacacacattgaaaa

SEQ ID NO: 356696 - DNA, 12003 bp, Homo sapiens
gtgacctagaggttccgccacaagcgcgatctcaaaggtccaggtctctttggatgagcatttttctaagatggctgctgagactgatcctcataagtcgtctgagattaccaagaacctacttccagccacgctgcaactcattgacacctatgcatcgttcaccagagcctatttgctgcaaaactttaatgaagagggaacaactgagaaaccttccaaggagaaactgcaaggctttgctgctgttttggctattggctctagcaggtgcaaggcaaatactctgggtccgacactggttcagaatttgccatcgtcagtgcagactgtgtgtgagtcctggaacaacatcaataccaatgaatttcccaatattggatcctggcgcaatgcctttgccaatgacaccatcccttcagagagttatattagtgcagtgcaggctgcacacctggggactctctgtagccaaagtctgcccctggctgcttccctgaagcataccctcctctcactggtcaggttgactggagatcttattgtttggtcagatgagatgaacccaccacaggtaattcggacactgctacctcttcttttggaatcaagcactgagagtgttgccgagatcagtagcaactccctggaacgcatcttgggccctgctgagtctgatgagttcttggctcgtgtttatgagaagctgatcactggttgttacaacattctggccaatcatgcagatcctaacagtggactggatgaatccatcctggaggaatgtctccagtacttggaaaagcagctggaaagtagccaggctcgtaaagctatggaggagtttttctctgacagtggagaacttgtacagatcatgatggcaacagccaatgagaacctctctgctaaattctgtaaccgagttttgaaattcttcaccaaactcttccagctgactgagaagagccctaacccgagcctgttgcatctctgtggctccctggcacaactggcctgtgtggaacctgtgcgcctgcaggcctggctcacccgcatgactacatcgcccccaaaagattctgatcagctggatgtaattcaggagaaccggcagctgctgcagttactgaccacatacattgttcgggaaaacagccaagttggggaaggtgtgtgtgctgttcttctgggcaccctgactcccatggcaacagagatgctggccaacggtgatgggactggcttccctgaacttatggttgtgatggccactctggccagtgcaggtcaaggtgctggtcaccttcagcttcataatgctgctgtggattggctgagcagatgcaagaaatacctgtcacagaagaatgtagttgaaaaactgaatgccaatgtaatgcatggaaagcatgtgatgatcttggagtgcacatgccatatcatgtcttacttggctgatgtcacgaatgccctgagccagagtaatggtcaaggcccaagtcatctctcagtggatggggaagagcgggccattgaagtagactcagactgggtggaggagttggcggtggaagaggaagattcccaggctgaggattcagatgaagattctctttgcaataaactctgcacttttacgatcacacagaaagaattcatgaaccagcattggtaccactgtcacacctgtaaaatggtggatggcgtgggtgtctgcacagtgtgtgctaaggtgtgccacaaggatcatgagatttcctatgccaagtatggatccttcttctgtgactgtggagccaaggaagatggcagctgtttggctctggtgaagagaactcctagcagtggcatgagctctaccatgaaggagtcggcatttcagagtgaacccaggatttcagagagtctagtgcgtcatgccagcacctcctcgccagctgacaaagccaaggttaccatcagtgatggaaaggttgctgacgaagagaagcccaagaagagcagcctctgccgcacagtagagggctgccgggaggaattacagaaccaggccaatttctccttcgctcctctcgtgttagacatgcttaatttccttatggatgccattcagaccaacttccagcaagcttcagccgtcgggagcagcagccgtgctcagcaagccctcagtgagctacacactgtggagaaggcagtggagatgacagaccagctgatggttcccaccttagggtcccaggaaggtgcctttgagaatgtgcggatgaattacagtggagaccagggccagaccatccggcagctgatcagtgctcatgtgctcaggcgggtggctatgtgtgtgctctcctctccccatgggcgccgccaacatttggctgtcagccatgagaagggcaagatcaccgttctgcagctctctgcactcctgaagcaagcagattccagcaaaaggaagttaactctgacccgcttggcttctgccccagttccttttactgtgttgagcctcacaggaaatccctgcaaggaagactacttggcggtttgtgggctaaaggactgtcatgtgctcacctttagtagctcaggctctgtttcggatcacttggttttgcaccctcagttggcaacggggaacttcatcatcaaagccgtgtggttacctggttcacagaccgagttagcaattgtcaccgcagactttgttaagatttatgacctgtgtgttgatgccttgagtccaaccttctattttctcctgccaagctcaaagataagagatgttaccttccttttcaatgaggagggaaagaacatcattgttataatgtcttcggctgggtacatctatactcagcttatggaagaggccagcagtgcccagcagggacccttctatgtcactaatgtgttggaaatcaatcatgaggacctgaaggacagtaacagccaggtggcgggcggtggtgtgtccgtgtactactcccacgtgttgcagatgttgttcttcagctattgtcaaggcaaatcattcgcagccaccatcagcaggacaaccctggaggtgttgcaactcttccccatcaacatcaaaagttccaatggtggcagtaagacttctcctgctctttgccagtggtctgaggtgatgaaccaccctggcttggtgtgctgtgtccagcaaactacaggggtgccgctggtagttatggtgaaaccagacacttttcttatccaggagattaagactcttcctgctaaagcgaagatccaagacatggttgctattaggcacacggcctgcaatgagcagcagcggacaacaatgattctgctgtgtgaggatggcagcctgcgcatttacatggccaacgtggagaacacctcctactggctgcagccatccctgcagcccagcagtgtcatcagcatcatgaagcctgttcgaaagcgcaaaacagctacaatcacaacccgcacgtctagccaggtgactttccccattgacttttttgaacacaaccagcagctgacagatgtggagtttggtggtaacgacctcctacaggtctataatgcacaacagataaaacaccggctgaattccactggcatgtatgtggccaacaccaagcccggaggcttcaccattgagattagtaacaacaatagcactatggtgatgacaggcatgcggatccagattgggactcaagcaatagaacgggccccgtcatatatcgagatcttcggcagaactatgcagctcaacctgagtcgctcacgctggtttgacttccccttcaccagagaagaagccctgcaggctgataagaagctgaacctcttcattggggcctcggtggatccagcaggtgtcaccatgatagatgctgtaaaaatttatggcaagactaaggagcagtttggctggcctgatgagcccccagaagaattcccttctgcctctgtcagcaacatctgcccttcaaatctgaaccagagcaacggcactggagatagcgactcagctgcccccactacgaccagtggaactgtcctggagaggctggttgtgagttctttagaagccctggaaagctgctttgccgttggcccaatcatcgagaaggagagaaacaagaatgctgctcaggagctggccactttgctgttgtccctgccagcacctgccagtgtccagcagcagtccaagagccttctggccagcctgcacaccagccgctcggcctaccacagccacaaggatcaggccttgctgagcaaagctgtgcagtgtctcaacacatctagcaaagagggcaaggatttggaccctgaggtgttccagaggctagtgatcacagctcgctccattgccatcatgcgccccaacaaccttgtccactttacggagtcaaagctgccccagatggaaacagactgtttttttcctagatgtgcctgctggagtctagggatagttggcatattgattggggccccacttgaaactccctccccaggcaagcttccttgacctgagttaaccttaaaacaaattaaattccatctcagatttaccatcgttgataattttctttctcctgcttagaaggaatggatgaagggaaggaaccgcagaagcagttggaaggagattgctgtagtttcatcacccagcttgtgaaccacttctggaaactccatgcatccaaacccaagaatgccttcttggcacctgcctgccttccaggactaactcatattgaagctactgtcaatgctctggtggacatcatccatggctactgtacctgtgagctggattgtattaacacagcatccaagatctacatgcagatgctcttgtgtcctgatcctgctgtgagcttctcttgtaaacaagctctaattcgagtcctaaggcccaggaacaaacggagacatgtgactttaccctcttcccctcgaagcaacactccaatgggagacaaggatgatgatgacgatgatgatgcagatgagaaaatgcagtcatcagggatcccgaatggtggtcacatccgtcaggaaagccaggaacagagtgaggtggaccatggagattttgagatggtgtctgagtcgatggtcctggagacagctgaaaatgtcaacaatggcaacccctctcccctggaggccctgctggcaggcgcagagggcttcccccccatgctggacatcccacctgatgcagatgacgagaccatggttgaactagccattgccctgagcctgcagcaggaccaacaaggcagcagcagcagtgccctgggcctgcagagcctgggactgtccggccaggcacccagctcttcctctctggacgcaggaaccctctctgacaccacagcatcagctccagcctcagacgacgagggcagtacagcagcgacagatggttctacccttcggacctctcctgctgaccacggtggtagtgtgggctcggagagcgggggcagtgcagtggactcagtggctggcgagcacagtgtatctggccggagcagtgcttatggcgatgctacagctgaggggcatccggctggaccaggaagtgtcagctcaagcactggagccatcagcaccaccactgggcaccaggagggagatggctccgagggagaaggagaaggagaaactgaaggagatgtccacactagcaacaggctgcacatggtccgtctaatgctgttggagagattactgcagaccctgcctcaattacgaaacgttggcggtgtccgggccatcccatacatgcaggtcattctaatgctcactacagatctggatggagaagatgagaaagacaagggggccctagacaacctgctctcccagcttattgctgagttgggtatggataaaaaggatgtctccaagaagaatgagcgcagcgccctgaatgaagtccatctggtagtaatgagactcctgagtgtcttcatgtcccgcaccaaatctggatccaagtcttccatatgtgagtcatcttccctcatctccagtgccacagcagcagctctactgagctctggggctgtggactactgcctgcacgtgctcaaatcactgctggaatattggaagagccaacagaatgacgaggagcctgtggctaccagccagttgctgaaaccacatactacctcctccccacctgacatgagcccattctttctccgccagtatgtgaagggtcatgctgctgatgtgtttgaggcctatactcagcttctaacagaaatggtactgaggcttccttaccaaatcaaaaagattactgacaccaattctcgaatcccacctcctgtctttgaccactcgtggttttactttctctccgagtacctcatgatccagcagactccatttgtgcgccgtcaagtccgcaaacttctgctcttcatctgtggatccaaagagaagtaccgccagctccgggatttgcacaccctggactctcacgtgcgtgggatcaagaagctgctagaagagcaggggatattcctccgggcaagtgtggttacagccagctcaggctccgccttgcaatatgacacactcatcagcctgatggagcacctgaaagcctgtgcagagattgccgcccagcgaaccatcaactggcagaaattctgcatcaaagatgactccgtcctgtacttcctcctccaagtcagtttccttgtggatgagggcgtgtccccagtgctgctgcaactgctctcctgtgctctctgcggcagcaaggtgctcgctgcactggcagcctcttcgggatcctccagtgcttcttcctcctcagcccctgtggctgccagttctggacaagccacaacacagtccaagtcttccactaaaaagagcaagaaagaagaaaaagaaaaggagaaagatggtgagacctctggcagccaggaggaccagctgtgcacagctctggtgaaccagctgaacaaatttgccgataaggaaaccctgatccagttcctgcgttgtttcctgttagagtccaattcttcctcggtgcgctggcaggcccactgtctgacactgcacatctacagaaattccagcaaatctcaacaggagctcctgctagatctgatgtggtccatctggccagaactcccagcctatggtcgtaaggctgcccagtttgtggacctactaggatatttctccctgaaaactccacaaacagagaagaagttgaaggagtattcacagaaggctgtggagattctgcggactcaaaaccatattcttaccaaccaccccaactcgaacatttataacactttgtctggcttagtggagtttgatggctattacctggagagcgatccctgcctggtgtgtaataacccggaagtaccgttctgttatatcaagctgtcttccattaaagtggacacgcggtacaccaccacccagcaggttgtgaagctcattggcagtcacaccatcagcaaagtgacagtgaaaatcggggatctgaaacggaccaagatggtgcggaccatcaacctgtattataacaaccgaaccgtgcaggccatcgtggagttgaaaaacaagccagctcgctggcacaaagccaagaaggttcagctgacccctggacagacagaggtgaagattgacctgccgttgcccattgtggcctccaatctgatgattgagtttgcagacttctatgaaaactaccaggcctccacagagaccctgcagtgccctcgctgtagtgcctcggtccctgccaacccaggagtctgtggcaactgtggagagaatgtgtaccagtgtcacaaatgcagatccatcaactacgatgaaaaggatcccttcctctgcaatgcctgtggcttctgtaaatatgcccgcttcgacttcatgctctatgccaagccttgctgtgcagtggatcccattgagaatgaagaagaccggaagaaggctgtatccaacatcaatacacttttggacaaagctgatcgagtgtatcatcagctgatgggacaccggccacagctggagaacctgctctgcaaagtgaatgaggcagctccagaaaagccacaggatgactcaggaacagcagggggcatcagctccacttctgccagtgtgaatcgttacatcctgcagttggctcaggagtattgtggagactgcaagaactcttttgatgaactctccaaaatcatccagaaagtctttgcttcgcgcaaagagttgttggaatatgacctacagcagagggaagcagccactaaatcatcccggacctccgtgcagcccacattcactgccagccagtaccgtgccttatccgtcctgggctgtggccacacatcctccaccaagtgctatggctgcgcctcggctgtcacagaacattgtatcacactacttcgggccctggccaccaacccagccttgaggcacatccttgtctcccagggccttatccgggagctctttgattataatcttcgccgaggggctgcggccatgcgggaggaggtccgccagctcatgtgcctcctaactcgagacaacccagaagccacccaacagatgaatgacctgattattggcaaggtctccacagccctgaagggccactgggccaaccccgatctggtgagccggcctagcaggcccagctgtcctctctgacttcccctcacatgccttgtgtttctcagcttcccctcccaggtcctgcggtgactgaggagggaaggagcagaacattaccccagaatggttttcccagggaagagcctggagcacaagggtctccgtctgtcctttgtctctgttggagccacctaggaccagaaattgtattaatagttaagagtcgctggaccggagggaagctggtggtgcagaggaccaagctgatcgatgagacgcaggacatgctgctggagatgctggaggacatgaccacaggtacagaatcagaaaccaaggccttcatggctgtgtgcattgagacagccaagcgctacaatctggatgactaccggaccccggtgttcatcttcgagaggctctgcagcatcatttatcctgaggagaatgaagtcactgagttctttgtgaccctggagaaggatccccaacaagaagacttcttacagggcaggatgcctgggaacccgtatagcagcaatgagccaggcatcgggccgctgatgagggatataaagaacaagatttgccaggactgtgacttagtggccctcctggaagatgacagtggcatggagcttctagtgaacaataaaatcattagtttggaccttcctgtggctgaagtttacaagaaagtctggtgtaccacgaatgagggagagcccatgaggattgtttatcgtatgcgggggctgctgggcgatgccacagaggagttcattgagtccctggactctactacagatgaagaagaagatgaagaagaagtgtataaaatggctggtgtgatggcccagtgtgggggcctggaatgcatgcttaacagactcgcagggatcagagatttcaagcagggacgccaccttctaacagtgctactgaaattgttcagttactgcgtgaaggtgaaagtcaaccggcagcaactggtcaaactggaaatgaacaccttgaacgtcatgctggggaccctaaacctggcccttgtagctgaacaagaaagcaaggacagtgggggtgcagctgtggctgagcaggtgcttagcatcatggagatcattctagatgagtccaatgctgagcccctgagtgaggacaagggcaacctcctcctgacaggtgacaaggatcaactggtgatgctcttggaccagatcaacagcacctttgttcgctccaaccccagtgtgctccagggcctgcttcgcatcatcccgtacctttcctttggagaggtggagaaaatgcagatcttggtggagcgattcaaaccatactgcaactttgataaatatgatgaagatcacagtggtgatgataaagtcttcctggactgcttctgtaaaatagctgctggcatcaagaacaacagcaatgggcaccagctgaaggatctgattctccagaaggggatcacccagaatgcacttgactacatgaaaaagcacatccctagcgccaagaatttggatgccgacatctggaaaaagtttttgtctcgcccagccttgccatttatcctaaggctgcttcggggcctggccatccagcaccctggcacccaggttctgattggaactgattccatcccgaacctgcataagctggagcaggtgtccagtgatgagggcattgggaccttggcagagaacctgctggaagccctgcgggaacaccctgacgtaaacaagaagattgacgcagcccgcagggagacccgggcagagaagaaacgcatggccatggcaatgaggcagaaggccctgggcaccctgggcatgacgacaaatgaaaagggccaggtcgtgaccaagacagcactcctgaagcagatggaagagctgatcgaggagcctggcctcacgtgctgcatctgcagggagggatacaagttccagcccacaaaggtcctgggcatttataccttcacgaagcgggtagccttggaggagttggagaataagccccggaaacagcagggctacagcaccgtgtcccacttcaacattgtgcactacgactgccatctggctgccgtcaggttggctcgaggccgggaagagtgggagagtgccgccctgcagaatgccaacaccaagtgcaacgggctccttccggtctggggacctcatgtccctgaatcagcttttgccacttgcttggcaagacacaacacttacctccaggaatgtacaggccagcgggagcccacgtatcagctcaacatccacgacatcaaactgctcttcctgcgcttcgccatggagcagtcgttcagcgcagacactggcgggggcggccgggagagcaacatccacctgatcccgtacatcattcacactgtgctttacgtcctgaacacaacccgagcaacttcccgagaagagaagaacctccaaggctttctggaacagcccaaggagaagtgggtggagagtgcctttgaagtggacgggccctactatttcacagtcttggcccttcacatcctgccccctgagcagtggagagccacacgtgtggaaatcttgcggaggctgttggtgacctcgcaggctcgggcagtggctccaggtggagccaccaggctgacagataaggcagtgaaggactattccgcttaccgttcttcccttctcttttgggccctcgtcgatctcatttacaacatgtttaagaaggtgcctaccagtaacacagagggaggctggtcctgctctctcgctgagtacatccgccacaacgacatgcccatctacgaagctgccgacaaagccctgaaaaccttccaggaggagttcatgccagtggagaccttctcagagttcctcgatgtggccggtcttttatcagaaatcaccgatccagagagcttcctgaaggacctgttgaactcagtcccctgaccaccacacagcagctgcggcggcgaagacgaagctggcttgccttccaccctctgttctccctccttgtgcattaagttccctccgcgggatgctgcattgttaccccgccctcccctctctcatttttcttggtgtggcttggggtttttaggcttcctgttttatctcgtgtgtgtggtgcaccagctatgaggttgtctgtaacccaagccatcaaagggcctgtacatacctaggagccatgagttgtcccggccagcttcatacttgagtgtgcacatcttgagaaataaacaagtgacttaacacacattgaaaa

SEQ ID NO: 356697 - DNA, 12439 bp, Homo sapiens
gtgacctagaggttccgccacaagcgcgatctcaaaggtccaggtctctttggatgagcatttttctaagatggctgctgagactgatcctcataagtcgtctgagattaccaagaacctacttccagccacgctgcaactcattgacacctatgcatcgttcaccagagcctatttgctgcaaaactttaatgaagagggaacaactgagaaaccttccaaggagaaactgcaaggctttgctgctgttttggctattggctctagcaggtgcaaggcaaatactctgggtccgacactggttcagaatttgccatcgtcagtgcagactgtgtgtgagtcctggaacaacatcaataccaatgaatttcccaatattggatcctggcgcaatgcctttgccaatgacaccatcccttcagagagttatattagtgcagtgcaggctgcacacctggggactctctgtagccaaagtctgcccctggctgcttccctgaagcataccctcctctcactggtcaggttgactggagatcttattgtttggtcagatgagatgaacccaccacaggtaattcggacactgctacctcttcttttggaatcaagcactgagagtgttgccgagatcagtagcaactccctggaacgcatcttgggccctgctgagtctgatgagttcttggctcgtgtttatgagaagctgatcactggttgttacaacattctggccaatcatgcagatcctaacagtggactggatgaatccatcctggaggaatgtctccagtacttggaaaagcagctggaaagtagccaggctcgtaaagctatggaggagtttttctctgacagtggagaacttgtacagatcatgatggcaacagccaatgagaacctctctgctaaattctgtaaccgagttttgaaattcttcaccaaactcttccagctgactgagaagagccctaacccgagcctgttgcatctctgtggctccctggcacaactggcctgtgtggaacctgtgcgcctgcaggcctggctcacccgcatgactacatcgcccccaaaagattctgatcagctggatgtaattcaggagaaccggcagctgctgcagttactgaccacatacattgttcgggaaaacagccaagttggggaaggtgtgtgtgctgttcttctgggcaccctgactcccatggcaacagagatgctggccaacggtgatgggactggcttccctgaacttatggttgtgatggccactctggccagtgcaggtcaaggtgctggtcaccttcagcttcataatgctgctgtggattggctgagcagatgcaagaaatacctgtcacagaagaatgtagttgaaaaactgaatgccaatgtaatgcatggaaagcatgtgatgatcttggagtgcacatgccatatcatgtcttacttggctgatgtcacgaatgccctgagccagagtaatggtcaaggcccaagtcatctctcagtggatggggaagagcgggccattgaagtagactcagactgggtggaggagttggcggtggaagaggaagattcccaggctgaggattcagatgaagattctctttgcaataaactctgcacttttacgatcacacagaaagaattcatgaaccagcattggtaccactgtcacacctgtaaaatggtggatggcgtgggtgtctgcacagtgtgtgctaaggtgtgccacaaggatcatgagatttcctatgccaagtatggatccttcttctgtgactgtggagccaaggaagatggcagctgtttggctctggtgaagagaactcctagcagtggcatgagctctaccatgaaggagtcggcatttcagagtgaacccaggatttcagagagtctagtgcgtcatgccagcacctcctcgccagctgacaaagccaaggttaccatcagtgatggaaaggttgctgacgaagagaagcccaagaagagcagcctctgccgcacagtagagggctgccgggaggaattacagaaccaggccaatttctccttcgctcctctcgtgttagacatgcttaatttccttatggatgccattcagaccaacttccagcaagcttcagccgtcgggagcagcagccgtgctcagcaagccctcagtgagctacacactgtggagaaggcagtggagatgacagaccagctgatggttcccaccttagggtcccaggaaggtgcctttgagaatgtgcggatgaattacagtggagaccagggccagaccatccggcagctgatcagtgctcatgtgctcaggcgggtggctatgtgtgtgctctcctctccccatgggcgccgccaacatttggctgtcagccatgagaagggcaagatcaccgttctgcagctctctgcactcctgaagcaagcagattccagcaaaaggaagttaactctgacccgcttggcttctgccccagttccttttactgtgttgagcctcacaggaaatccctgcaaggaagactacttggcggtttgtgggctaaaggactgtcatgtgctcacctttagtagctcaggctctgtttcggatcacttggttttgcaccctcagttggcaacggggaacttcatcatcaaagccgtgtggttacctggttcacagaccgagttagcaattgtcaccgcagactttgttaagatttatgacctgtgtgttgatgccttgagtccaaccttctattttctcctgccaagctcaaagataagagatgttaccttccttttcaatgaggagggaaagaacatcattgttataatgtcttcggctgggtacatctatactcagcttatggaagaggccagcagtgcccagcagggacccttctatgtcactaatgtgttggaaatcaatcatgaggacctgaaggacagtaacagccaggtggcgggcggtggtgtgtccgtgtactactcccacgtgttgcagatgttgttcttcagctattgtcaaggcaaatcattcgcagccaccatcagcaggacaaccctggaggtgttgcaactcttccccatcaacatcaaaagttccaatggtggcagtaagacttctcctgctctttgccagtggtctgaggtgatgaaccaccctggcttggtgtgctgtgtccagcaaactacaggggtgccgctggtagttatggtgaaaccagacacttttcttatccaggagattaagactcttcctgctaaagcgaagatccaagacatggttgctattaggcacacggcctgcaatgagcagcagcggacaacaatgattctgctgtgtgaggatggcagcctgcgcatttacatggccaacgtggagaacacctcctactggctgcagccatccctgcagcccagcagtgtcatcagcatcatgaagcctgttcgaaagcgcaaaacagctacaatcacaacccgcacgtctagccaggtgactttccccattgacttttttgaacacaaccagcagctgacagatgtggagtttggtggtaacgacctcctacaggtctataatgcacaacagataaaacaccggctgaattccactggcatgtatgtggccaacaccaagcccggaggcttcaccattgagattagtaacaacaatagcactatggtgatgacaggcatgcggatccagattgggactcaagcaatagaacgggccccgtcatatatcgagatcttcggcagaactatgcagctcaacctgagtcgctcacgctggtttgacttccccttcaccagagaagaagccctgcaggctgataagaagctgaacctcttcattggggcctcggtggatccagcaggtgtcaccatgatagatgctgtaaaaatttatggcaagactaaggagcagtttggctggcctgatgagcccccagaagaattcccttctgcctctgtcagcaacatctgcccttcaaatctgaaccagagcaacggcactggagatagcgactcagctgcccccactacgaccagtggaactgtcctggagaggctggttgtgagttctttagaagccctggaaagctgctttgccgttggcccaatcatcgagaaggagagaaacaagaatgctgctcaggagctggccactttgctgttgtccctgccagcacctgccagtgtccagcagcagtccaagagccttctggccagcctgcacaccagccgctcggcctaccacagccacaaggatcaggccttgctgagcaaagctgtgcagtgtctcaacacatctagcaaagagggcaaggatttggaccctgaggtgttccagaggctagtgatcacagctcgctccattgccatcatgcgccccaacaaccttgtccactttacggagtcaaagctgccccagatggaaacagactgtttttttcctagatgtgcctgctggagtctagggatagttggcatattgattggggccccacttgaaactccctccccaggcaagcttccttgacctgagttaaccttaaaacaaattaaattccatctcagatttaccatcgttgataattttctttctcctgcttagaaggaatggatgaagggaaggaaccgcagaagcagttggaaggagattgctgtagtttcatcacccagcttgtgaaccacttctggaaactccatgcatccaaacccaagaatgccttcttggcacctgcctgccttccaggactaactcatattgaagctactgtcaatgctctggtggacatcatccatggctactgtacctgtgagctggattgtattaacacagcatccaagatctacatgcagatgctcttgtgtcctgatcctgctgtgagcttctcttgtaaacaagctctaattcgagtcctaaggcccaggaacaaacggagacatgtgactttaccctcttcccctcgaagcaacactccaatgggagacaaggatgatgatgacgatgatgatgcagatgagaaaatgcagtcatcagggatcccgaatggtggtcacatccgtcaggaaagccaggaacagagtgaggtggaccatggagattttgagatggtgtctgagtcgatggtcctggagacagctgaaaatgtcaacaatggcaacccctctcccctggaggccctgctggcaggcgcagagggcttcccccccatgctggacatcccacctgatgcagatgacgagaccatggttgaactagccattgccctgagcctgcagcaggaccaacaaggcagcagcagcagtgccctgggcctgcagagcctgggactgtccggccaggcacccagctcttcctctctggacgcaggaaccctctctgacaccacagcatcagctccagcctcagacgacgagggcagtacagcagcgacagatggttctacccttcggacctctcctgctgaccacggtggtagtgtgggctcggagagcgggggcagtgcagtggactcagtggctggcgagcacagtgtatctggccggagcagtgcttatggcgatgctacagctgaggggcatccggctggaccaggaagtgtcagctcaagcactggagccatcagcaccaccactgggcaccaggagggagatggctccgagggagaaggagaaggagaaactgaaggagatgtccacactagcaacaggctgcacatggtccgtctaatgctgttggagagattactgcagaccctgcctcaattacgaaacgttggcggtgtccgggccatcccatacatgcaggtcattctaatgctcactacagatctggatggagaagatgagaaagacaagggggccctagacaacctgctctcccagcttattgctgagttgggtatggataaaaaggatgtctccaagaagaatgagcgcagcgccctgaatgaagtccatctggtagtaatgagactcctgagtgtcttcatgtcccgcaccaaatctggatccaagtcttccatatgtgagtcatcttccctcatctccagtgccacagcagcagctctactgagctctggggctgtggactactgcctgcacgtgctcaaatcactgctggaatattggaagagccaacagaatgacgaggagcctgtggctaccagccagttgctgaaaccacatactacctcctccccacctgacatgagcccattctttctccgccagtatgtgaagggtcatgctgctgatgtgtttgaggcctatactcagcttctaacagaaatggtactgaggcttccttaccaaatcaaaaagattactgacaccaattctcgaatcccacctcctgtctttgaccactcgtggttttactttctctccgagtacctcatgatccagcagactccatttgtgcgccgtcaagtccgcaaacttctgctcttcatctgtggatccaaagagaagtaccgccagctccgggatttgcacaccctggactctcacgtgcgtgggatcaagaagctgctagaagagcaggggatattcctccgggcaagtgtggttacagccagctcaggctccgccttgcaatatgacacactcatcagcctgatggagcacctgaaagcctgtgcagagattgccgcccagcgaaccatcaactggcagaaattctgcatcaaagatgactccgtcctgtacttcctcctccaagtcagtttccttgtggatgagggcgtgtccccagtgctgctgcaactgctctcctgtgctctctgcggcagcaaggtgctcgctgcactggcagcctcttcgggatcctccagtgcttcttcctcctcagcccctgtggctgccagttctggacaagccacaacacagtccaagtcttccactaaaaagagcaagaaagaagaaaaagaaaaggagaaagatggtgagacctctggcagccaggaggaccagctgtgcacagctctggtgaaccagctgaacaaatttgccgataaggaaaccctgatccagttcctgcgttgtttcctgttagagtccaattcttcctcggtgcgctggcaggcccactgtctgacactgcacatctacagaaattccagcaaatctcaacaggagctcctgctagatctgatgtggtccatctggccagaactcccagcctatggtcgtaaggctgcccagtttgtggacctactaggatatttctccctgaaaactccacaaacagagaagaagttgaaggagtattcacagaaggctgtggagattctgcggactcaaaaccatattcttaccaaccaccccaactcgaacatttataacactttgtctggcttagtggagtttgatggctattacctggagagcgatccctgcctggtgtgtaataacccggaagtaccgttctgttatatcaagctgtcttccattaaagtggacacgcggtacaccaccacccagcaggttgtgaagctcattggcagtcacaccatcagcaaagtgacagtgaaaatcggggatctgaaacggaccaagatggtgcggaccatcaacctgtattataacaaccgaaccgtgcaggccatcgtggagttgaaaaacaagccagctcgctggcacaaagccaagaaggttcagctgacccctggacagacagaggtgaagattgacctgccgttgcccattgtggcctccaatctgatgattgagtttgcagacttctatgaaaactaccaggcctccacagagaccctgcagtgccctcgctgtagtgcctcggtccctgccaacccaggagtctgtggcaactgtggagagaatgtgtaccagtgtcacaaatgcagatccatcaactacgatgaaaaggatcccttcctctgcaatgcctgtggcttctgtaaatatgcccgcttcgacttcatgctctatgccaagccttgctgtgcagtggatcccattgagaatgaagaagaccggaagaaggctgtatccaacatcaatacacttttggacaaagctgatcgagtgtatcatcagctgatgggacaccggccacagctggagaacctgctctgcaaagtgaatgaggcagctccagaaaagccacaggatgactcaggaacagcagggggcatcagctccacttctgccagtgtgaatcgttacatcctgcagttggctcaggagtattgtggagactgcaagaactcttttgatgaactctccaaaatcatccagaaagtctttgcttcgcgcaaagagttgttggaatatgacctacagcagagggaagcagccactaaatcatcccggacctccgtgcagcccacattcactgccagccagtaccgtgccttatccgtcctgggctgtggccacacatcctccaccaagtgctatggctgcgcctcggctgtcacagaacattgtatcacactacttcgggccctggccaccaacccagccttgaggcacatccttgtctcccagggccttatccgggagctctttgattataatcttcgccgaggggctgcggccatgcgggaggaggtccgccagctcatgtgcctcctaactcgagacaacccagaagccacccaacagatgaatgacctgattattggcaaggtctccacagccctgaagggccactgggccaaccccgatctggcaagtagcctgcagtatgaaatgctgctgctgacggattctatctccaaggaggacagctgctgggagctccggttacgctgtgctctcagccttttcctcatggctgtgaacattaagactcctgtggtggttgaaaacattaccctcatgtgcctgaggatcttgcagaagctgataaaaccacctgctcccactagcaagaagaacaaggatgtccccgtcgaggccctcaccacggtgaagccatactgcaatgagatccatgcccaggctcaactgtggctcaagagagaccccaaggcatcctatgatgcctggaagaagtgtcttcctatcagagggatagatggcaatgggaaagcccccagcaaatcagagctccgccatctctatttgactgagaagtatgtgtggaggtggaaacagttcctgagtcgtcgggggaagaggacctcccccttggatctcaaactggggcataacaactggctgcgacaagtgcttttcactccagcaacgcaggccgcacggcaggcagcctgtaccattgtggaagctctagccaccattcccagccgcaagcagcaggtcctggacctgcttaccagttacctggatgagctgagcatagctggggagtgtgcagctgagtacctggctctctaccagaagctcatcacttctgcgcactggaaagtctacttggcagctcggggagtcctaccctatgtgggcaacctcatcaccaaggaaatagctcgtctgctggccctggaggaggctaccctgagtaccgatctgcagcagggttatgcccttaaaagtctcacaggccttctctcctcctttgttgaggtggaatccatcaaaagacattttaaaagtcgcttggtgggtactgtgctgaatggatacctgtgcttgcggaagctggtggtgcagaggaccaagctgatcgatgagacgcaggacatgctgctggagatgctggaggacatgaccacaggtacagaatcagaaaccaaggccttcatggctgtgtgcattgagacagccaagcgctacaatctggatgactaccggaccccggtgttcatcttcgagaggctctgcagcatcatttatcctgaggagaatgaagtcactgagttctttgtgaccctggagaaggatccccaacaagaagacttcttacagggcaggatgcctgggaacccgtatagcagcaatgagccaggcatcgggccgctgatgagggatataaagaacaagatttgccaggactgtgacttagtggccctcctggaagatgacagtggcatggagcttctagtgaacaataaaatcattagtttggaccttcctgtggctgaagtttacaagaaagtctggtgtaccacgaatgagggagagcccatgaggattgtttatcgtatgcgggggctgctgggcgatgccacagaggagttcattgagtccctggactctactacagatgaagaagaagatgaagaagaagtgtataaaatggctggtgtgatggcccagtgtgggggcctggaatgcatgcttaacagactcgcagggatcagagatttcaagcagggacgccaccttctaacagtgctactgaaattgttcagttactgcgtgaaggtgaaagtcaaccggcagcaactggtcaaactggaaatgaacaccttgaacgtcatgctggggaccctaaacctgggcaacctcctcctgacaggtgacaaggatcaactggtgatgctcttggaccagatcaacagcacctttgttcgctccaaccccagtgtgctccagggctgcttctgtaaaatagctgctggcatcaagaacaacagcaatgggcaccagctgaaggatctgattctccagaaggggatcacccagaatgcacttgactacatgaaaaagcacatccctagcgccaagaatttggatgccgacatctggaaaaagtttttgtctcgcccagccttgccatttatcctaaggctgcttcggggcctggccatccagcaccctggcacccaggttctgattggaactgattccatcccgaacctgcataagctggagcaggtgtccagtgatgagggcattgggaccttggcagagaacctgctggaagccctgcgggaacaccctgacgtaaacaagaagattgacgcagcccgcagggagacccgggcagagaagaaacgcatggccatggcaatgaggcagaaggccctgggcaccctgggcatgacgacaaatgaaaagggccaggtcgtgaccaagacagcactcctgaagcagatggaagagctgatcgaggagcctggcctcacgtgctgcatctgcagggagggatacaagttccagcccacaaaggtcctgggcatttataccttcacgaagcgggtagccttggaggagttggagaataagccccggaaacagcagggctacagcaccgtgtcccacttcaacattgtgcactacgactgccatctggctgccgtcaggttggctcgaggccgggaagagtgggagagtgccgccctgcagaatgccaacaccaagtgcaacgggctccttccggtctggggacctcatgtccctgaatcagcttttgccacttgcttggcaagacacaacacttacctccaggaatgtacaggccagcgggagcccacgtatcagctcaacatccacgacatcaaactgctcttcctgcgcttcgccatggagcagtcgttcagcgcagacactggcgggggcggccgggagagcaacatccacctgatcccgtacatcattcacactgtgctttacgtcctgaacacaacccgagcaacttcccgagaagagaagaacctccaaggctttctggaacagcccaaggagaagtgggtggagagtgcctttgaagtggacgggccctactatttcacagtcttggcccttcacatcctgccccctgagcagtggagagccacacgtgtggaaatcttgcggaggctgttggtgacctcgcaggctcgggcagtggctccaggtggagccaccaggctgacagataaggcagtgaaggactattccgcttaccgttcttcccttctcttttgggccctcgtcgatctcatttacaacatgtttaagaaggtgcctaccagtaacacagagggaggctggtcctgctctctcgctgagtacatccgccacaacgacatgcccatctacgaagctgccgacaaagccctgaaaaccttccaggaggagttcatgccagtggagaccttctcagagttcctcgatgtggccggtcttttatcagaaatcaccgatccagagagcttcctgaaggacctgttgaactcagtcccctgaccaccacacagcagctgcggcggcgaagacgaagctggcttgccttccaccctctgttctccctccttgtgcattaagttccctccgcgggatgctgcattgttaccccgccctcccctctctcatttttcttggtgtggcttggggtttttaggcttcctgttttatctcgtgtgtgtggtgcaccagctatgaggttgtctgtaacccaagccatcaaagggcctgtacatacctaggagccatgagttgtcccggccagcttcatacttgagtgtgcacatcttgagaaataaacaagtgacttaacacacattgaaaa

SEQ ID NO: 356698 - DNA, 12636 bp, Homo sapiens
gtgacctagaggttccgccacaagcgcgatctcaaaggtccaggtctctttggatgagcatttttctaagatggctgctgagactgatcctcataagtcgtctgagattaccaagaacctacttccagccacgctgcaactcattgacacctatgcatcgttcaccagagcctatttgctgcaaaactttaatgaagagggaacaactgagaaaccttccaaggagaaactgcaaggctttgctgctgttttggctattggctctagcaggtgcaaggcaaatactctgggtccgacactggttcagaatttgccatcgtcagtgcagactgtgtgtgagtcctggaacaacatcaataccaatgaatttcccaatattggatcctggcgcaatgcctttgccaatgacaccatcccttcagagagttatattagtgcagtgcaggctgcacacctggggactctctgtagccaaagtctgcccctggctgcttccctgaagcataccctcctctcactggtcaggttgactggagatcttattgtttggtcagatgagatgaacccaccacaggtaattcggacactgctacctcttcttttggaatcaagcactgagagtgttgccgagatcagtagcaactccctggaacgcatcttgggccctgctgagtctgatgagttcttggctcgtgtttatgagaagctgatcactggttgttacaacattctggccaatcatgcagatcctaacagtggactggatgaatccatcctggaggaatgtctccagtacttggaaaagcagctggaaagtagccaggctcgtaaagctatggaggagtttttctctgacagtggagaacttgtacagatcatgatggcaacagccaatgagaacctctctgctaaattctgtaaccgagttttgaaattcttcaccaaactcttccagctgactgagaagagccctaacccgagcctgttgcatctctgtggctccctggcacaactggcctgtgtggaacctgtgcgcctgcaggcctggctcacccgcatgactacatcgcccccaaaagattctgatcagctggatgtaattcaggagaaccggcagctgctgcagttactgaccacatacattgttcgggaaaacagccaagttggggaaggtgtgtgtgctgttcttctgggcaccctgactcccatggcaacagagatgctggccaacggtgatgggactggcttccctgaacttatggttgtgatggccactctggccagtgcaggtcaaggtgctggtcaccttcagcttcataatgctgctgtggattggctgagcagatgcaagaaatacctgtcacagaagaatgtagttgaaaaactgaatgccaatgtaatgcatggaaagcatgtgatgatcttggagtgcacatgccatatcatgtcttacttggctgatgtcacgaatgccctgagccagagtaatggtcaaggcccaagtcatctctcagtggatggggaagagcgggccattgaagtagactcagactgggtggaggagttggcggtggaagaggaagattcccaggctgaggattcagatgaagattctctttgcaataaactctgcacttttacgatcacacagaaagaattcatgaaccagcattggtaccactgtcacacctgtaaaatggtggatggcgtgggtgtctgcacagtgtgtgctaaggtgtgccacaaggatcatgagatttcctatgccaagtatggatccttcttctgtgactgtggagccaaggaagatggcagctgtttggctctggtgaagagaactcctagcagtggcatgagctctaccatgaaggagtcggcatttcagagtgaacccaggatttcagagagtctagtgcgtcatgccagcacctcctcgccagctgacaaagccaaggttaccatcagtgatggaaaggttgctgacgaagagaagcccaagaagagcagcctctgccgcacagtagagggctgccgggaggaattacagaaccaggccaatttctccttcgctcctctcgtgttagacatgcttaatttccttatggatgccattcagaccaacttccagcaagcttcagccgtcgggagcagcagccgtgctcagcaagccctcagtgagctacacactgtggagaaggcagtggagatgacagaccagctgatggttcccaccttagggtcccaggaaggtgcctttgagaatgtgcggatgaattacagtggagaccagggccagaccatccggcagctgatcagtgctcatgtgctcaggcgggtggctatgtgtgtgctctcctctccccatgggcgccgccaacatttggctgtcagccatgagaagggcaagatcaccgttctgcagctctctgcactcctgaagcaagcagattccagcaaaaggaagttaactctgacccgcttggcttctgccccagttccttttactgtgttgagcctcacaggaaatccctgcaaggaagactacttggcggtttgtgggctaaaggactgtcatgtgctcacctttagtagctcaggctctgtttcggatcacttggttttgcaccctcagttggcaacggggaacttcatcatcaaagccgtgtggttacctggttcacagaccgagttagcaattgtcaccgcagactttgttaagatttatgacctgtgtgttgatgccttgagtccaaccttctattttctcctgccaagctcaaagataagagatgttaccttccttttcaatgaggagggaaagaacatcattgttataatgtcttcggctgggtacatctatactcagcttatggaagaggccagcagtgcccagcagggacccttctatgtcactaatgtgttggaaatcaatcatgaggacctgaaggacagtaacagccaggtggcgggcggtggtgtgtccgtgtactactcccacgtgttgcagatgttgttcttcagctattgtcaaggcaaatcattcgcagccaccatcagcaggacaaccctggaggtgttgcaactcttccccatcaacatcaaaagttccaatggtggcagtaagacttctcctgctctttgccagtggtctgaggtgatgaaccaccctggcttggtgtgctgtgtccagcaaactacaggggtgccgctggtagttatggtgaaaccagacacttttcttatccaggagattaagactcttcctgctaaagcgaagatccaagacatggttgctattaggcacacggcctgcaatgagcagcagcggacaacaatgattctgctgtgtgaggatggcagcctgcgcatttacatggccaacgtggagaacacctcctactggctgcagccatccctgcagcccagcagtgtcatcagcatcatgaagcctgttcgaaagcgcaaaacagctacaatcacaacccgcacgtctagccaggtgactttccccattgacttttttgaacacaaccagcagctgacagatgtggagtttggtggtaacgacctcctacaggtctataatgcacaacagataaaacaccggctgaattccactggcatgtatgtggccaacaccaagcccggaggcttcaccattgagattagtaacaacaatagcactatggtgatgacaggcatgcggatccagattgggactcaagcaatagaacgggccccgtcatatatcgagatcttcggcagaactatgcagctcaacctgagtcgctcacgctggtttgacttccccttcaccagagaagaagccctgcaggctgataagaagctgaacctcttcattggggcctcggtggatccagcaggtgtcaccatgatagatgctgtaaaaatttatggcaagactaaggagcagtttggctggcctgatgagcccccagaagaattcccttctgcctctgtcagcaacatctgcccttcaaatctgaaccagagcaacggcactggagatagcgactcagctgcccccactacgaccagtggaactgtcctggagaggctggttgtgagttctttagaagccctggaaagctgctttgccgttggcccaatcatcgagaaggagagaaacaagaatgctgctcaggagctggccactttgctgttgtccctgccagcacctgccagtgtccagcagcagtccaagagccttctggccagcctgcacaccagccgctcggcctaccacagccacaaggatcaggccttgctgagcaaagctgtgcagtgtctcaacacatctagcaaagagggcaaggatttggaccctgaggtgttccagaggctagtgatcacagctcgctccattgccatcatgcgccccaacaaccttgtccactttacggagtcaaagctgccccagatggaaacagactgtttttttcctagatgtgcctgctggagtctagggatagttggcatattgattggggccccacttgaaactccctccccaggcaagcttccttgacctgagttaaccttaaaacaaattaaattccatctcagatttaccatcgttgataattttctttctcctgcttagaaggaatggatgaagggaaggaaccgcagaagcagttggaaggagattgctgtagtttcatcacccagcttgtgaaccacttctggaaactccatgcatccaaacccaagaatgccttcttggcacctgcctgccttccaggactaactcatattgaagctactgtcaatgctctggtggacatcatccatggctactgtacctgtgagctggattgtattaacacagcatccaagatctacatgcagatgctcttgtgtcctgatcctgctgtgagcttctcttgtaaacaagctctaattcgagtcctaaggcccaggaacaaacggagacatgtgactttaccctcttcccctcgaagcaacactccaatgggagacaaggatgatgatgacgatgatgatgcagatgagaaaatgcagtcatcagggatcccgaatggtggtcacatccgtcaggaaagccaggaacagagtgaggtggaccatggagattttgagatggtgtctgagtcgatggtcctggagacagctgaaaatgtcaacaatggcaacccctctcccctggaggccctgctggcaggcgcagagggcttcccccccatgctggacatcccacctgatgcagatgacgagaccatggttgaactagccattgccctgagcctgcagcaggaccaacaaggcagcagcagcagtgccctgggcctgcagagcctgggactgtccggccaggcacccagctcttcctctctggacgcaggaaccctctctgacaccacagcatcagctccagcctcagacgacgagggcagtacagcagcgacagatggttctacccttcggacctctcctgctgaccacggtggtagtgtgggctcggagagcgggggcagtgcagtggactcagtggctggcgagcacagtgtatctggccggagcagtgcttatggcgatgctacagctgaggggcatccggctggaccaggaagtgtcagctcaagcactggagccatcagcaccaccactgggcaccaggagggagatggctccgagggagaaggagaaggagaaactgaaggagatgtccacactagcaacaggctgcacatggtccgtctaatgctgttggagagattactgcagaccctgcctcaattacgaaacgttggcggtgtccgggccatcccatacatgcaggtcattctaatgctcactacagatctggatggagaagatgagaaagacaagggggccctagacaacctgctctcccagcttattgctgagttgggtatggataaaaaggatgtctccaagaagaatgagcgcagcgccctgaatgaagtccatctggtagtaatgagactcctgagtgtcttcatgtcccgcaccaaatctggatccaagtcttccatatgtgagtcatcttccctcatctccagtgccacagcagcagctctactgagctctggggctgtggactactgcctgcacgtgctcaaatcactgctggaatattggaagagccaacagaatgacgaggagcctgtggctaccagccagttgctgaaaccacatactacctcctccccacctgacatgagcccattctttctccgccagtatgtgaagggtcatgctgctgatgtgtttgaggcctatactcagcttctaacagaaatggtactgaggcttccttaccaaatcaaaaagattactgacaccaattctcgaatcccacctcctgtctttgaccactcgtggttttactttctctccgagtacctcatgatccagcagactccatttgtgcgccgtcaagtccgcaaacttctgctcttcatctgtggatccaaagagaagtaccgccagctccgggatttgcacaccctggactctcacgtgcgtgggatcaagaagctgctagaagagcaggggatattcctccgggcaagtgtggttacagccagctcaggctccgccttgcaatatgacacactcatcagcctgatggagcacctgaaagcctgtgcagagattgccgcccagcgaaccatcaactggcagaaattctgcatcaaagatgactccgtcctgtacttcctcctccaagtcagtttccttgtggatgagggcgtgtccccagtgctgctgcaactgctctcctgtgctctctgcggcagcaaggtgctcgctgcactggcagcctcttcgggatcctccagtgcttcttcctcctcagcccctgtggctgccagttctggacaagccacaacacagtccaagtcttccactaaaaagagcaagaaagaagaaaaagaaaaggagaaagatggtgagacctctggcagccaggaggaccagctgtgcacagctctggtgaaccagctgaacaaatttgccgataaggaaaccctgatccagttcctgcgttgtttcctgttagagtccaattcttcctcggtgcgctggcaggcccactgtctgacactgcacatctacagaaattccagcaaatctcaacaggagctcctgctagatctgatgtggtccatctggccagaactcccagcctatggtcgtaaggctgcccagtttgtggacctactaggatatttctccctgaaaactccacaaacagagaagaagttgaaggagtattcacagaaggctgtggagattctgcggactcaaaaccatattcttaccaaccaccccaactcgaacatttataacactttgtctggcttagtggagtttgatggctattacctggagagcgatccctgcctggtgtgtaataacccggaagtaccgttctgttatatcaagctgtcttccattaaagtggacacgcggtacaccaccacccagcaggttgtgaagctcattggcagtcacaccatcagcaaagtgacagtgaaaatcggggatctgaaacggaccaagatggtgcggaccatcaacctgtattataacaaccgaaccgtgcaggccatcgtggagttgaaaaacaagccagctcgctggcacaaagccaagaaggttcagctgacccctggacagacagaggtgaagattgacctgccgttgcccattgtggcctccaatctgatgattgagtttgcagacttctatgaaaactaccaggcctccacagagaccctgcagtgccctcgctgtagtgcctcggtccctgccaacccaggagtctgtggcaactgtggagagaatgtgtaccagtgtcacaaatgcagatccatcaactacgatgaaaaggatcccttcctctgcaatgcctgtggcttctgtaaatatgcccgcttcgacttcatgctctatgccaagccttgctgtgcagtggatcccattgagaatgaagaagaccggaagaaggctgtatccaacatcaatacacttttggacaaagctgatcgagtgtatcatcagctgatgggacaccggccacagctggagaacctgctctgcaaagtgaatgaggcagctccagaaaagccacaggatgactcaggaacagcagggggcatcagctccacttctgccagtgtgaatcgttacatcctgcagttggctcaggagtattgtggagactgcaagaactcttttgatgaactctccaaaatcatccagaaagtctttgcttcgcgcaaagagttgttggaatatgacctacagcagagggaagcagccactaaatcatcccggacctccgtgcagcccacattcactgccagccagtaccgtgccttatccgtcctgggctgtggccacacatcctccaccaagtgctatggctgcgcctcggctgtcacagaacattgtatcacactacttcgggccctggccaccaacccagccttgaggcacatccttgtctcccagggccttatccgggagctctttgattataatcttcgccgaggggctgcggccatgcgggaggaggtccgccagctcatgtgcctcctaactcgagacaacccagaagccacccaacagatgaatgacctgattattggcaaggtctccacagccctgaagggccactgggccaaccccgatctggcaagtagcctgcagtatgaaatgctgctgctgacggattctatctccaaggaggacagctgctgggagctccggttacgctgtgctctcagccttttcctcatggctgtgaacattaagactcctgtggtggttgaaaacattaccctcatgtgcctgaggatcttgcagaagctgataaaaccacctgctcccactagcaagaagaacaaggatgtccccgtcgaggccctcaccacggtgaagccatactgcaatgagatccatgcccaggctcaactgtggctcaagagagaccccaaggcatcctatgatgcctggaagaagtgtcttcctatcagagggatagatggcaatgggaaagcccccagcaaatcagagctccgccatctctatttgactgagaagtatgtgtggaggtggaaacagttcctgagtcgtcgggggaagaggacctcccccttggatctcaaactggggcataacaactggctgcgacaagtgcttttcactccagcaacgcaggccgcacggcaggcagcctgtaccattgtggaagctctagccaccattcccagccgcaagcagcaggtcctggacctgcttaccagttacctggatgagctgagcatagctggggagtgtgcagctgagtacctggctctctaccagaagctcatcacttctgcgcactggaaagtctacttggcagctcggggagtcctaccctatgtgggcaacctcatcaccaaggaaatagctcgtctgctggccctggaggaggctaccctgagtaccgatctgcagcagggttatgcccttaaaagtctcacaggccttctctcctcctttgttgaggtggaatccatcaaaagacattttaaaagtcgcttggtgggtactgtgctgaatggatacctgtgcttgcggaagctggtggtgcagaggaccaagctgatcgatgagacgcaggacatgctgctggagatgctggaggacatgaccacaggtacagaatcagaaaccaaggccttcatggctgtgtgcattgagacagccaagcgctacaatctggatgactaccggaccccggtgttcatcttcgagaggctctgcagcatcatttatcctgaggagaatgaagtcactgagttctttgtgaccctggagaaggatccccaacaagaagacttcttacagggcaggatgcctgggaacccgtatagcagcaatgagccaggcatcgggccgctgatgagggatataaagaacaagatttgccaggactgtgacttagtggccctcctggaagatgacagtggcatggagcttctagtgaacaataaaatcattagtttggaccttcctgtggctgaagtttacaagaaagtctggtgtaccacgaatgagggagagcccatgaggattgtttatcgtatgcgggggctgctgggcgatgccacagaggagttcattgagtccctggactctactacagatgaagaagaagatgaagaagaagtgtataaaatggctggtgtgatggcccagtgtgggggcctggaatgcatgcttaacagactcgcagggatcagagatttcaagcagggacgccaccttctaacagtgctactgaaattgttcagttactgcgtgaaggtgaaagtcaaccggcagcaactggtcaaactggaaatgaacaccttgaacgtcatgctggggaccctaaacctggcccttgtagctgaacaagaaagcaaggacagtgggggtgcagctgtggctgagcaggtgcttagcatcatggagatcattctagatgagtccaatgctgagcccctgagtgaggacaagggcaacctcctcctgacaggtgacaaggatcaactggtgatgctcttggaccagatcaacagcacctttgttcgctccaaccccagtgtgctccagggcctgcttcgcatcatcccgtacctttcctttggagaggtggagaaaatgcagatcttggtggagcgattcaaaccatactgcaactttgataaatatgatgaagatcacagtggtgatgataaagtcttcctggactgcttctgtaaaatagctgctggcatcaagaacaacagcaatgggcaccagctgaaggatctgattctccagaaggggatcacccagaatgcacttgactacatgaaaaagcacatccctagcgccaagaatttggatgccgacatctggaaaaagtttttgtctcgcccagccttgccatttatcctaaggctgcttcggggcctggccatccagcaccctggcacccaggttctgattggaactgattccatcccgaacctgcataagctggagcaggtgtccagtgatgagggcattgggaccttggcagagaacctgctggaagccctgcgggaacaccctgacgtaaacaagaagattgacgcagcccgcagggagacccgggcagagaagaaacgcatggccatggcaatgaggcagaaggccctgggcaccctgggcatgacgtgatcgaggagcctggcctcacgtgctgcatctgcagggagggatacaagttccagcccacaaaggtcctgggcatttataccttcacgaagcgggtagccttggaggagttggagaataagccccggaaacagcagggctacagcaccgtgtcccacttcaacattgtgcactacgactgccatctggctgccgtcaggttggctcgaggccgggaagagtgggagagtgccgccctgcagaatgccaacaccaagtgcaacgggctccttccggtctggggacctcatgtccctgaatcagcttttgccacttgcttggcaagacacaacacttacctccaggaatgtacaggccagcgggagcccacgtatcagctcaacatccacgacatcaaactgctcttcctgcgcttcgccatggagcagtcgttcagcgcagacactggcgggggcggccgggagagcaacatccacctgatcccgtacatcattcacactgtgctttacgtcctgaacacaacccgagcaacttcccgagaagagaagaacctccaaggctttctggaacagcccaaggagaagtgggtggagagtgcctttgaagtggacgggccctactatttcacagtcttggcccttcacatcctgccccctgagcagtggagagccacacgtgtggaaatcttgcggaggctgttggtgacctcgcaggctcgggcagtggctccaggtggagccaccaggctgacagataaggcagtgaaggactattccgcttaccgttcttcccttctcttttgggccctcgtcgatctcatttacaacatgtttaagaaggtgcctaccagtaacacagagggaggctggtcctgctctctcgctgagtacatccgccacaacgacatgcccatctacgaagctgccgacaaagccctgaaaaccttccaggaggagttcatgccagtggagaccttctcagagttcctcgatgtggccggtcttttatcagaaatcaccgatccagagagcttcctgaaggacctgttgaactcagtcccctgaccaccacacagcagctgcggcggcgaagacgaagctggcttgccttccaccctctgttctccctccttgtgcattaagttccctccgcgggatgctgcattgttaccccgccctcccctctctcatttttcttggtgtggcttggggtttttaggcttcctgttttatctcgtgtgtgtggtgcaccagctatgaggttgtctgtaacccaagccatcaaagggcctgtacatacctaggagccatgagttgtcccggccagcttcatacttgagtgtgcacatcttgagaaataaacaagtgacttaacacacattgaaaa

SEQ ID NO: 356699 - DNA, 2668 bp, Homo sapiens
cgccgacttctccgcaacaagttccctcaatcaaggccatgttgtccatcgatgtagccgaatgaagggcgctggtggcctcccgtacaaacatcggacaacacggagcagggagagctcaccatggaatcaacccccctgctcgctgctcacgtaccttcatcacttttagtgatgatgcaactttcgaggaatggttcccccaagggcggcccccaaaagtccctgttcgtgaggtctgtccagtgacccatcgtccagccctataccgggaccctgttacagacataccctatgccactgctcgagccttcaagatcattcgtgaggcttacaagaagtacattactgcccatggactgccgcccactgcctcagccaacaagcgcctggaggcgcttgctggggaccctaaacctggcccttgtagctgaacaagaaagcaaggacagtgggggtgcagctgtggctgagcaggtgcttagcatcatggagatcattctagatgagtccaatgctgagcccctgagtgaggacaagggcaacctcctcctgacaggtgacaaggatcaactggtgatgctcttggaccagatcaacagcacctttgttcgctccaaccccagtgtgctccagggcctgcttcgcatcatcccgtacctttcctttggagaggtggagaaaatgcagatcttggtggagcgattcaaaccatactgcaactttgataaatatgatgaagatcacagtggtgatgataaagtcttcctggactgcttctgtaaaatagctgctggcatcaagaacaacagcaatgggcaccagctgaaggatctgattctccagaaggggatcacccagaatgcacttgactacatgaaaaagcacatccctagcgccaagaatttggatgccgacatctggaaaaagtttttgtctcgcccagccttgccatttatcctaaggctgcttcggggcctggccatccagcaccctggcacccaggttctgattggaactgattccatcccgaacctgcataagctggagcaggtgtccagtgatgagggcattgggaccttggcagagaacctgctggaagccctgcgggaacaccctgacgtaaacaagaagattgacgcagcccgcagggagacccgggcagagaagaaacgcatggccatggcaatgaggcagaaggccctgggcaccctgggcatgacgacaaatgaaaagggccaggtcgtgaccaagacagcactcctgaagcagatggaagagctgatcgaggagcctggcctcacgtgctgcatctgcagggagggatacaagttccagcccacaaaggtcctgggcatttataccttcacgaagcgggtagccttggaggagttggagaataagccccggaaacagcagggctacagcaccgtgtcccacttcaacattgtgcactacgactgccatctggctgccgtcaggttggctcgaggccgggaagagtgggagagtgccgccctgcagaatgccaacaccaagtgcaacgggctccttccggtctggggacctcatgtccctgaatcagcttttgccacttgcttggcaagacacaacacttacctccaggaatgtacaggccagcgggagcccacgtatcagctcaacatccacgacatcaaactgctcttcctgcgcttcgccatggagcagtcgttcagcgcagacactggcgggggcggccgggagagcaacatccacctgatcccgtacatcattcacactgtgctttacgtcctgaacacaacccgagcaacttcccgagaagagaagaacctccaaggctttctggaacagcccaaggagaagtgggtggagagtgcctttgaagtggacgggccctactatttcacagtcttggcccttcacatcctgccccctgagcagtggagagccacacgtgtggaaatcttgcggaggctgttggtgacctcgcaggctcgggcagtggctccaggtggagccaccaggctgacagataaggcagtgaaggactattccgcttaccgttcttcccttctcttttgggccctcgtcgatctcatttacaacatgtttaagaaggtgcctaccagtaacacagagggaggctggtcctgctctctcgctgagtacatccgccacaacgacatgcccatctacgaagctgccgacaaagccctgaaaaccttccaggaggagttcatgccagtggagaccttctcagagttcctcgatgtggccggtcttttatcagaaatcaccgatccagagagcttcctgaaggacctgttgaactcagtcccctgaccaccacacagcagctgcggcggcgaagacgaagctggcttgccttccaccctctgttctccctccttgtgcattaagttccctccgcgggatgctgcattgttaccccgccctcccctctctcatttttcttggtgtggcttggggtttttaggcttcctgttttatctcgtgtgtgtggtgcaccagctatgaggttgtctgtaacccaagccatcaaagggcctgtacatacctaggagccatgagttgtcccggccagcttcatacttgagtgtgcacatcttgagaaataaacaagtgacttaacacacattgaaaa

SEQ ID NO: 356700 - DNA, 12731 bp, Homo sapiens
gtgacctagaggttccgccacaagcgcgatctcaaaggtccaggtctctttggatgagcatttttctaagatggctgctgagactgatcctcataagtcgtctgagattaccaagaacctacttccagccacgctgcaactcattgacacctatgcatcgttcaccagagcctatttgctgcaaaactttaatgaagagggaacaactgagaaaccttccaaggagaaactgcaaggctttgctgctgttttggctattggctctagcaggtgcaaggcaaatactctgggtccgacactggttcagaatttgccatcgtcagtgcagactgtgtgtgagtcctggaacaacatcaataccaatgaatttcccaatattggatcctggcgcaatgcctttgccaatgacaccatcccttcagagagttatattagtgcagtgcaggctgcacacctggggactctctgtagccaaagtctgcccctggctgcttccctgaagcataccctcctctcactggtcaggttgactggagatcttattgtttggtcagatgagatgaacccaccacaggtaattcggacactgctacctcttcttttggaatcaagcactgagagtgttgccgagatcagtagcaactccctggaacgcatcttgggccctgctgagtctgatgagttcttggctcgtgtttatgagaagctgatcactggttgttacaacattctggccaatcatgcagatcctaacagtggactggatgaatccatcctggaggaatgtctccagtacttggaaaagcagctggaaagtagccaggctcgtaaagctatggaggagtttttctctgacagtggagaacttgtacagatcatgatggcaacagccaatgagaacctctctgctaaattctgtaaccgagttttgaaattcttcaccaaactcttccagctgactgagaagagccctaacccgagcctgttgcatctctgtggctccctggcacaactggcctgtgtggaacctgtgcgcctgcaggcctggctcacccgcatgactacatcgcccccaaaagattctgatcagctggatgtaattcaggagaaccggcagctgctgcagttactgaccacatacattgttcgggaaaacagccaagttggggaaggtgtgtgtgctgttcttctgggcaccctgactcccatggcaacagagatgctggccaacggtgatgggactggcttccctgaacttatggttgtgatggccactctggccagtgcaggtcaaggtgctggtcaccttcagcttcataatgctgctgtggattggctgagcagatgcaagaaatacctgtcacagaagaatgtagttgaaaaactgaatgccaatgtaatgcatggaaagcatgtgatgatcttggagtgcacatgccatatcatgtcttacttggctgatgtcacgaatgccctgagccagagtaatggtcaaggcccaagtcatctctcagtggatggggaagagcgggccattgaagtagactcagactgggtggaggagttggcggtggaagaggaagattcccaggctgaggattcagatgaagattctctttgcaataaactctgcacttttacgatcacacagaaagaattcatgaaccagcattggtaccactgtcacacctgtaaaatggtggatggcgtgggtgtctgcacagtgtgtgctaaggtgtgccacaaggatcatgagatttcctatgccaagtatggatccttcttctgtgactgtggagccaaggaagatggcagctgtttggctctggtgaagagaactcctagcagtggcatgagctctaccatgaaggagtcggcatttcagagtgaacccaggatttcagagagtctagtgcgtcatgccagcacctcctcgccagctgacaaagccaaggttaccatcagtgatggaaaggttgctgacgaagagaagcccaagaagagcagcctctgccgcacagtagagggctgccgggaggaattacagaaccaggccaatttctccttcgctcctctcgtgttagacatgcttaatttccttatggatgccattcagaccaacttccagcaagcttcagccgtcgggagcagcagccgtgctcagcaagccctcagtgagctacacactgtggagaaggcagtggagatgacagaccagctgatggttcccaccttagggtcccaggaaggtgcctttgagaatgtgcggatgaattacagtggagaccagggccagaccatccggcagctgatcagtgctcatgtgctcaggcgggtggctatgtgtgtgctctcctctccccatgggcgccgccaacatttggctgtcagccatgagaagggcaagatcaccgttctgcagctctctgcactcctgaagcaagcagattccagcaaaaggaagttaactctgacccgcttggcttctgccccagttccttttactgtgttgagcctcacaggaaatccctgcaaggaagactacttggcggtttgtgggctaaaggactgtcatgtgctcacctttagtagctcaggctctgtttcggatcacttggttttgcaccctcagttggcaacggggaacttcatcatcaaagccgtgtggttacctggttcacagaccgagttagcaattgtcaccgcagactttgttaagatttatgacctgtgtgttgatgccttgagtccaaccttctattttctcctgccaagctcaaagataagagatgttaccttccttttcaatgaggagggaaagaacatcattgttataatgtcttcggctgggtacatctatactcagcttatggaagaggccagcagtgcccagcagggacccttctatgtcactaatgtgttggaaatcaatcatgaggacctgaaggacagtaacagccaggtggcgggcggtggtgtgtccgtgtactactcccacgtgttgcagatgttgttcttcagctattgtcaaggcaaatcattcgcagccaccatcagcaggacaaccctggaggtgttgcaactcttccccatcaacatcaaaagttccaatggtggcagtaagacttctcctgctctttgccagtggtctgaggtgatgaaccaccctggcttggtgtgctgtgtccagcaaactacaggggtgccgctggtagttatggtgaaaccagacacttttcttatccaggagattaagactcttcctgctaaagcgaagatccaagacatggttgctattaggcacacggcctgcaatgagcagcagcggacaacaatgattctgctgtgtgaggatggcagcctgcgcatttacatggccaacgtggagaacacctcctactggctgcagccatccctgcagcccagcagtgtcatcagcatcatgaagcctgttcgaaagcgcaaaacagctacaatcacaacccgcacgtctagccaggtgactttccccattgacttttttgaacacaaccagcagctgacagatgtggagtttggtggtaacgacctcctacaggtctataatgcacaacagataaaacaccggctgaattccactggcatgtatgtggccaacaccaagcccggaggcttcaccattgagattagtaacaacaatagcactatggtgatgacaggcatgcggatccagattgggactcaagcaatagaacgggccccgtcatatatcgagatcttcggcagaactatgcagctcaacctgagtcgctcacgctggtttgacttccccttcaccagagaagaagccctgcaggctgataagaagctgaacctcttcattggggcctcggtggatccagcaggtgtcaccatgatagatgctgtaaaaatttatggcaagactaaggagcagtttggctggcctgatgagcccccagaagaattcccttctgcctctgtcagcaacatctgcccttcaaatctgaaccagagcaacggcactggagatagcgactcagctgcccccactacgaccagtggaactgtcctggagaggctggttgtgagttctttagaagccctggaaagctgctttgccgttggcccaatcatcgagaaggagagaaacaagaatgctgctcaggagctggccactttgctgttgtccctgccagcacctgccagtgtccagcagcagtccaagagccttctggccagcctgcacaccagccgctcggcctaccacagccacaaggatcaggccttgctgagcaaagctgtgcagtgtctcaacacatctagcaaagagggcaaggatttggaccctgaggtgttccagaggctagtgatcacagctcgctccattgccatcatgcgccccaacaaccttgtccactttacggagtcaaagctgccccagatggaaacagactgtttttttcctagatgtgcctgctggagtctagggatagttggcatattgattggggccccacttgaaactccctccccaggcaagcttccttgacctgagttaaccttaaaacaaattaaattccatctcagatttaccatcgttgataattttctttctcctgcttagaaggaatggatgaagggaaggaaccgcagaagcagttggaaggagattgctgtagtttcatcacccagcttgtgaaccacttctggaaactccatgcatccaaacccaagaatgccttcttggcacctgcctgccttccaggactaactcatattgaagctactgtcaatgctctggtggacatcatccatggctactgtacctgtgagctggattgtattaacacagcatccaagatctacatgcagatgctcttgtgtcctgatcctgctgtgagcttctcttgtaaacaagctctaattcgagtcctaaggcccaggaacaaacggagacatgtgactttaccctcttcccctcgaagcaacactccaatgggagacaaggatgatgatgacgatgatgatgcagatgagaaaatgcagtcatcagggatcccgaatggtggtcacatccgtcaggaaagccaggaacagagtgaggtggaccatggagattttgagatggtgtctgagtcgatggtcctggagacagctgaaaatgtcaacaatggcaacccctctcccctggaggccctgctggcaggcgcagagggcttcccccccatgctggacatcccacctgatgcagatgacgagaccatggttgaactagccattgccctgagcctgcagcaggaccaacaaggcagcagcagcagtgccctgggcctgcagagcctgggactgtccggccaggcacccagctcttcctctctggacgcaggaaccctctctgacaccacagcatcagctccagcctcagacgacgagggcagtacagcagcgacagatggttctacccttcggacctctcctgctgaccacggtggtagtgtgggctcggagagcgggggcagtgcagtggactcagtggctggcgagcacagtgtatctggccggagcagtgcttatggcgatgctacagctgaggggcatccggctggaccaggaagtgtcagctcaagcactggagccatcagcaccaccactgggcaccaggagggagatggctccgagggagaaggagaaggagaaactgaaggagatgtccacactagcaacaggctgcacatggtccgtctaatgctgttggagagattactgcagaccctgcctcaattacgaaacgttggcggtgtccgggccatcccatacatgcaggtcattctaatgctcactacagatctggatggagaagatgagaaagacaagggggccctagacaacctgctctcccagcttattgctgagttgggtatggataaaaaggatgtctccaagaagaatgagcgcagcgccctgaatgaagtccatctggtagtaatgagactcctgagtgtcttcatgtcccgcaccaaatctggatccaagtcttccatatgtgagtcatcttccctcatctccagtgccacagcagcagctctactgagctctggggctgtggactactgcctgcacgtgctcaaatcactgctggaatattggaagagccaacagaatgacgaggagcctgtggctaccagccagttgctgaaaccacatactacctcctccccacctgacatgagcccattctttctccgccagtatgtgaagggtcatgctgctgatgtgtttgaggcctatactcagcttctaacagaaatggtactgaggcttccttaccaaatcaaaaagattactgacaccaattctcgaatcccacctcctgtctttgaccactcgtggttttactttctctccgagtacctcatgatccagcagactccatttgtgcgccgtcaagtccgcaaacttctgctcttcatctgtggatccaaagagaagtaccgccagctccgggatttgcacaccctggactctcacgtgcgtgggatcaagaagctgctagaagagcaggggatattcctccgggcaagtgtggttacagccagctcaggctccgccttgcaatatgacacactcatcagcctgatggagcacctgaaagcctgtgcagagattgccgcccagcgaaccatcaactggcagaaattctgcatcaaagatgactccgtcctgtacttcctcctccaagtcagtttccttgtggatgagggcgtgtccccagtgctgctgcaactgctctcctgtgctctctgcggcagcaaggtgctcgctgcactggcagcctcttcgggatcctccagtgcttcttcctcctcagcccctgtggctgccagttctggacaagccacaacacagtccaagtcttccactaaaaagagcaagaaagaagaaaaagaaaaggagaaagatggtgagacctctggcagccaggaggaccagctgtgcacagctctggtgaaccagctgaacaaatttgccgataaggaaaccctgatccagttcctgcgttgtttcctgttagagtccaattcttcctcggtgcgctggcaggcccactgtctgacactgcacatctacagaaattccagcaaatctcaacaggagctcctgctagatctgatgtggtccatctggccagaactcccagcctatggtcgtaaggctgcccagtttgtggacctactaggatatttctccctgaaaactccacaaacagagaagaagttgaaggagtattcacagaaggctgtggagattctgcggactcaaaaccatattcttaccaaccaccccaactcgaacatttataacactttgtctggcttagtggagtttgatggctattacctggagagcgatccctgcctggtgtgtaataacccggaagtaccgttctgttatatcaagctgtcttccattaaagtggacacgcggtacaccaccacccagcaggttgtgaagctcattggcagtcacaccatcagcaaagtgacagtgaaaatcggggatctgaaacggaccaagatggtgcggaccatcaacctgtattataacaaccgaaccgtgcaggccatcgtggagttgaaaaacaagccagctcgctggcacaaagccaagaaggttcagctgacccctggacagacagaggtgaagattgacctgccgttgcccattgtggcctccaatctgatgattgagtttgcagacttctatgaaaactaccaggcctccacagagaccctgcagtgccctcgctgtagtgcctcggtccctgccaacccaggagtctgtggcaactgtggagagaatgtgtaccagtgtcacaaatgcagatccatcaactacgatgaaaaggatcccttcctctgcaatgcctgtggcttctgtaaatatgcccgcttcgacttcatgctctatgccaagccttgctgtgcagtggatcccattgagaatgaagaagaccggaagaaggctgtatccaacatcaatacacttttggacaaagctgatcgagtgtatcatcagctgatgggacaccggccacagctggagaacctgctctgcaaagtgaatgaggcagctccagaaaagccacaggatgactcaggaacagcagggggcatcagctccacttctgccagtgtgaatcgttacatcctgcagttggctcaggagtattgtggagactgcaagaactcttttgatgaactctccaaaatcatccagaaagtctttgcttcgcgcaaagagttgttggaatatgacctacagcagagggaagcagccactaaatcatcccggacctccgtgcagcccacattcactgccagccagtaccgtgccttatccgtcctgggctgtggccacacatcctccaccaagtgctatggctgcgcctcggctgtcacagaacattgtatcacactacttcgggccctggccaccaacccagccttgaggcacatccttgtctcccagggccttatccgggagctctttgattataatcttcgccgaggggctgcggccatgcgggaggaggtccgccagctcatgtgcctcctaactcgagacaacccagaagccacccaacagatgaatgacctgattattggcaaggtctccacagccctgaagggccactgggccaaccccgatctggcaagtagcctgcagtatgaaatgctgctgctgacggattctatctccaaggaggacagctgctgggagctccggttacgctgtgctctcagccttttcctcatggctgtgaacattaagactcctgtggtggttgaaaacattaccctcatgtgcctgaggatcttgcagaagctgataaaaccacctgctcccactagcaagaagaacaaggatgtccccgtcgaggccctcaccacggtgaagccatactgcaatgagatccatgcccaggctcaactgtggctcaagagagaccccaaggcatcctatgatgcctggaagaagtgtcttcctatcagagggatagatggcaatgggaaagcccccagcaaatcagagctccgccatctctatttgactgagaagtatgtgtggaggtggaaacagttcctgagtcgtcgggggaagaggacctcccccttggatctcaaactggggcataacaactggctgcgacaagtgcttttcactccagcaacgcaggccgcacggcaggcagcctgtaccattgtggaagctctagccaccattcccagccgcaagcagcaggtcctggacctgcttaccagttacctggatgagctgagcatagctggggagtgtgcagctgagtacctggctctctaccagaagctcatcacttctgcgcactggaaagtctacttggcagctcggggagtcctaccctatgtgggcaacctcatcaccaaggaaatagctcgtctgctggccctggaggaggctaccctgagtaccgatctgcagcagggttatgcccttaaaagtctcacaggccttctctcctcctttgttgaggtggaatccatcaaaagacattttaaaagtcgcttggtgggtactgtgctgaatggatacctgtgcttgcggaagctggtggtgcagaggaccaagctgatcgatgagacgcaggacatgctgctggagatgctggaggacatgaccacaggtacagaatcagaaaccaaggccttcatggctgtgtgcattgagacagccaagcgctacaatctggatgactaccggaccccggtgttcatcttcgagaggctctgcagcatcatttatcctgaggagaatgaagtcactgagttctttgtgaccctggagaaggatccccaacaagaagacttcttacagggcaggatgcctgggaacccgtatagcagcaatgagccaggcatcgggccgctgatgagggatataaagaacaagatttgccaggactgtgacttagtggccctcctggaagatgacagtggcatggagcttctagtgaacaataaaatcattagtttggaccttcctgtggctgaagtttacaagaaagtctggtgtaccacgaatgagggagagcccatgaggattgtttatcgtatgcgggggctgctgggcgatgccacagaggagttcattgagtccctggactctactacagatgaagaagaagatgaagaagaagtgtataaaatggctggtgtgatggcccagtgtgggggcctggaatgcatgcttaacagactcgcagggatcagagatttcaagcagggacgccaccttctaacagtgctactgaaattgttcagttactgcgtgaaggtgaaagtcaaccggcagcaactggtcaaactggaaatgaacaccttgaacgtcatgctggggaccctaaacctggcccttgtagctgaacaagaaagcaaggacagtgggggtgcagctgtggctgagcaggtgcttagcatcatggagatcattctagatgagtccaatgctgagcccctgagtgaggacaagggcaacctcctcctgacaggtgacaaggatcaactggtgatgctcttggaccagatcaacagcacctttgttcgctccaaccccagtgtgctccagggcctgcttcgcatcatcccgtacctttcctttggagaggtggagaaaatgcagatcttggtggagcgattcaaaccatactgcaactttgataaatatgatgaagatcacagtggtgatgataaagtcttcctggactgcttctgtaaaatagctgctggcatcaagaacaacagcaatgggcaccagctgaaggatctgattctccagaaggggatcacccagaatgcacttgactacatgaaaaagcacatccctagcgccaagaatttggatgccgacatctggaaaaagtttttgtctcgcccagccttgccatttatcctaaggctgcttcggggcctggccatccagcaccctggcacccaggttctgattggaactgattccatcccgaacctgcataagctggagcaggtgtccagtgatgagggcattgggaccttggcagagaacctgctggaagccctgcgggaacaccctgacgtaaacaagaagattgacgcagcccgcagggagacccgggcagagaagaaacgcatggccatggcaatgaggcagaaggccctgggcaccctgggcatgacgacaaatgaaaagggccaggtcgtgaccaagacagcactcctgaagcagatggaagagctgatcgaggagcctggcctcacgtgctgcatctgcagggagggatacaagttccagcccacaaaggtcctgggcatttataccttcacgaagcgggtagccttggaggagttggagaataagccccggaaacagcagggctacagcaccgtgtcccacttcaacattgtgcactacgactgccatctggctgccgtcaggttggctcgaggccgggaagagtgggagagtgccgccctgcagaatgccaacaccaagtgcaacgggctccttccggtctggggacctcatgtccctgaatcagcttttgccacttgcttggcaagacacaacacttacctccaggaatgtacaggccagcgggagcccacgtatcagctcaacatccacgacatcaaactgctcttcctgcgcttcgccatggagcagtcgttcagcgcagacactggcgggggcggccgggagagcaacatccacctgatcccgtacatcattcacactgtgctttacgtcctgaacacaacccgagcaacttcccgagaagagaagaacctccaaggctttctggaacagcccaaggagaagtgggtggagagtgcctttgaagtggacgggccctactatttcacagtcttggcccttcacatcctgccccctgagcagtggagagccacacgtgtggaaatcttgcggaggctgttggtgacctcgcaggctcgggcagtggctccaggtggagccaccaggctgacagataaggcagtgaaggactattccgcttaccgttcttcccttctcttttgggccctcgtcgatctcatttacaacatgtttaagaaggtgcctaccagtaacacagagggaggctggtcctgctctctcgctgagtacatccgccacaacgacatgcccatctacgaagctgccgacaaagccctgaaaaccttccaggaggagttcatgccagtggagaccttctcagagttcctcgatgtggccggtcttttatcagaaatcaccgatccagagagcttcctgaaggacctgttgaactcagtcccctgaccaccacacagcagctgcggcggcgaagacgaagctggcttgccttccaccctctgttctccctccttgtgcattaagttccctccgcgggatgctgcattgttaccccgccctcccctctctcatttttcttggtgtggcttggggtttttaggcttcctgttttatctcgtgtgtgtggtgcaccagctatgaggttgtctgtaacccaagccatcaaagggcctgtacatacctaggagccatgagttgtcccggccagcttcatacttgagtgtgcacatcttgagaaataaacaagtgacttaacacacattgaaaacttaccccccttgcccccttcccctctcacctccacc

SEQ ID NO: 356701 - DNA, 1993 bp, Homo sapiens
cagagtggagaaacccacgctgctgaggctagcgatcccgtatcaccgagcatctaaaggacccctcgaatgctcgtgtgtcgtgggagatgcctgtctcgctggacacaacgtcgtctgcgctcaaccaacaacagcaatgggcaccagctgaaggatctgattctccagaaggggatcacccagaatgcacttgactacatgaaaaagcacatccctagcgccaagaatttggatgccgacatctggaaaaagtttttgtctcgcccagccttgccatttatcctaaggctgcttcggggcctggccatccagcaccctggcacccaggttctgattggaactgattccatcccgaacctgcataagctggagcaggtgtccagtgatgagggcattgggaccttggcagagaacctgctggaagccctgcgggaacaccctgacgtaaacaagaagattgacgcagcccgcagggagacccgggcagagaagaaacgcatggccatggcaatgaggcagaaggccctgggcaccctgggcatgacgacaaatgaaaagggccaggtcgtgaccaagacagcactcctgaagcagatggaagagctgatcgaggagcctggcctcacgtgctgcatctgcagggagggatacaagttccagcccacaaaggtcctgggcatttataccttcacgaagcgggtagccttggaggagttggagaataagccccggaaacagcagggctacagcaccgtgtcccacttcaacattgtgcactacgactgccatctggctgccgtcaggttggctcgaggccgggaagagtgggagagtgccgccctgcagaatgccaacaccaagtgcaacgggctccttccggtctggggacctcatgtccctgaatcagcttttgccacttgcttggcaagacacaacacttacctccaggaatgtacaggccagcgggagcccacgtatcagctcaacatccacgacatcaaactgctcttcctgcgcttcgccatggagcagtcgttcagcgcagacactggcgggggcggccgggagagcaacatccacctgatcccgtacatcattcacactgtgctttacgtcctgaacacaacccgagcaacttcccgagaagagaagaacctccaaggctttctggaacagcccaaggagaagtgggtggagagtgcctttgaagtggacgggccctactatttcacagtcttggcccttcacatcctgccccctgagcagtggagagccacacgtgtggaaatcttgcggaggctgttggtgacctcgcaggctcgggcagtggctccaggtggagccaccaggctgacagataaggcagtgaaggactattccgcttaccgttcttcccttctcttttgggccctcgtcgatctcatttacaacatgtttaagaaggtgcctaccagtaacacagagggaggctggtcctgctctctcgctgagtacatccgccacaacgacatgcccatctacgaagctgccgacaaagccctgaaaaccttccaggaggagttcatgccagtggagaccttctcagagttcctcgatgtggccggtcttttatcagaaatcaccgatccagagagcttcctgaaggacctgttgaactcagtcccctgaccaccacacagcagctgcggcggcgaagacgaagctggcttgccttccaccctctgttctccctccttgtgcattaagttccctccgcgggatgctgcattgttaccccgccctcccctctctcatttttcttggtgtggcttggggtttttaggcttcctgttttatctcgtgtgtgtggtgcaccagctatgaggttgtctgtaacccaagccatcaaagggcctgtacatacctaggagccatgagttgtcccggccagcttcatacttgagtgtgcacatcttgagaaataaacaagtgacttaacacacattgaaaa

SEQ ID NO: 356702 - DNA, 12647 bp, Homo sapiens
gtgacctagaggttccgccacaagcgcgatctcaaaggtccaggtctctttggatgagcatttttctaagatggctgctgagactgatcctcataagtcgtctgagattaccaagaacctacttccagccacgctgcaactcattgacacctatgcatcgttcaccagagcctatttgctgcaaaactttaatgaagagggaacaactgagaaaccttccaaggagaaactgcaaggctttgctgctgttttggctattggctctagcaggtgcaaggcaaatactctgggtccgacactggttcagaatttgccatcgtcagtgcagactgtgtgtgagtcctggaacaacatcaataccaatgaatttcccaatattggatcctggcgcaatgcctttgccaatgacaccatcccttcagagagttatattagtgcagtgcaggctgcacacctggggactctctgtagccaaagtctgcccctggctgcttccctgaagcataccctcctctcactggtcaggttgactggagatcttattgtttggtcagatgagatgaacccaccacaggtaattcggacactgctacctcttcttttggaatcaagcactgagagtgttgccgagatcagtagcaactccctggaacgcatcttgggccctgctgagtctgatgagttcttggctcgtgtttatgagaagctgatcactggttgttacaacattctggccaatcatgcagatcctaacagtggactggatgaatccatcctggaggaatgtctccagtacttggaaaagcagctggaaagtagccaggctcgtaaagctatggaggagtttttctctgacagtggagaacttgtacagatcatgatggcaacagccaatgagaacctctctgctaaattctgtaaccgagttttgaaattcttcaccaaactcttccagctgactgagaagagccctaacccgagcctgttgcatctctgtggctccctggcacaactggcctgtgtggaacctgtgcgcctgcaggcctggctcacccgcatgactacatcgcccccaaaagattctgatcagctggatgtaattcaggagaaccggcagctgctgcagttactgaccacatacattgttcgggaaaacagccaagttggggaaggtgtgtgtgctgttcttctgggcaccctgactcccatggcaacagagatgctggccaacggtgatgggactggcttccctgaacttatggttgtgatggccactctggccagtgcaggtcaaggtgctggtcaccttcagcttcataatgctgctgtggattggctgagcagatgcaagaaatacctgtcacagaagaatgtagttgaaaaactgaatgccaatgtaatgcatggaaagcatgtgatgatcttggagtgcacatgccatatcatgtcttacttggctgatgtcacgaatgccctgagccagagtaatggtcaaggcccaagtcatctctcagtggatggggaagagcgggccattgaagtagactcagactgggtggaggagttggcggtggaagaggaagattcccaggctgaggattcagatgaagattctctttgcaataaactctgcacttttacgatcacacagaaagaattcatgaaccagcattggtaccactgtcacacctgtaaaatggtggatggcgtgggtgtctgcacagtgtgtgctaaggtgtgccacaaggatcatgagatttcctatgccaagtatggatccttcttctgtgactgtggagccaaggaagatggcagctgtttggctctggtgaagagaactcctagcagtggcatgagctctaccatgaaggagtcggcatttcagagtgaacccaggatttcagagagtctagtgcgtcatgccagcacctcctcgccagctgacaaagccaaggttaccatcagtgatggaaaggttgctgacgaagagaagcccaagaagagcagcctctgccgcacagtagagggctgccgggaggaattacagaaccaggccaatttctccttcgctcctctcgtgttagacatgcttaatttccttatggatgccattcagaccaacttccagcaagcttcagccgtcgggagcagcagccgtgctcagcaagccctcagtgagctacacactgtggagaaggcagtggagatgacagaccagctgatggttcccaccttagggtcccaggaaggtgcctttgagaatgtgcggatgaattacagtggagaccagggccagaccatccggcagctgatcagtgctcatgtgctcaggcgggtggctatgtgtgtgctctcctctccccatgggcgccgccaacatttggctgtcagccatgagaagggcaagatcaccgttctgcagctctctgcactcctgaagcaagcagattccagcaaaaggaagttaactctgacccgcttggcttctgccccagttccttttactgtgttgagcctcacaggaaatccctgcaaggaagactacttggcggtttgtgggctaaaggactgtcatgtgctcacctttagtagctcaggctctgtttcggatcacttggttttgcaccctcagttggcaacggggaacttcatcatcaaagccgtgtggttacctggttcacagaccgagttagcaattgtcaccgcagactttgttaagatttatgacctgtgtgttgatgccttgagtccaaccttctattttctcctgccaagctcaaagataagagatgttaccttccttttcaatgaggagggaaagaacatcattgttataatgtcttcggctgggtacatctatactcagcttatggaagaggccagcagtgcccagcagggacccttctatgtcactaatgtgttggaaatcaatcatgaggacctgaaggacagtaacagccaggtggcgggcggtggtgtgtccgtgtactactcccacgtgttgcagatgttgttcttcagctattgtcaaggcaaatcattcgcagccaccatcagcaggacaaccctggaggtgttgcaactcttccccatcaacatcaaaagttccaatggtggcagtaagacttctcctgctctttgccagtggtctgaggtgatgaaccaccctggcttggtgtgctgtgtccagcaaactacaggggtgccgctggtagttatggtgaaaccagacacttttcttatccaggagattaagactcttcctgctaaagcgaagatccaagacatggttgctattaggcacacggcctgcaatgagcagcagcggacaacaatgattctgctgtgtgaggatggcagcctgcgcatttacatggccaacgtggagaacacctcctactggctgcagccatccctgcagcccagcagtgtcatcagcatcatgaagcctgttcgaaagcgcaaaacagctacaatcacaacccgcacgtctagccaggtgactttccccattgacttttttgaacacaaccagcagctgacagatgtggagtttggtggtaacgacctcctacaggtctataatgcacaacagataaaacaccggctgaattccactggcatgtatgtggccaacaccaagcccggaggcttcaccattgagattagtaacaacaatagcactatggtgatgacaggcatgcggatccagattgggactcaagcaatagaacgggccccgtcatatatcgagatcttcggcagaactatgcagctcaacctgagtcgctcacgctggtttgacttccccttcaccagagaagaagccctgcaggctgataagaagctgaacctcttcattggggcctcggtggatccagcaggtgtcaccatgatagatgctgtaaaaatttatggcaagactaaggagcagtttggctggcctgatgagcccccagaagaattcccttctgcctctgtcagcaacatctgcccttcaaatctgaaccagagcaacggcactggagatagcgactcagctgcccccactacgaccagtggaactgtcctggagaggctggttgtgagttctttagaagccctggaaagctgctttgccgttggcccaatcatcgagaaggagagaaacaagaatgctgctcaggagctggccactttgctgttgtccctgccagcacctgccagtgtccagcagcagtccaagagccttctggccagcctgcacaccagccgctcggcctaccacagccacaaggatcaggccttgctgagcaaagctgtgcagtgtctcaacacatctagcaaagagggcaaggatttggaccctgaggtgttccagaggctagtgatcacagctcgctccattgccatcatgcgccccaacaaccttgtccactttacggagtcaaagctgccccagatggaaacagactgtttttttcctagatgtgcctgctggagtctagggatagttggcatattgattggggccccacttgaaactccctccccaggcaagcttccttgacctgagttaaccttaaaacaaattaaattccatctcagatttaccatcgttgataattttctttctcctgcttagaaggaatggatgaagggaaggaaccgcagaagcagttggaaggagattgctgtagtttcatcacccagcttgtgaaccacttctggaaactccatgcatccaaacccaagaatgccttcttggcacctgcctgccttccaggactaactcatattgaagctactgtcaatgctctggtggacatcatccatggctactgtacctgtgagctggattgtattaacacagcatccaagatctacatgcagatgctcttgtgtcctgatcctgctgtgagcttctcttgtaaacaagctctaattcgagtcctaaggcccaggaacaaacggagacatgtgactttaccctcttcccctcgaagcaacactccaatgggagacaaggatgatgatgacgatgatgatgcagatgagaaaatgcagtcatcagggatcccgaatggtggtcacatccgtcaggaaagccaggaacagagtgaggtggaccatggagattttgagatggtgtctgagtcgatggtcctggagacagctgaaaatgtcaacaatggcaacccctctcccctggaggccctgctggcaggcgcagagggcttcccccccatgctggacatcccacctgatgcagatgacgagaccatggttgaactagccattgccctgagcctgcagcaggaccaacaaggcagcagcagcagtgccctgggcctgcagagcctgggactgtccggccaggcacccagctcttcctctctggacgcaggaaccctctctgacaccacagcatcagctccagcctcagacgacgagggcagtacagcagcgacagatggttctacccttcggacctctcctgctgaccacggtggtagtgtgggctcggagagcgggggcagtgcagtggactcagtggctggcgagcacagtgtatctggccggagcagtgcttatggcgatgctacagctgaggggcatccggctggaccaggaagtgtcagctcaagcactggagccatcagcaccaccactgggcaccaggagggagatggctccgagggagaaggagaaggagaaactgaaggagatgtccacactagcaacaggctgcacatggtccgtctaatgctgttggagagattactgcagaccctgcctcaattacgaaacgttggcggtgtccgggccatcccatacatgcaggtcattctaatgctcactacagatctggatggagaagatgagaaagacaagggggccctagacaacctgctctcccagcttattgctgagttgggtatggataaaaaggatgtctccaagaagaatgagcgcagcgccctgaatgaagtccatctggtagtaatgagactcctgagtgtcttcatgtcccgcaccaaatctggatccaagtcttccatatgtgagtcatcttccctcatctccagtgccacagcagcagctctactgagctctggggctgtggactactgcctgcacgtgctcaaatcactgctggaatattggaagagccaacagaatgacgaggagcctgtggctaccagccagttgctgaaaccacatactacctcctccccacctgacatgagcccattctttctccgccagtatgtgaagggtcatgctgctgatgtgtttgaggcctatactcagcttctaacagaaatggtactgaggcttccttaccaaatcaaaaagattactgacaccaattctcgaatcccacctcctgtctttgaccactcgtggttttactttctctccgagtacctcatgatccagcagactccatttgtgcgccgtcaagtccgcaaacttctgctcttcatctgtggatccaaagagaagtaccgccagctccgggatttgcacaccctggactctcacgtgcgtgggatcaagaagctgctagaagagcaggggatattcctccgggcaagtgtggttacagccagctcaggctccgccttgcaatatgacacactcatcagcctgatggagcacctgaaagcctgtgcagagattgccgcccagcgaaccatcaactggcagaaattctgcatcaaagatgactccgtcctgtacttcctcctccaagtcagtttccttgtggatgagggcgtgtccccagtgctgctgcaactgctctcctgtgctctctgcggcagcaaggtgctcgctgcactggcagcctcttcgggatcctccagtgcttcttcctcctcagcccctgtggctgccagttctggacaagccacaacacagtccaagtcttccactaaaaagagcaagaaagaagaaaaagaaaaggagaaagatggtgagacctctggcagccaggaggaccagctgtgcacagctctggtgaaccagctgaacaaatttgccgataaggaaaccctgatccagttcctgcgttgtttcctgttagagtccaattcttcctcggtgcgctggcaggcccactgtctgacactgcacatctacagaaattccagcaaatctcaacaggagctcctgctagatctgatgtggtccatctggccagaactcccagcctatggtcgtaaggctgcccagtttgtggacctactaggatatttctccctgaaaactccacaaacagagaagaagttgaaggagtattcacagaaggctgtggagattctgcggactcaaaaccatattcttaccaaccaccccaactcgaacatttataacactttgtctggcttagtggagtttgatggctattacctggagagcgatccctgcctggtgtgtaataacccggaagtaccgttctgttatatcaagctgtcttccattaaagtggacacgcggtacaccaccacccagcaggttgtgaagctcattggcagtcacaccatcagcaaagtgacagtgaaaatcggggatctgaaacggaccaagatggtgcggaccatcaacctgtattataacaaccgaaccgtgcaggccatcgtggagttgaaaaacaagccagctcgctggcacaaagccaagaaggttcagctgacccctggacagacagaggtgaagattgacctgccgttgcccattgtggcctccaatctgatgattgagtttgcagacttctatgaaaactaccaggcctccacagagaccctgcagtgccctcgctgtagtgcctcggtccctgccaacccaggagtctgtggcaactgtggagagaatgtgtaccagtgtcacaaatgcagatccatcaactacgatgaaaaggatcccttcctctgcaatgcctgtggcttctgtaaatatgcccgcttcgacttcatgctctatgccaagccttgctgtgcagtggatcccattgagaatgaagaagaccggaagaaggctgtatccaacatcaatacacttttggacaaagctgatcgagtgtatcatcagctgatgggacaccggccacagctggagaacctgctctgcaaagtgaatgaggcagctccagaaaagccacaggatgactcaggaacagcagggggcatcagctccacttctgccagtgtgaatcgttacatcctgcagttggctcaggagtattgtggagactgcaagaactcttttgatgaactctccaaaatcatccagaaagtctttgcttcgcgcaaagagttgttggaatatgacctacagcagagggaagcagccactaaatcatcccggacctccgtgcagcccacattcactgccagccagtaccgtgccttatccgtcctgggctgtggccacacatcctccaccaagtgctatggctgcgcctcggctgtcacagaacattgtatcacactacttcgggccctggccaccaacccagccttgaggcacatccttgtctcccagggccttatccgggagctctttgattataatcttcgccgaggggctgcggccatgcgggaggaggtccgccagctcatgtgcctcctaactcgagacaacccagaagccacccaacagatgaatgacctgattattggcaaggtctccacagccctgaagggccactgggccaaccccgatctggcaagtagcctgcagtatgaaatgctgctgctgacggattctatctccaaggaggacagctgctgggagctccggttacgctgtgctctcagccttttcctcatggctgtgaacattaagactcctgtggtggttgaaaacattaccctcatgtgcctgaggatcttgcagaagctgataaaaccacctgctcccactagcaagaagaacaaggatgtccccgtcgaggccctcaccacggtgaagccatactgcaatgagatccatgcccaggctcaactgtggctcaagagagaccccaaggcatcctatgatgcctggaagaagtgtcttcctatcagagggatagatggcaatgggaaagcccccagcaaatcagagctccgccatctctatttgactgagaagtatgtgtggaggtggaaacagttcctgagtcgtcgggggaagaggacctcccccttggatctcaaactggggcataacaactggctgcgacaagtgcttttcactccagcaacgcaggccgcacggcaggcagcctgtaccattgtggaagctctagccaccattcccagccgcaagcagcaggtcctggacctgcttaccagttacctggatgagctgagcatagctggggagtgtgcagctgagtacctggctctctaccagaagctcatcacttctgcgcactggaaagtctacttggcagctcggggagtcctaccctatgtgggcaacctcatcaccaaggaaatagctcgtctgctggccctggaggaggctaccctgagtaccgatctgcagcagggttatgcccttaaaagtctcacaggccttctctcctcctttgttgaggtggaatccatcaaaagacattttaaaagtcgcttggtgggtactgtgctgaatggatacctgtgcttgcggaagctggtggtgcagaggaccaagctgatcgatgagacgcaggacatgctgctggagatgctggaggacatgaccacaggtacagaatcagaaaccaaggccttcatggctgtgtgcattgagacagccaagcgctacaatctggatgactaccggaccccggtgttcatcttcgagaggctctgcagcatcatttatcctgaggagaatgaagtcactgagttctttgtgaccctggagaaggatccccaacaagaagacttcttacagggcaggatgcctgggaacccgtatagcagcaatgagccaggcatcgggccgctgatgagggatataaagaacaagatttgccaggactgtgacttagtggccctcctggaagatgacagtggcatggagcttctagtgaacaataaaatcattagtttggaccttcctgtggctgaagtttacaagaaagtctggtgtaccacgaatgagggagagcccatgaggattgtttatcgtatgcgggggctgctgggcgatgccacagaggagttcattgagtccctggactctactacagatgaagaagaagatgaagaagaagtgtataaaatggctggtgtgatggcccagtgtgggggcctggaatgcatgcttaacagactcgcagggatcagagatttcaagcagggacgccaccttctaacagtgctactgaaattgttcagttactgcgtgaaggtgaaagtcaaccggcagcaactggtcaaactggaaatgaacaccttgaacgtcatgctggggaccctaaacctggcccttgtagctgaacaagaaagcaaggacagtgggggtgcagctgtggctgagcaggtgcttagcatcatggagatcattctagatgagtccaatgctgagcccctgagtgaggacaagggcaacctcctcctgacaggtgacaaggatcaactggtgatgctcttggaccagatcaacagcacctttgttcgctccaaccccagtgtgctccagggcctgcttcgcatcatcccgtacctttcctttggagaggtggagaaaatgcagatcttggtggagcgattcaaaccatactgcaactttgataaatatgatgaagatcacagtggtgatgataaagtcttcctggactgcttctgtaaaatagctgctggcatcaagaacaacagcaatgggcaccagctgaaggatctgattctccagaaggggatcacccagaatgcacttgactacatgaaaaagcacatccctagcgccaagaatttggatgccgacatctggaaaaagtttttgtctcgcccagccttgccatttatcctaaggctgcttcggggcctggccatccagcaccctggcacccaggttctgattggaactgattccatcccgaacctgcataagctggagcaggtgtccagtgatgagggcattgggaccttggcagagaacctgctggaagccctgcgggaacaccctgacgtaaacaagaagattgacgcagcccgcagggagacccgggcagagaagaaacgcatggccatggcaatgaggcagaaggccctgggcaccctgggcatgacgacaaatgaaaagggccaggtcgtgaccaagacagcactcctgaagcagatggaagagctgatcgaggagcctggcctcacgtgctgcatctgcagggagggatacaagttccagcccacaaaggtcctgggcatttataccttcacgaagcgggtagccttggaggagttggagaataagccccggaaacagcagggctacagcaccgtgtcccacttcaacattgtgcactacgactgccatctggctgccgtcaggttggctcgaggccgggaagagtgggagagtgccgccctgcagaatgccaacaccaagtgcaacgggctccttccggtctggggacctcatgtccctgaatcagcttttgccacttgcttggcaagacacaacacttacctccaggaatgtacaggccagcgggagcccacgtatcagctcaacatccacgacatcaaactgctcttcctgcgcttcgccatggagcagtcgttcagcgcagacactggcgggggcggccgggagagcaacatccacctgatcccgtacatcattcacactgtgctttacgtcctgaacacaacccgagcaacttcccgagaagagaagaacctccaaggctttctggaacagcccaaggagaagtgggtggagagtgcctttgaagtggacgggccctactatttcacagtcttggcccttcacatcctgccccctgagcagtggagagccacacgtgtggaaatcttgcggaggctgttggtgacctcgcaggctcgggcagtggctccaggtggagccaccaggctgacagataaggcagtgaaggactattccgcttaccgttcttcccttctcttttgggccctcgtcgatctcatttacaacatgtttaagaaggtgcctaccagtaacacagagggaggctggtcctgctctctcgctgagtacatccgccacaacgacatgcccatctacgaagctgccgacaaagccctgaaaaccttccaggaggagttcatgccagtggagaccttctcagagttcctcgatgtggccggtcttttatcagaaatcaccgatccagagagcttcctgaaggacctgttgaactcagtcccctgaccaccacacagcagctgcggcggcgaagacgaagctggcttgccttccaccctctgttctccctccttgtgcattaagttccctccgcgggatgctgcattgttaccccgccctcccctctctcgtgtgtgtggtgcaccagctatgaggttgtctgtaacccaagccatcaaagggcctgtacatacctaggagccatgagttgtcccggccagcttcatacttgagtgtgcacatcttgagaaataaacaagtgacttaacacacattgaaaa

SEQ ID NO: 356703 - DNA, 12385 bp, Homo sapiens
gtgacctagaggttccgccacaagcgcgatctcaaaggtccaggtctctttggatgagcatttttctaagatggctgctgagactgatcctcataagtcgtctgagattaccaagaacctacttccagccacgctgcaactcattgacacctatgcatcgttcaccagagcctatttgctgcaaaactttaatgaagagggaacaactgagaaaccttccaaggagaaactgcaaggctttgctgctgttttggctattggctctagcaggtgcaaggcaaatactctgggtccgacactggttcagaatttgccatcgtcagtgcagactgtgtgtgagtcctggaacaacatcaataccaatgaatttcccaatattggatcctggcgcaatgcctttgccaatgacaccatcccttcagagagttatattagtgcagtgcaggctgcacacctggggactctctgtagccaaagtctgcccctggctgcttccctgaagcataccctcctctcactggtcaggttgactggagatcttattgtttggtcagatgagatgaacccaccacaggtaattcggacactgctacctcttcttttggaatcaagcactgagagtgttgccgagatcagtagcaactccctggaacgcatcttgggccctgctgagtctgatgagttcttggctcgtgtttatgagaagctgatcactggttgttacaacattctggccaatcatgcagatcctaacagtggactggatgaatccatcctggaggaatgtctccagtacttggaaaagcagctggaaagtagccaggctcgtaaagctatggaggagtttttctctgacagtggagaacttgtacagatcatgatggcaacagccaatgagaacctctctgctaaattctgtaaccgagttttgaaattcttcaccaaactcttccagctgactgagaagagccctaacccgagcctgttgcatctctgtggctccctggcacaactggcctgtgtggaacctgtgcgcctgcaggcctggctcacccgcatgactacatcgcccccaaaagattctgatcagctggatgtaattcaggagaaccggcagctgctgcagttactgaccacatacattgttcgggaaaacagccaagttggggaaggtgtgtgtgctgttcttctgggcaccctgactcccatggcaacagagatgctggccaacggtgatgggactggcttccctgaacttatggttgtgatggccactctggccagtgcaggtcaaggtgctggtcaccttcagcttcataatgctgctgtggattggctgagcagatgcaagaaatacctgtcacagaagaatgtagttgaaaaactgaatgccaatgtaatgcatggaaagcatgtgatgatcttggagtgcacatgccatatcatgtcttacttggctgatgtcacgaatgccctgagccagagtaatggtcaaggcccaagtcatctctcagtggatggggaagagcgggccattgaagtagactcagactgggtggaggagttggcggtggaagaggaagattcccaggctgaggattcagatgaagattctctttgcaataaactctgcacttttacgatcacacagaaagaattcatgaaccagcattggtaccactgtcacacctgtaaaatggtggatggcgtgggtgtctgcacagtgtgtgctaaggtgtgccacaaggatcatgagatttcctatgccaagtatggatccttcttctgtgactgtggagccaaggaagatggcagctgtttggctctggtgaagagaactcctagcagtggcatgagctctaccatgaaggagtcggcatttcagagtgaacccaggatttcagagagtctagtgcgtcatgccagcacctcctcgccagctgacaaagccaaggttaccatcagtgatggaaaggttgctgacgaagagaagcccaagaagagcagcctctgccgcacagtagagggctgccgggaggaattacagaaccaggccaatttctccttcgctcctctcgtgttagacatgcttaatttccttatggatgccattcagaccaacttccagcaagcttcagccgtcgggagcagcagccgtgctcagcaagccctcagtgagctacacactgtggagaaggcagtggagatgacagaccagctgatggttcccaccttagggtcccaggaaggtgcctttgagaatgtgcggatgaattacagtggagaccagggccagaccatccggcagctgatcagtgctcatgtgctcaggcgggtggctatgtgtgtgctctcctctccccatgggcgccgccaacatttggctgtcagccatgagaagggcaagatcaccgttctgcagctctctgcactcctgaagcaagcagattccagcaaaaggaagttaactctgacccgcttggcttctgccccagttccttttactgtgttgagcctcacaggaaatccctgcaaggaagactacttggcggtttgtgggctaaaggactgtcatgtgctcacctttagtagctcaggctctgtttcggatcacttggttttgcaccctcagttggcaacggggaacttcatcatcaaagccgtgtggttacctggttcacagaccgagttagcaattgtcaccgcagactttgttaagatttatgacctgtgtgttgatgccttgagtccaaccttctattttctcctgccaagctcaaagataagagatgttaccttccttttcaatgaggagggaaagaacatcattgttataatgtcttcggctgggtacatctatactcagcttatggaagaggccagcagtgcccagcagggacccttctatgtcactaatgtgttggaaatcaatcatgaggacctgaaggacagtaacagccaggtggcgggcggtggtgtgtccgtgtactactcccacgtgttgcagatgttgttcttcagctattgtcaaggcaaatcattcgcagccaccatcagcaggacaaccctggaggtgttgcaactcttccccatcaacatcaaaagttccaatggtggcagtaagacttctcctgctctttgccagtggtctgaggtgatgaaccaccctggcttggtgtgctgtgtccagcaaactacaggggtgccgctggtagttatggtgaaaccagacacttttcttatccaggagattaagactcttcctgctaaagcgaagatccaagacatggttgctattaggcacacggcctgcaatgagcagcagcggacaacaatgattctgctgtgtgaggatggcagcctgcgcatttacatggccaacgtggagaacacctcctactggctgcagccatccctgcagcccagcagtgtcatcagcatcatgaagcctgttcgaaagcgcaaaacagctacaatcacaacccgcacgtctagccaggtgactttccccattgacttttttgaacacaaccagcagctgacagatgtggagtttggtggtaacgacctcctacaggtctataatgcacaacagataaaacaccggctgaattccactggcatgtatgtggccaacaccaagcccggaggcttcaccattgagattagtaacaacaatagcactatggtgatgacaggcatgcggatccagattgggactcaagcaatagaacgggccccgtcatatatcgagatcttcggcagaactatgcagctcaacctgagtcgctcacgctggtttgacttccccttcaccagagaagaagccctgcaggctgataagaagctgaacctcttcattggggcctcggtggatccagcaggtgtcaccatgatagatgctgtaaaaatttatggcaagactaaggagcagtttggctggcctgatgagcccccagaagaattcccttctgcctctgtcagcaacatctgcccttcaaatctgaaccagagcaacggcactggagatagcgactcagctgcccccactacgaccagtggaactgtcctggagaggctggttgtgagttctttagaagccctggaaagctgctttgccgttggcccaatcatcgagaaggagagaaacaagaatgctgctcaggagctggccactttgctgttgtccctgccagcacctgccagtgtccagcagcagtccaagagccttctggccagcctgcacaccagccgctcggcctaccacagccacaaggatcaggccttgctgagcaaagctgtgcagtgtctcaacacatctagcaaagagggcaaggatttggaccctgaggtgttccagaggctagtgatcacagctcgctccattgccatcatgcgccccaacaaccttgtccactttacggagtcaaagctgccccagatggaaacagactgtttttttcctagatgtgcctgctggagtctagggatagttggcatattgattggggccccacttgaaactccctccccaggcaagcttccttgacctgagttaaccttaaaacaaattaaattccatctcagatttaccatcgttgataattttctttctcctgcttagaaggaatggatgaagggaaggaaccgcagaagcagttggaaggagattgctgtagtttcatcacccagcttgtgaaccacttctggaaactccatgcatccaaacccaagaatgccttcttggcacctgcctgccttccaggactaactcatattgaagctactgtcaatgctctggtggacatcatccatggctactgtacctgtgagctggattgtattaacacagcatccaagatctacatgcagatgctcttgtgtcctgatcctgctgtgagcttctcttgtaaacaagctctaattcgagtcctaaggcccaggaacaaacggagacatgtgactttaccctcttcccctcgaagcaacactccaatgggagacaaggatgatgatgacgatgatgatgcagatgagaaaatgcagtcatcagggatcccgaatggtggtcacatccgtcaggaaagccaggaacagagtgaggtggaccatggagattttgagatggtgtctgagtcgatggtcctggagacagctgaaaatgtcaacaatggcaacccctctcccctggaggccctgctggcaggcgcagagggcttcccccccatgctggacatcccacctgatgcagatgacgagaccatggttgaactagccattgccctgagcctgcagcaggaccaacaaggcagcagcagcagtgccctgggcctgcagagcctgggactgtccggccaggcacccagctcttcctctctggacgcaggaaccctctctgacaccacagcatcagctccagcctcagacgacgagggcagtacagcagcgacagatggttctacccttcggacctctcctgctgaccacggtggtagtgtgggctcggagagcgggggcagtgcagtggactcagtggctggcgagcacagtgtatctggccggagcagtgcttatggcgatgctacagctgaggggcatccggctggaccaggaagtgtcagctcaagcactggagccatcagcaccaccactgggcaccaggagggagatggctccgagggagaaggagaaggagaaactgaaggagatgtccacactagcaacaggctgcacatggtccgtctaatgctgttggagagattactgcagaccctgcctcaattacgaaacgttggcggtgtccgggccatcccatacatgcaggtcattctaatgctcactacagatctggatggagaagatgagaaagacaagggggccctagacaacctgctctcccagcttattgctgagttgggtatggataaaaaggatgtctccaagaagaatgagcgcagcgccctgaatgaagtccatctggtagtaatgagactcctgagtgtcttcatgtcccgcaccaaatctggatccaagtcttccatatgtgagtcatcttccctcatctccagtgccacagcagcagctctactgagctctggggctgtggactactgcctgcacgtgctcaaatcactgctggaatattggaagagccaacagaatgacgaggagcctgtggctaccagccagttgctgaaaccacatactacctcctccccacctgacatgagcccattctttctccgccagtatgtgaagggtcatgctgctgatgtgtttgaggcctatactcagcttctaacagaaatggtactgaggcttccttaccaaatcaaaaagattactgacaccaattctcgaatcccacctcctgtctttgaccactcgtggttttactttctctccgagtacctcatgatccagcagactccatttgtgcgccgtcaagtccgcaaacttctgctcttcatctgtggatccaaagagaagtaccgccagctccgggatttgcacaccctggactctcacgtgcgtgggatcaagaagctgctagaagagcaggggatattcctccgggcaagtgtggttacagccagctcaggctccgccttgcaatatgacacactcatcagcctgatggagcacctgaaagcctgtgcagagattgccgcccagcgaaccatcaactggcagaaattctgcatcaaagatgactccgtcctgtacttcctcctccaagtcagtttccttgtggatgagggcgtgtccccagtgctgctgcaactgctctcctgtgctctctgcggcagcaaggtgctcgctgcactggcagcctcttcgggatcctccagtgcttcttcctcctcagcccctgtggctgccagttctggacaagccacaacacagtccaagtcttccactaaaaagagcaagaaagaagaaaaagaaaaggagaaagatggtgagacctctggcagccaggaggaccagctgtgcacagctctggtgaaccagctgaacaaatttgccgataaggaaaccctgatccagttcctgcgttgtttcctgttagagtccaattcttcctcggtgcgctggcaggcccactgtctgacactgcacatctacagaaattccagcaaatctcaacaggagctcctgctagatctgatgtggtccatctggccagaactcccagcctatggtcgtaaggctgcccagtttgtggacctactaggatatttctccctgaaaactccacaaacagagaagaagttgaaggagtattcacagaaggctgtggagattctgcggactcaaaaccatattcttaccaaccaccccaactcgaacatttataacactttgtctggcttagtggagtttgatggctattacctggagagcgatccctgcctggtgtgtaataacccggaagtaccgttctgttatatcaagctgtcttccattaaagtggacacgcggtacaccaccacccagcaggttgtgaagctcattggcagtcacaccatcagcaaagtgacagtgaaaatcggggatctgaaacggaccaagatggtgcggaccatcaacctgtattataacaaccgaaccgtgcaggccatcgtggagttgaaaaacaagccagctcgctggcacaaagccaagaaggttcagctgacccctggacagacagaggtgaagattgacctgccgttgcccattgtggcctccaatctgatgattgagtttgcagacttctatgaaaactaccaggcctccacagagaccctgcagtgccctcgctgtagtgcctcggtccctgccaacccaggagtctgtggcaactgtggagagaatgtgtaccagtgtcacaaatgcagatccatcaactacgatgaaaaggatcccttcctctgcaatgcctgtggcttctgtaaatatgcccgcttcgacttcatgctctatgccaagccttgctgtgcagtggatcccattgagaatgaagaagaccggaagaaggctgtatccaacatcaatacacttttggacaaagctgatcgagtgtatcatcagctgatgggacaccggccacagctggagaacctgctctgcaaagtgaatgaggcagctccagaaaagccacaggatgactcaggaacagcagggggcatcagctccacttctgccagtgtgaatcgttacatcctgcagttggctcaggagtattgtggagactgcaagaactcttttgatgaactctccaaaatcatccagaaagtctttgcttcgcgcaaagagttgttggaatatgacctacagcagagggaagcagccactaaatcatcccggacctccgtgcagcccacattcactgccagccagtaccgtgccttatccgtcctgggctgtggccacacatcctccaccaagtgctatggctgcgcctcggctgtcacagaacattgtatcacactacttcgggccctggccaccaacccagccttgaggcacatccttgtctcccagggccttatccgggagctctttgattataatcttcgccgaggggctgcggccatgcgggaggaggtccgccagctcatgtgcctcctaactcgagacaacccagaagccacccaacagatgaatgacctgattattggcaaggtctccacagccctgaagggccactgggccaaccccgatctggcaagtagcctgcagtatgaaatgctgctgctgacggattctatctccaaggaggacagctgctgggagctccggttacgctgtgctctcagccttttcctcatggctgtgaacattaagactcctgtggtggttgaaaacattaccctcatgtgcctgaggatcttgcagaagctgataaaaccacctgctcccactagcaagaagaacaaggatgtccccgtcgaggccctcaccacggtgaagccatactgcaatgagatccatgcccaggctcaactgtggctcaagagagaccccaaggcatcctatgatgcctggaagaagtgtcttcctatcagagggatagatggcaatgggaaagcccccagcaaatcagagctccgccatctctatttgactgagaagtatgtgtggaggtggaaacagttcctgagtcgtcgggggaagaggacctcccccttggatctcaaactggggcataacaactggctgcgacaagtgcttttcactccagcaacgcaggccgcacggcaggcagcctgtaccattgtggaagctctagccaccattcccagccgcaagcagcaggtcctggacctgcttaccagttacctggatgagctgagcatagctggggagtgtgcagctgagtacctggctctctaccagaagctcatcacttctgcgcactggaaagtctacttggcagctcggggagtcctaccctatgtgggcaacctcatcaccaaggaaatagctcgtctgctggccctggaggaggctaccctgagtaccgatctgcagcagggttatgcccttaaaagtctcacaggccttctctcctcctttgttgaggtggaatccatcaaaagacattttaaaagtcgcttggtgggtactgtgctgaatggatacctgtgcttgcggaagctggtggtgcagaggaccaagctgatcgatgagacgcaggacatgctgctggagatgctggaggacatgaccacaggtacagaatcagaaaccaaggccttcatggctgtgtgcattgagacagccaagcgctacaatctggatgactaccggaccccggtgttcatcttcgagaggctctgcagcatcatttatcctgaggagaatgaagtcactgagttctttgtgaccctggagaaggatccccaacaagaagacttcttacagggcaggatgcctgggaacccgtatagcagcaatgagccaggcatcgggccgctgatgagggatataaagaacaagatttgccaggactgtgacttagtggccctcctggaagatgacagtggcatggagcttctagtgaacaataaaatcattagtttggaccttcctgtggctgaagtttacaagaaagtctggtgtaccacgaatgagggagagcccatgaggattgtttatcgtatgcgggggctgctgggcgatgccacagaggagttcattgagtccctggactctactacagatgaagaagaagatgaagaagaagtgtataaaatggctggtgtgatggcccagtgtgggggcctggaatgcatgcttaacagactcgcagggatcagagatttcaagcagggacgccaccttctaacagtgctactgaaattgttcagttactgcgtgaaggtgaaagtcaaccggcagcaactggtcaaactggaaatgaacaccttgaacgtcatgctggggaccctaaacctggcccttgtagctgaacaagaaagcaaggacagtgggggtgcagctgtggctgagcaggtgcttagcatcatggagatcattctagatgagtccaatgctgagcccctgagtgaggacaagggcaacctcctcctgacaggtgacaaggatcaactggtgatgctcttggaccagatcaacagcacctttgttcgctccaaccccagtgtgctccagggcctgcttcgcatcatcccgtacctttcctttggagaggtggagaaaatgcagatcttggtggagcgattcaaaccatactgcaactttgataaatatgatgaagatcacagtggtgatgataaagtcttcctggactgcttctgtaaaatagctgctggcatcaagaacaacagcaatgggcaccagctgaaggatctgattctccagaaggggatcacccagaatgcacttgactacatgaaaaagcacatccctagcgccaagaatttggatgccgacatctggaaaaagtttttgtctcgcccagccttgccatttatcctaaggctgcttcggggcctggccatccagcaccctggcacccaggttctgattggaactgattccatcccgaacctgcataagctggagcaggtgtccagtgatgagggcattgggaccttggcagagaacctgctggaagccctgcgggaacaccctgacgtaaacaagaagattgacgcagcccgcagggagacccgggcagagaagaaacgcatggccatggcaatgaggcagaaggccctgggcaccctgggcatgacgacaaatgaaaagggccaggtcgtgaccaagacagcactcctgaagcagatggaagagctgatcgaggagcctggcctcacgtgctgcatctgcagggagggatacaagttccagcccacaaaggtcctgggcatttataccttcacgaagcgggtagccttggaggagttggagaataagccccggaaacagcagggctacagcaccgtgtcccacttcaacattgtgcactacgactgccatctggctgccgtcaggttggctcgaggccgggaagagtgggagagtgccgccctgcagaatgccaacaccaagtgcaacgggctccttccggtctggggacctcatgtccctgaatcagcttttgccacttgcttggcaagacacaacacttacctccaggaatgtacaggccagcgggagcccacgtatcagctcaacatccacgacatcaaactgctcttcctgcgcttcgccatggagcagtcgttcagcgcagacactggcgggggcggccgggagagcaacatccacctgatcccgtacatcattcacactgtgctttacgtcctgaacacaacccgagcaacttcccgagaagagaagaacctccaaggctttctggaacagcccaaggagaagtgggtggagagtgcctttgaagtggacgggccctactatttcacagtcttggcccttcacatcctgccccctgagcagtggagagccacacgtgtggaaatcttgcggaggctgttggtgacctcgcaggctcgggcagtggctccaggtggagccaccaggctgacagatagggcagtgcagtggactcagtggctggcgagcacagtgtatctggccggagcagtgcttatggcgatgctacagctgaggggcatccggctggaccaggaagtgtcagctcaagcactggagccatcagcaccaccactgggcaccaggagggagatggctccgagggagaaggagaaggagaaactgaaggagatgtccacactagcaacaggctgcacatggtccgtctaatgctgttggagagattactgcagaccctgcctcaattacgaaacgttggcggtgtccgggccatcccatacatgcagggacccactcg

SEQ ID NO: 356704 - DNA, 10395 bp, Homo sapiens
gtgacctagaggttccgccacaagcgcgatctcaaaggtccaggtctctttggatgagcatttttctaagatggctgctgagactgatcctcataagtcgtctgagattaccaagaacctacttccagccacgctgcaactcattgacacctatgcatcgttcaccagagcctatttgctgcaaaactttaatgaagagggaacaactgagaaaccttccaaggagaaactgcaaggctttgctgctgttttggctattggctctagcaggtgcaaggcaaatactctgggtccgacactggttcagaatttgccatcgtcagtgcagactgtgtgtgagtcctggaacaacatcaataccaatgaatttcccaatattggatcctggcgcaatgcctttgccaatgacaccatcccttcagagagttatattagtgcagtgcaggctgcacacctggggactctctgtagccaaagtctgcccctggctgcttccctgaagcataccctcctctcactggtcaggttgactggagatcttattgtttggtcagatgagatgaacccaccacaggtaattcggacactgctacctcttcttttggaatcaagcactgagagtgttgccgagatcagtagcaactccctggaacgcatcttgggccctgctgagtctgatgagttcttggctcgtgtttatgagaagctgatcactggttgttacaacattctggccaatcatgcagatcctaacagtggactggatgaatccatcctggaggaatgtctccagtacttggaaaagcagctggaaagtagccaggctcgtaaagctatggaggagtttttctctgacagtggagaacttgtacagatcatgatggcaacagccaatgagaacctctctgctaaattctgtaaccgagttttgaaattcttcaccaaactcttccagctgactgagaagagccctaacccgagcctgttgcatctctgtggctccctggcacaactggcctgtgtggaacctgtgcgcctgcaggcctggctcacccgcatgactacatcgcccccaaaagattctgatcagctggatgtaattcaggagaaccggcagctgctgcagttactgaccacatacattgttcgggaaaacagccaagttggggaaggtgtgtgtgctgttcttctgggcaccctgactcccatggcaacagagatgctggccaacggtgatgggactggcttccctgaacttatggttgtgatggccactctggccagtgcaggtcaaggtgctggtcaccttcagcttcataatgctgctgtggattggctgagcagatgcaagaaatacctgtcacagaagaatgtagttgaaaaactgaatgccaatgtaatgcatggaaagcatgtgatgatcttggagtgcacatgccatatcatgtcttacttggctgatgtcacgaatgccctgagccagagtaatggtcaaggcccaagtcatctctcagtggatggggaagagcgggccattgaagtagactcagactgggtggaggagttggcggtggaagaggaagattcccaggctgaggattcagatgaagattctctttgcaataaactctgcacttttacgatcacacagaaagaattcatgaaccagcattggtaccactgtcacacctgtaaaatggtggatggcgtgggtgtctgcacagtgtgtgctaaggtgtgccacaaggatcatgagatttcctatgccaagtatggatccttcttctgtgactgtggagccaaggaagatggcagctgtttggctctggtgaagagaactcctagcagtggcatgagctctaccatgaaggagtcggcatttcagagtgaacccaggatttcagagagtctagtgcgtcatgccagcacctcctcgccagctgacaaagccaaggttaccatcagtgatggaaaggttgctgacgaagagaagcccaagaagagcagcctctgccgcacagtagagggctgccgggaggaattacagaaccaggccaatttctccttcgctcctctcgtgttagacatgcttaatttccttatggatgccattcagaccaacttccagcaagcttcagccgtcgggagcagcagccgtgctcagcaagccctcagtgagctacacactgtggagaaggcagtggagatgacagaccagctgatggttcccaccttagggtcccaggaaggtgcctttgagaatgtgcggatgaattacagtggagaccagggccagaccatccggcagctgatcagtgctcatgtgctcaggcgggtggctatgtgtgtgctctcctctccccatgggcgccgccaacatttggctgtcagccatgagaagggcaagatcaccgttctgcagctctctgcactcctgaagcaagcagattccagcaaaaggaagttaactctgacccgcttggcttctgccccagttccttttactgtgttgagcctcacaggaaatccctgcaaggaagactacttggcggtttgtgggctaaaggactgtcatgtgctcacctttagtagctcaggctctgtttcggatcacttggttttgcaccctcagttggcaacggggaacttcatcatcaaagccgtgtggttacctggttcacagaccgagttagcaattgtcaccgcagactttgttaagatttatgacctgtgtgttgatgccttgagtccaaccttctattttctcctgccaagctcaaagataagagatgttaccttccttttcaatgaggagggaaagaacatcattgttataatgtcttcggctgggtacatctatactcagcttatggaagaggccagcagtgcccagcagggacccttctatgtcactaatgtgttggaaatcaatcatgaggacctgaaggacagtaacagccaggtggcgggcggtggtgtgtccgtgtactactcccacgtgttgcagatgttgttcttcagctattgtcaaggcaaatcattcgcagccaccatcagcaggacaaccctggaggtgttgcaactcttccccatcaacatcaaaagttccaatggtggcagtaagacttctcctgctctttgccagtggtctgaggtgatgaaccaccctggcttggtgtgctgtgtccagcaaactacaggggtgccgctggtagttatggtgaaaccagacacttttcttatccaggagattaagactcttcctgctaaagcgaagatccaagacatggttgctattaggcacacggcctgcaatgagcagcagcggacaacaatgattctgctgtgtgaggatggcagcctgcgcatttacatggccaacgtggagaacacctcctactggctgcagccatccctgcagcccagcagtgtcatcagcatcatgaagcctgttcgaaagcgcaaaacagctacaatcacaacccgcacgtctagccaggtgactttccccattgacttttttgaacacaaccagcagctgacagatgtggagtttggtggtaacgacctcctacaggtctataatgcacaacagataaaacaccggctgaattccactggcatgtatgtggccaacaccaagcccggaggcttcaccattgagattagtaacaacaatagcactatggtgatgacaggcatgcggatccagattgggactcaagcaatagaacgggccccgtcatatatcgagatcttcggcagaactatgcagctcaacctgagtcgctcacgctggtttgacttccccttcaccagagaagaagccctgcaggctgataagaagctgaacctcttcattggggcctcggtggatccagcaggtgtcaccatgatagatgctgtaaaaatttatggcaagactaaggagcagtttggctggcctgatgagcccccagaagaattcccttctgcctctgtcagcaacatctgcccttcaaatctgaaccagagcaacggcactggagatagcgactcagctgcccccactacgaccagtggaactgtcctggagaggctggttgtgagttctttagaagccctggaaagctgctttgccgttggcccaatcatcgagaaggagagaaacaagaatgctgctcaggagctggccactttgctgttgtccctgccagcacctgccagtgtccagcagcagtccaagagccttctggccagcctgcacaccagccgctcggcctaccacagccacaaggatcaggccttgctgagcaaagctgtgcagtgtctcaacacatctagcaaagagggcaaggatttggaccctgaggtgttccagaggctagtgatcacagctcgctccattgccatcatgcgccccaacaaccttgtccactttacggagtcaaagctgccccagatggaaacagactgtttttttcctagatgtgcctgctggagtctagggatagttggcatattgattggggccccacttgaaactccctccccaggcaagcttccttgacctgagttaaccttaaaacaaattaaattccatctcagatttaccatcgttgataattttctttctcctgcttagaaggaatggatgaagggaaggaaccgcagaagcagttggaaggagattgctgtagtttcatcacccagcttgtgaaccacttctggaaactccatgcatccaaacccaagaatgccttcttggcacctgcctgccttccaggactaactcatattgaagctactgtcaatgctctggtggacatcatccatggctactgtacctgtgagctggattgtattaacacagcatccaagatctacatgcagatgctcttgtgtcctgatcctgctgtgagcttctcttgtaaacaagctctaattcgagtcctaaggcccaggaacaaacggagacatgtgactttaccctcttcccctcgaagcaacactccaatgggagacaaggatgatgatgacgatgatgatgcagatgagaaaatgcagtcatcagggatcccgaatggtggtcacatccgtcaggaaagccaggaacagagtgaggtggaccatggagattttgagatggtgtctgagtcgatggtcctggagacagctgaaaatgtcaacaatggcaacccctctcccctggaggccctgctggcaggcgcagagggcttcccccccatgctggacatcccacctgatgcagatgacgagaccatggttgaactagccattgccctgagcctgcagcaggaccaacaaggcagcagcagcagtgccctgggcctgcagagcctgggactgtccggccaggcacccagctcttcctctctggacgcaggaaccctctctgacaccacagcatcagctccagcctcagacgacgagggcagtacagcagcgacagatggttctacccttcggacctctcctgctgaccacggtggtagtgtgggctcggagagcgggggcagtgcagtggactcagtggctggcgagcacagtgtatctggccggagcagtgcttatggcgatgctacagctgaggggcatccggctggaccaggaagtgtcagctcaagcactggagccatcagcaccaccactgggcaccaggagggagatggctccgagggagaaggagaaggagaaactgaaggagatgtccacactagcaacaggctgcacatggtccgtctaatgctgttggagagattactgcagaccctgcctcaattacgaaacgttggcggtgtccgggccatcccatacatgcaggtcattctaatgctcactacagatctggatggagaagatgagaaagacaagggggccctagacaacctgctctcccagcttattgctgagttgggtatggataaaaaggatgtctccaagaagaatgagcgcagcgccctgaatgaagtccatctggtagtaatgagactcctgagtgtcttcatgtcccgcaccaaatctggatccaagtcttccatatgtgagtcatcttccctcatctccagtgccacagcagcagctctactgagctctggggctgtggactactgcctgcacgtgctcaaatcactgctggaatattggaagagccaacagaatgacgaggagcctgtggctaccagccagttgctgaaaccacatactacctcctccccacctgacatgagcccattctttctccgccagtatgtgaagggtcatgctgctgatgtgtttgaggcctatactcagcttctaacagaaatggtactgaggcttccttaccaaatcaaaaagattactgacaccaattctcgaatcccacctcctgtctttgaccactcgtggttttactttctctccgagtacctcatgatccagcagactccatttgtgcgccgtcaagtccgcaaacttctgctcttcatctgtggatccaaagagaagtaccgccagctccgggatttgcacaccctggactctcacgtgcgtgggatcaagaagctgctagaagagcaggggatattcctccgggcaagtgtggttacagccagctcaggctccgccttgcaatatgacacactcatcagcctgatggagcacctgaaagcctgtgcagagattgccgcccagcgaaccatcaactggcagaaattctgcatcaaagatgactccgtcctgtacttcctcctccaagtcagtttccttgtggatgagggcgtgtccccagtgctgctgcaactgctctcctgtgctctctgcggcagcaaggtgctcgctgcactggcagcctcttcgggatcctccagtgcttcttcctcctcagcccctgtggctgccagttctggacaagccacaacacagtccaagtcttccactaaaaagagcaagaaagaagaaaaagaaaaggagaaagatggtgagacctctggcagccaggaggaccagctgtgcacagctctggtgaaccagctgaacaaatttgccgataaggaaaccctgatccagttcctgcgttgtttcctgttagagtccaattcttcctcggtgcgctggcaggcccactgtctgacactgcacatctacagaaattccagcaaatctcaacaggagctcctgctagatctgatgtggtccatctggccagaactcccagcctatggtcgtaaggctgcccagtttgtggacctactaggatatttctccctgaaaactccacaaacagagaagaagttgaaggagtattcacagaaggctgtggagattctgcggactcaaaaccatattcttaccaaccaccccaactcgaacatttataacactttgtctggcttagtggagtttgatggctattacctggagagcgatccctgcctggtgtgtaataacccggaagtaccgttctgttatatcaagctgtcttccattaaagtggacacgcggtacaccaccacccagcaggttgtgaagctcattggcagtcacaccatcagcaaagtgacagtgaaaatcggggatctgaaacggaccaagatggtgcggaccatcaacctgtattataacaaccgaaccgtgcaggccatcgtggagttgaaaaacaagccagctcgctggcacaaagccaagaaggttcagctgacccctggacagacagaggtgaagattgacctgccgttgcccattgtggcctccaatctgatgattgagtttgcagacttctatgaaaactaccaggcctccacagagaccctgcagtgccctcgctgtagtgcctcggtccctgccaacccaggagtctgtggcaactgtggagagaatgtgtaccagtgtcacaaatgcagatccatcaactacgatgaaaaggatcccttcctctgcaatgcctgtggcttctgtaaatatgcccgcttcgacttcatgctctatgccaagccttgctgtgcagtggatcccattgagaatgaagaagaccggaagaaggctgtatccaacatcaatacacttttggacaaagctgatcgagtgtatcatcagctgatgggacaccggccacagctggagaacctgctctgcaaagtgaatgaggcagctccagaaaagccacaggatgactcaggaacagcagggggcatcagctccacttctgccagtgtgaatcgttacatcctgcagttggctcaggagtattgtggagactgcaagaactcttttgatgaactctccaaaatcatccagaaagtctttgcttcgcgcaaagagttgttggaatatgacctacagcagagggaagcagccactaaatcatcccggacctccgtgcagcccacattcactgccagccagtaccgtgccttatccgtcctgggctgtggccacacatcctccaccaagtgctatggctgcgcctcggctgtcacagaacattgtatcacactacttcgggccctggccaccaacccagccttgaggcacatccttgtctcccagggccttatccgggagctctttgattataatcttcgccgaggggctgcggccatgcgggaggaggtccgccagctcatgtgcctcctaactcgagacaacccagaagccacccaacagatgaatgacctgattattggcaaggtctccacagccctgaagggccactgggccaaccccgatctggcaagtagcctgcagtatgaaatgctgctgctgacggattctatctccaaggaggacagctgctgggagctccggttacgctgtgctctcagccttttcctcatggctgtgaacattaagactcctgtggtggttgaaaacattaccctcatgtgcctgaggatcttgcagaagctgataaaaccacctgctcccactagcaagaagaacaaggatgtccccgtcgaggccctcaccacggtgaagccatactgcaatgagatccatgcccaggctcaactgtggctcaagagagaccccaaggcatcctatgatgcctggaagaagtgtcttcctatcagagggatagatggcaatgggaaagcccccagcaaatcagagctccgccatctctatttgactgagaagtatgtgtggaggtggaaacagttcctgagtcgtcgggggaagaggacctcccccttggatctcaaactggggcataacaactggctgcgacaagtgcttttcactccagcaacgcaggccgcacggcaggcagcctgtaccattgtggaagctctagccaccattcccagccgcaagcagcaggtcctggacctgcttaccagttacctggatgagctgagcatagctggggagtgtgcagctgagtacctggctctctaccagaagctcatcacttctgcgcactggaaagtctacttggcagctcggggagtcctaccctatgtgggcaacctcatcaccaaggaaatagctcgtctgctggccctggaggaggctaccctgagtaccgatctgcagcagggttatgcccttaaaagtctcacaggccttctctcctcctttgttgaggtggaatccatcaaaagacattttaaaagtcgcttggtgggtactgtgctgaatggatacctgtgcttgcggaagctggtggtgcagaggaccaagctgatcgatgagacgcaggacatgctgctggagatgctggaggacatgaccacaggtacagaatcagaaaccaaggccttcatggctgtgtgcattgagacagccaagcgctacaatctggatgactaccggaccccggtgttcatcttcgagaggctctgcagcatcatttatcctgaggagaatgaagtcactgagttctttgtgaccctggagaaggatccccaacaagaagacttcttacagggcaggatgcctgggaacccgtatagcagcaatgagccaggcatcgggccgctgatgagggatataaagaacaagatttgccaggactgtgacttagtggccctcctggaagatgacagtggcatggagcttctagtgaacaataaaatcattagtttggaccttcctgtggctgaagtttacaagaaagtctggtgtaccacgaatgagggagagcccatgaggattgtttatcgtatgcgggggctgctgggcgatgccacagaggagttcattgagtccctggactctactacagatgaaactatgacccagtattcttactgtatttacatttgctgtaattattgcaaaaaagagagagagcagaagaagaagaagaagaagaagaagttcctgagcattatgtggtgcgagaagagatgaaggctgtctagtgtctgaccgtttgtaaggtattgctccatagggggtatggagcgt

SEQ ID NO: 356705 - DNA, 1507 bp, Homo sapiens
gagcacatatactaaaattggaacgatacagagaagattagcatggcccctgcgcaaggatgacacgcaaattcgtgaagcgttccatattttaggcggtatgagtttggctgggggccgggcaccccggaagaccgctgggaaccggctttctgggcttttggaggcagaggaggaagatgagttctaccagacgacttatgggggtttcacagaggaatccggagatgatgagtatcaaggggaccagtcagacacagaggacgaagtggactctgactttgacattgatgaaggggatgaaccatccagtgatggagaagcagaagagccaagaaggaagcgccgagtagtcaccaaggcctataaggaacctctcaagagcttaaggcctcgaaaggtcaacaccccggctggtagctctcagaaggcgcgagaagagaaggcactactgccattagaactacaagatgacggctctgacagtcggaagtctatgcgtcagtctacagctgagcatacacgacaaacgttccttcgggtacaggagaggcagggccagtcaagacggcgaaaggggccccactgtgagcggccactaacccaggaggaactgctccgggaggccaagatcacagaagagcttaatttacggtcactggagacatatgagcggctcgaggctgataaaaagaagcaggttcataagaagcggaagtgccccgggcccataatcacctatcattcagtgacagtgccacttgttggggagccaggccccaaggaagagaacgttgacatagaaggacttgatcctgctccctcggtgtctgcattgactcctcatgctgggactggacccgtcaacccccctgctcgctgctcacgtaccttcatcacttttagtgatgatgcaactttcgaggaatggttcccccaagggcggcccccaaaagtccctgttcgtgaggtctgtccagtgacccatcgtccagccctataccgggaccctgttacagacataccctatgccactgctcgagccttcaagatcattcgtgaggcttacaagaagtacattactgcccatggactgccgcccactgcctcagccctgggccccggcccgccacctcctgagcccctccctggctctgggccccgagccttgcgccagaaaattgtcattaaatgaagagatgtctagtcctcagaaacttctttcctgccctgattggggctcttgctgttccgtttcttctccctgcttctcccctttgtcatctctgatctttgcctaatctgtttctttttccttttcccctagttcttacaggtttcgttgtgttttttaatctaataaaatagaaagatccctttaagaagagaaacgacaggaggagacaagagttgtgcgcgatggtgagtcctgttacaagtcgaggacgccgcgaatttagtagaggtggaggccccgggatatcggtgcggtaccggcgggcgtgag

SEQ ID NO: 356706 - DNA, 6933 bp, Homo sapiens
gtgacctagaggttccgccacaagcgcgatctcaaaggtccaggtctctttggatgagcatttttctaagatggctgctgagactgatcctcataagtcgtctgagattaccaagaacctacttccagccacgctgcaactcattgacacctatgcatcgttcaccagagcctatttgctgcaaaactttaatgaagagggaacaactgagaaaccttccaaggagaaactgcaaggctttgctgctgttttggctattggctctagcaggtgcaaggcaaatactctgggtccgacactggttcagaatttgccatcgtcagtgcagactgtgtgtgagtcctggaacaacatcaataccaatgaatttcccaatattggatcctggcgcaatgcctttgccaatgacaccatcccttcagagagttatattagtgcagtgcaggctgcacacctggggactctctgtagccaaagtctgcccctggctgcttccctgaagcataccctcctctcactggtcaggttgactggagatcttattgtttggtcagatgagatgaacccaccacaggtaattcggacactgctacctcttcttttggaatcaagcactgagagtgttgccgagatcagtagcaactccctggaacgcatcttgggccctgctgagtctgatgagttcttggctcgtgtttatgagaagctgatcactggttgttacaacattctggccaatcatgcagatcctaacagtggactggatgaatccatcctggaggaatgtctccagtacttggaaaagcagctggaaagtagccaggctcgtaaagctatggaggagtttttctctgacagtggagaacttgtacagatcatgatggcaacagccaatgagaacctctctgctaaattctgtaaccgagttttgaaattcttcaccaaactcttccagctgactgagaagagccctaacccgagcctgttgcatctctgtggctccctggcacaactggcctgtgtggaacctgtgcgcctgcaggcctggctcacccgcatgactacatcgcccccaaaagattctgatcagctggatgtaattcaggagaaccggcagctgctgcagttactgaccacatacattgttcgggaaaacagccaagttggggaaggtgtgtgtgctgttcttctgggcaccctgactcccatggcaacagagatgctggccaacggtgatgggactggcttccctgaacttatggttgtgatggccactctggccagtgcaggtcaaggtgctggtcaccttcagcttcataatgctgctgtggattggctgagcagatgcaagaaatacctgtcacagaagaatgtagttgaaaaactgaatgccaatgtaatgcatggaaagcatgtgatgatcttggagtgcacatgccatatcatgtcttacttggctgatgtcacgaatgccctgagccagagtaatggtcaaggcccaagtcatctctcagtggatggggaagagcgggccattgaagtagactcagactgggtggaggagttggcggtggaagaggaagattcccaggctgaggattcagatgaagattctctttgcaataaactctgcacttttacgatcacacagaaagaattcatgaaccagcattggtaccactgtcacacctgtaaaatggtggatggcgtgggtgtctgcacagtgtgtgctaaggtgtgccacaaggatcatgagatttcctatgccaagtatggatccttcttctgtgactgtggagccaaggaagatggcagctgtttggctctggtgaagagaactcctagcagtggcatgagctctaccatgaaggagtcggcatttcagagtgaacccaggatttcagagagtctagtgcgtcatgccagcacctcctcgccagctgacaaagccaaggttaccatcagtgatggaaaggttgctgacgaagagaagcccaagaagagcagcctctgccgcacagtagagggctgccgggaggaattacagaaccaggccaatttctccttcgctcctctcgtgttagacatgcttaatttccttatggatgccattcagaccaacttccagcaagcttcagccgtcgggagcagcagccgtgctcagcaagccctcagtgagctacacactgtggagaaggcagtggagatgacagaccagctgatggttcccaccttagggtcccaggaaggtgcctttgagaatgtgcggatgaattacagtggagaccagggccagaccatccggcagctgatcagtgctcatgtgctcaggcgggtggctatgtgtgtgctctcctctccccatgggcgccgccaacatttggctgtcagccatgagaagggcaagatcaccgttctgcagctctctgcactcctgaagcaagcagattccagcaaaaggaagttaactctgacccgcttggcttctgccccagttccttttactgtgttgagcctcacaggaaatccctgcaaggaagactacttggcggtttgtgggctaaaggactgtcatgtgctcacctttagtagctcaggctctgtttcggatcacttggttttgcaccctcagttggcaacggggaacttcatcatcaaagccgtgtggttacctggttcacagaccgagttagcaattgtcaccgcagactttgttaagatttatgacctgtgtgttgatgccttgagtccaaccttctattttctcctgccaagctcaaagataagagatgttaccttccttttcaatgaggagggaaagaacatcattgttataatgtcttcggctgggtacatctatactcagcttatggaagaggccagcagtgcccagcagggacccttctatgtcactaatgtgttggaaatcaatcatgaggacctgaaggacagtaacagccaggtggcgggcggtggtgtgtccgtgtactactcccacgtgttgcagatgttgttcttcagctattgtcaaggcaaatcattcgcagccaccatcagcaggacaaccctggaggtgttgcaactcttccccatcaacatcaaaagttccaatggtggcagtaagacttctcctgctctttgccagtggtctgaggtgatgaaccaccctggcttggtgtgctgtgtccagcaaactacaggggtgccgctggtagttatggtgaaaccagacacttttcttatccaggagattaagactcttcctgctaaagcgaagatccaagacatggttgctattaggcacacggcctgcaatgagcagcagcggacaacaatgattctgctgtgtgaggatggcagcctgcgcatttacatggccaacgtggagaacacctcctactggctgcagccatccctgcagcccagcagtgtcatcagcatcatgaagcctgttcgaaagcgcaaaacagctacaatcacaacccgcacgtctagccaggtgactttccccattgacttttttgaacacaaccagcagctgacagatgtggagtttggtggtaacgacctcctacaggtctataatgcacaacagataaaacaccggctgaattccactggcatgtatgtggccaacaccaagcccggaggcttcaccattgagattagtaacaacaatagcactatggtgatgacaggcatgcggatccagattgggactcaagcaatagaacgggccccgtcatatatcgagatcttcggcagaactatgcagctcaacctgagtcgctcacgctggtttgacttccccttcaccagagaagaagccctgcaggctgataagaagctgaacctcttcattggggcctcggtggatccagcaggtgtcaccatgatagatgctgtaaaaatttatggcaagactaaggagcagtttggctggcctgatgagcccccagaagaattcccttctgcctctgtcagcaacatctgcccttcaaatctgaaccagagcaacggcactggagatagcgactcagctgcccccactacgaccagtggaactgtcctggagaggctggttgtgagttctttagaagccctggaaagctgctttgccgttggcccaatcatcgagaaggagagaaacaagaatgctgctcaggagctggccactttgctgttgtccctgccagcacctgccagtgtccagcagcagtccaagagccttctggccagcctgcacaccagccgctcggcctaccacagccacaaggatcaggccttgctgagcaaagctgtgcagtgtctcaacacatctagcaaagagggcaaggatttggaccctgaggtgttccagaggctagtgatcacagctcgctccattgccatcatgcgccccaacaaccttgtccactttacggagtcaaagctgccccagatggaaacagactgtttttttcctagatgtgcctgctggagtctagggatagttggcatattgattggggccccacttgaaactccctccccaggcaagcttccttgacctgagttaaccttaaaacaaattaaattccatctcagatttaccatcgttgataattttctttctcctgcttagaaggaatggatgaagggaaggaaccgcagaagcagttggaaggagattgctgtagtttcatcacccagcttgtgaaccacttctggaaactccatgcatccaaacccaagaatgccttcttggcacctgcctgccttccaggactaactcatattgaagctactgtcaatgctctggtggacatcatccatggctactgtacctgtgagctggattgtattaacacagcatccaagatctacatgcagatgctcttgtgtcctgatcctgctgtgagcttctcttgtaaacaagctctaattcgagtcctaaggcccaggaacaaacggagacatgtgactttaccctcttcccctcgaagcaacactccaatgggagacaaggatgatgatgacgatgatgatgcagatgagaaaatgcagtcatcagggatcccgaatggtggtcacatccgtcaggaaagccaggaacagagtgaggtggaccatggagattttgagatggtgtctgagtcgatggtcctggagacagctgaaaatgtcaacaatggcaacccctctcccctggaggccctgctggcaggcgcagagggcttcccccccatgctggacatcccacctgatgcagatgacgagaccatggttgaactagccattgccctgagcctgcagcaggaccaacaaggcagcagcagcagtgccctgggcctgcagagcctgggactgtccggccaggcacccagctcttcctctctggacgcaggaaccctctctgacaccacagcatcagctccagcctcagacgacgagggcagtacagcagcgacagatggttctacccttcggacctctcctgctgaccacggtggtagtgtgggctcggagagcgggggcagtgcagtggactcagtggctggcgagcacagtgtatctggccggagcagtgcttatggcgatgctacagctgaggggcatccggctggaccaggaagtgtcagctcaagcactggagccatcagcaccaccactgggcaccaggagggagatggctccgagggagaaggagaaggagaaactgaaggagatgtccacactagcaacaggctgcacatggtccgtctaatgctgttggagagattactgcagaccctgcctcaattacgaaacgttggcggtgtccgggccatcccatacatgcaggtcattctaatgctcactacagatctggatggagaagatgagaaagacaagggggccctagacaacctgctctcccagcttattgctgagttgggtatggataaaaaggatgtctccaagaagaatgagcgcagcgccctgaatgaagtccatctggtagtaatgagactcctgagtgtcttcatgtcccgcaccaaatctggatccaagtcttccatatgtgagtcatcttccctcatctccagtgccacagcagcagctctactgagctctggggctgtggactactgcctgcacgtgctcaaatcactgctggaatattggaagagccaacagaatgacgaggagcctgtggctaccagccagttgctgaaaccacatactacctcctccccacctgacatgagcccattctttctccgccagtatgtgaagggtcatgctgctgatgtgtttgaggcctatactcagcttctaacagaaatggtactgaggcttccttaccaaatcaaaaagattactgacaccaattctcgaatcccacctcctgtctttgaccactcgtggttttactttctctccgagtacctcatgatccagcagactccatttgtgcgccgtcaagtccgcaaacttctgctcttcatctgtggatccaaagagaagtaccgccagctccgggatttgcacaccctggactctcacgtgcgtgggatcaagaagctgctagaagagcaggggatattcctccgggcaagtgtggttacagccagctcaggctccgccttgcaatatgacacactcatcagcctgatggagcacctgaaagcctgtgcagagattgccgcccagcgaaccatcaactggcagaaattctgcatcaaagatgactccgtcctgtacttcctcctccaagtcagtttccttgtggatgagggcgtgtccccagtgctgctgcaactgctctcctgtgctctctgcggcagcaaggtgctcgctgcactggcagcctcttcgggatcctccagtgcttcttcctcctcagcccctgtggctgccagttctggacaagccacaacacagtccaagtcttccactaaaaagagcaag

SEQ ID NO: 356707 - DNA, 1275 bp, Homo sapiens
gagcacatatactaaaattggaacgatacagagaagattagcatggcccctgcgcaaggatgacacgcaaattcgtgaagcgttccatattttaggcggtatgagtttggctgggggccgggcaccccggaagaccgctgggaaccggctttctgggcttttggaggcagaggaggaagatgagttctaccagacgacttatgggggtttcacagaggaatccggagatgatgagtatcaaggggaccagtcagacacagaggacgaagtggactctgactttgacattgatgaaggggatgaaccatccagtgatggagaagcagaagagccaagaaggaagcgccgagtagtcaccaaggcctataaggaacctctcaagagcttaaggcctcgaaaggtcaacaccccggctggtagctctcagaaggcgcgagaagagaaggcactactgccattagaactacaagatgacggctctgacagtcggaagtctatgcgtcagtctacagctgagcatacacgacaaacgttccttcgggtacaggagaggcagggccagtcaagacggcgaaaggggccccactgtgagcggccactaacccaggaggaactgctccgggaggccaagatcacagaagagcttaatttacggtcactggagacatatgagcggctcgaggctgataaaaagaagcaggttcataagaagcggaagtgccccgggcccataatcacctatcattcagtgacagtgccacttgttggggagccaggccccaaggaagagaacgttgacatagaaggacttgatcctgctccctcggtgtctgcattgactcctcatgctgggactggacccgtcaacccccctgctcgctgctcacgtaccttcatcacttttagtgatgatgcaactttcgaggaatggttcccccaagggcggcccccaaaagtccctgttcgtgaggtctgtccagtgacccatcgtccagccctataccgggaccctgttacagacataccctatgccactgctcgagccttcaagatcattcgtgaggcttacaagaagtacattactgcccatggactgccgcccactgcctcagccctgggccccggcccgccacctcctgagcccctccctggctctgggccccgagccttgcgcgtcatctctgatctttgcctaatctgtttctttttccttttcccctagttcttacaggtttcgttgtgttttttaatctaataaaatagaaagatcccttt

SEQ ID NO: 356708 - DNA, 6457 bp, Homo sapiens
gtgacctagaggttccgccacaagcgcgatctcaaaggtccaggtctctttggatgagcatttttctaagatggctgctgagactgatcctcataagtcgtctgagattaccaagaacctacttccagccacgctgcaactcattgacacctatgcatcgttcaccagagcctatttgctgcaaaactttaatgaagagggaacaactgagaaaccttccaaggagaaactgcaaggctttgctgctgttttggctattggctctagcaggtgcaaggcaaatactctgggtccgacactggttcagaatttgccatcgtcagtgcagactgtgtgtgagtcctggaacaacatcaataccaatgaatttcccaatattggatcctggcgcaatgcctttgccaatgacaccatcccttcagagagttatattagtgcagtgcaggctgcacacctggggactctctgtagccaaagtctgcccctggctgcttccctgaagcataccctcctctcactggtcaggttgactggagatcttattgtttggtcagatgagatgaacccaccacaggtaattcggacactgctacctcttcttttggaatcaagcactgagagtgttgccgagatcagtagcaactccctggaacgcatcttgggccctgctgagtctgatgagttcttggctcgtgtttatgagaagctgatcactggttgttacaacattctggccaatcatgcagatcctaacagtggactggatgaatccatcctggaggaatgtctccagtacttggaaaagcagctggaaagtagccaggctcgtaaagctatggaggagtttttctctgacagtggagaacttgtacagatcatgatggcaacagccaatgagaacctctctgctaaattctgtaaccgagttttgaaattcttcaccaaactcttccagctgactgagaagagccctaacccgagcctgttgcatctctgtggctccctggcacaactggcctgtgtggaacctgtgcgcctgcaggcctggctcacccgcatgactacatcgcccccaaaagattctgatcagctggatgtaattcaggagaaccggcagctgctgcagttactgaccacatacattgttcgggaaaacagccaagttggggaaggtgtgtgtgctgttcttctgggcaccctgactcccatggcaacagagatgctggccaacggtgatgggactggcttccctgaacttatggttgtgatggccactctggccagtgcaggtcaaggtgctggtcaccttcagcttcataatgctgctgtggattggctgagcagatgcaagaaatacctgtcacagaagaatgtagttgaaaaactgaatgccaatgtaatgcatggaaagcatgtgatgatcttggagtgcacatgccatatcatgtcttacttggctgatgtcacgaatgccctgagccagagtaatggtcaaggcccaagtcatctctcagtggatggggaagagcgggccattgaagtagactcagactgggtggaggagttggcggtggaagaggaagattcccaggctgaggattcagatgaagattctctttgcaataaactctgcacttttacgatcacacagaaagaattcatgaaccagcattggtaccactgtcacacctgtaaaatggtggatggcgtgggtgtctgcacagtgtgtgctaaggtgtgccacaaggatcatgagatttcctatgccaagtatggatccttcttctgtgactgtggagccaaggaagatggcagctgtttggctctggtgaagagaactcctagcagtggcatgagctctaccatgaaggagtcggcatttcagagtgaacccaggatttcagagagtctagtgcgtcatgccagcacctcctcgccagctgacaaagccaaggttaccatcagtgatggaaaggttgctgacgaagagaagcccaagaagagcagcctctgccgcacagtagagggctgccgggaggaattacagaaccaggccaatttctccttcgctcctctcgtgttagacatgcttaatttccttatggatgccattcagaccaacttccagcaagcttcagccgtcgggagcagcagccgtgctcagcaagccctcagtgagctacacactgtggagaaggcagtggagatgacagaccagctgatggttcccaccttagggtcccaggaaggtgcctttgagaatgtgcggatgaattacagtggagaccagggccagaccatccggcagctgatcagtgctcatgtgctcaggcgggtggctatgtgtgtgctctcctctccccatgggcgccgccaacatttggctgtcagccatgagaagggcaagatcaccgttctgcagctctctgcactcctgaagcaagcagattccagcaaaaggaagttaactctgacccgcttggcttctgccccagttccttttactgtgttgagcctcacaggaaatccctgcaaggaagactacttggcggtttgtgggctaaaggactgtcatgtgctcacctttagtagctcaggctctgtttcggatcacttggttttgcaccctcagttggcaacggggaacttcatcatcaaagccgtgtggttacctggttcacagaccgagttagcaattgtcaccgcagactttgttaagatttatgacctgtgtgttgatgccttgagtccaaccttctattttctcctgccaagctcaaagataagagatgttaccttccttttcaatgaggagggaaagaacatcattgttataatgtcttcggctgggtacatctatactcagcttatggaagaggccagcagtgcccagcagggacccttctatgtcactaatgtgttggaaatcaatcatgaggacctgaaggacagtaacagccaggtggcgggcggtggtgtgtccgtgtactactcccacgtgttgcagatgttgttcttcagctattgtcaaggcaaatcattcgcagccaccatcagcaggacaaccctggaggtgttgcaactcttccccatcaacatcaaaagttccaatggtggcagtaagacttctcctgctctttgccagtggtctgaggtgatgaaccaccctggcttggtgtgctgtgtccagcaaactacaggggtgccgctggtagttatggtgaaaccagacacttttcttatccaggagattaagactcttcctgctaaagcgaagatccaagacatggttgctattaggcacacggcctgcaatgagcagcagcggacaacaatgattctgctgtgtgaggatggcagcctgcgcatttacatggccaacgtggagaacacctcctactggctgcagccatccctgcagcccagcagtgtcatcagcatcatgaagcctgttcgaaagcgcaaaacagctacaatcacaacccgcacgtctagccaggtgactttccccattgacttttttgaacacaaccagcagctgacagatgtggagtttggtggtaacgacctcctacaggtctataatgcacaacagataaaacaccggctgaattccactggcatgtatgtggccaacaccaagcccggaggcttcaccattgagattagtaacaacaatagcactatggtgatgacaggcatgcggatccagattgggactcaagcaatagaacgggccccgtcatatatcgagatcttcggcagaactatgcagctcaacctgagtcgctcacgctggtttgacttccccttcaccagagaagaagccctgcaggctgataagaagctgaacctcttcattggggcctcggtggatccagcaggtgtcaccatgatagatgctgtaaaaatttatggcaagactaaggagcagtttggctggcctgatgagcccccagaagaattcccttctgcctctgtcagcaacatctgcccttcaaatctgaaccagagcaacggcactggagatagcgactcagctgcccccactacgaccagtggaactgtcctggagaggctggttgtgagttctttagaagccctggaaagctgctttgccgttggcccaatcatcgagaaggagagaaacaagaatgctgctcaggagctggccactttgctgttgtccctgccagcacctgccagtgtccagcagcagtccaagagccttctggccagcctgcacaccagccgctcggcctaccacagccacaaggatcaggccttgctgagcaaagctgtgcagtgtctcaacacatctagcaaagagggcaaggatttggaccctgaggtgttccagaggctagtgatcacagctcgctccattgccatcatgcgccccaacaaccttgtccactttacggagtcaaagctgccccagatggaaacagactgtttttttcctagatgtgcctgctggagtctagggatagttggcatattgattggggccccacttgaaactccctccccaggcaagcttccttgacctgagttaaccttaaaacaaattaaattccatctcagatttaccatcgttgataattttctttctcctgcttagaaggaatggatgaagggaaggaaccgcagaagcagttggaaggagattgctgtagtttcatcacccagcttgtgaaccacttctggaaactccatgcatccaaacccaagaatgccttcttggcacctgcctgccttccaggactaactcatattgaagctactgtcaatgctctggtggacatcatccatggctactgtacctgtgagctggattgtattaacacagcatccaagatctacatgcagatgctcttgtgtcctgatcctgctgtgagcttctcttgtaaacaagctctaattcgagtcctaaggcccaggaacaaacggagacatgtgactttaccctcttcccctcgaagcaacactccaatgggagacaaggatgatgatgacgatgatgatgcagatgagaaaatgcagtcatcagggatcccgaatggtggtcacatccgtcaggaaagccaggaacagagtgaggtggaccatggagattttgagatggtgtctgagtcgatggtcctggagacagctgaaaatgtcaacaatggcaacccctctcccctggaggccctgctggcaggcgcagagggcttcccccccatgctggacatcccacctgatgcagatgacgagaccatggttgaactagccattgccctgagcctgcagcaggaccaacaaggcagcagcagcagtgccctgggcctgcagagcctgggactgtccggccaggcacccagctcttcctctctggacgcaggaaccctctctgacaccacagcatcagctccagcctcagacgacgagggcagtacagcagcgacagatggttctacccttcggacctctcctgctgaccacggtggtagtgtgggctcggagagcgggggcagtgcagtggactcagtggctggcgagcacagtgtatctggccggagcagtgcttatggcgatgctacagctgaggggcatccggctggaccaggaagtgtcagctcaagcactggagccatcagcaccaccactgggcaccaggagggagatggctccgagggagaaggagaaggagaaactgaaggagatgtccacactagcaacaggctgcacatggtccgtctaatgctgttggagagattactgcagaccctgcctcaattacgaaacgttggcggtgtccgggccatcccatacatgcaggtcattctaatgctcactacagatctggatggagaagatgagaaagacaagggggccctagacaacctgctctcccagcttattgctgagttgggtatggataaaaaggatgtctccaagaagaatgagcgcagcgccctgaatgaagtccatctggtagtaatgagactcctgagtgtcttcatgtcccgcaccaaatctggatccaagtcttccatatgtgaggtatttttgctttgggttcatgggtttggggaaaggtaagcggattgtctgggtagtgctagggccagcacagaggtggtagtcctctgtaagaataaagccattgttccctgaggggagtaagattctaagctgtcaccttttcaagagcagaacctccaccttttcccgaatcccttccaagctctggtctttggtaacaatccctccaatggaggggtaaaagggtttggaagttccattattgaagagcagggctctcttctgcaaggcacagagtggctaagaggattcccctagtgtatgttgctataaggtatggtaataaagcagagagaaagcaatgtgtgtgtggtgaaaggagattagcataaagcagagaaggtagaaattgaggtaccgtgacggg

SEQ ID NO: 356709 - DNA, 1573 bp, Homo sapiens
gagcacatatactaaaattggaacgatacagagaagattagcatggcccctgcgcaaggatgacacgcaaattcgtgaagcgttccatattttaggcggtatgagtttggctgggggccgggcaccccggaagaccgctgggaaccggctttctgggcttttggaggcagaggaggaagatgagttctaccagacgacttatgggggtttcacagaggaatccggagatgatgagtatcaaggggaccagtcagacacagaggacgaagtggactctgactttgacattgatgaaggggatgaaccatccagtgatggagaagcagaagagccaagaaggaagcgccgagtagtcaccaaggcctataaggaacctctcaagagcttaaggcctcgaaaggtcaacaccccggctggtagctctcagaaggcgcgagaagagaaggcactactgccattagaactacaagatgacggctctgacagtcggaagtctatgcgtcagtctacagctgagcatacacgacaaacgttccttcgggtacaggagaggcagggccagtcaagacggcgaaaggggccccactgtgagcggccactaacccaggaggaactgctccgggaggccaagatcacagaagagcttaatttacggtcactggagacatatgagcggctcgaggctgataaaaagaagcaggttcataagaagcggaagtgccccgggcccataatcacctatcattcagtgacagtgccacttgttggggagccaggccccaaggaagagaacgttgacatagaagggtgagtgaatctcaagaggaaaagagattgtgtgttcagctcatgttctcttggccccattttgcttgcttttctcacacagctctccttaacacttggagatttctttcagattcctaactcccttcagctcaatttctttttctttttttttttttgagacatgatgctgctctgtcacctaggctggaatgcagtggtgcagtctcggctcactgcaacctccacctcctgtgctcaggcgatcctcccaccttagcctcccaagtagctgggagtacagccacacatgctaatttttgtattttttgtagagacggtttcgctgtgttgcccagactcctgggttaaagtaatcgtcccgcttcatcttcctaaaatactgggattacaggtgtgagccaccgcgcccagcccagcttatttctttcttattcctttttcttttagcttctctgttcttctctttcctgtttttccttctagcctagctttcttttcccatcagtcacttagtacgttcctcagaatgttcccaacaccctgcctcctttttctctttcctcatctctctgatttccttctttctttcttttcttttttttttttttttgagatggagtctcgctgctctgtcacccaggctggagtgtaatggcacgatcttggttccatgcaacctccgcctcctggcttcaagtgattctcctgcctcaacctcctgagtagctgtgattacaggcatccgccaccacgcccggctaat

SEQ ID NO: 356710 - DNA, 4579 bp, Homo sapiens
gtgacctagaggttccgccacaagcgcgatctcaaaggtccaggtctctttggatgagcatttttctaagatggctgctgagactgatcctcataagtcgtctgagattaccaagaacctacttccagccacgctgcaactcattgacacctatgcatcgttcaccagagcctatttgctgcaaaactttaatgaagagggaacaactgagaaaccttccaaggagaaactgcaaggctttgctgctgttttggctattggctctagcaggtgcaaggcaaatactctgggtccgacactggttcagaatttgccatcgtcagtgcagactgtgtgtgagtcctggaacaacatcaataccaatgaatttcccaatattggatcctggcgcaatgcctttgccaatgacaccatcccttcagagagttatattagtgcagtgcaggctgcacacctggggactctctgtagccaaagtctgcccctggctgcttccctgaagcataccctcctctcactggtcaggttgactggagatcttattgtttggtcagatgagatgaacccaccacaggtaattcggacactgctacctcttcttttggaatcaagcactgagagtgttgccgagatcagtagcaactccctggaacgcatcttgggccctgctgagtctgatgagttcttggctcgtgtttatgagaagctgatcactggttgttacaacattctggccaatcatgcagatcctaacagtggactggatgaatccatcctggaggaatgtctccagtacttggaaaagcagctggaaagtagccaggctcgtaaagctatggaggagtttttctctgacagtggagaacttgtacagatcatgatggcaacagccaatgagaacctctctgctaaattctgtaaccgagttttgaaattcttcaccaaactcttccagctgactgagaagagccctaacccgagcctgttgcatctctgtggctccctggcacaactggcctgtgtggaacctgtgcgcctgcaggcctggctcacccgcatgactacatcgcccccaaaagattctgatcagctggatgtaattcaggagaaccggcagctgctgcagttactgaccacatacattgttcgggaaaacagccaagttggggaaggtgtgtgtgctgttcttctgggcaccctgactcccatggcaacagagatgctggccaacggtgatgggactggcttccctgaacttatggttgtgatggccactctggccagtgcaggtcaaggtgctggtcaccttcagcttcataatgctgctgtggattggctgagcagatgcaagaaatacctgtcacagaagaatgtagttgaaaaactgaatgccaatgtaatgcatggaaagcatgtgatgatcttggagtgcacatgccatatcatgtcttacttggctgatgtcacgaatgccctgagccagagtaatggtcaaggcccaagtcatctctcagtggatggggaagagcgggccattgaagtagactcagactgggtggaggagttggcggtggaagaggaagattcccaggctgaggattcagatgaagattctctttgcaataaactctgcacttttacgatcacacagaaagaattcatgaaccagcattggtaccactgtcacacctgtaaaatggtggatggcgtgggtgtctgcacagtgtgtgctaaggtgtgccacaaggatcatgagatttcctatgccaagtatggatccttcttctgtgactgtggagccaaggaagatggcagctgtttggctctggtgaagagaactcctagcagtggcatgagctctaccatgaaggagtcggcatttcagagtgaacccaggatttcagagagtctagtgcgtcatgccagcacctcctcgccagctgacaaagccaaggttaccatcagtgatggaaaggttgctgacgaagagaagcccaagaagagcagcctctgccgcacagtagagggctgccgggaggaattacagaaccaggccaatttctccttcgctcctctcgtgttagacatgcttaatttccttatggatgccattcagaccaacttccagcaagcttcagccgtcgggagcagcagccgtgctcagcaagccctcagtgagctacacactgtggagaaggcagtggagatgacagaccagctgatggttcccaccttagggtcccaggaaggtgcctttgagaatgtgcggatgaattacagtggagaccagggccagaccatccggcagctgatcagtgctcatgtgctcaggcgggtggctatgtgtgtgctctcctctccccatgggcgccgccaacatttggctgtcagccatgagaagggcaagatcaccgttctgcagctctctgcactcctgaagcaagcagattccagcaaaaggaagttaactctgacccgcttggcttctgccccagttccttttactgtgttgagcctcacaggaaatccctgcaaggaagactacttggcggtttgtgggctaaaggactgtcatgtgctcacctttagtagctcaggctctgtttcggatcacttggttttgcaccctcagttggcaacggggaacttcatcatcaaagccgtgtggttacctggttcacagaccgagttagcaattgtcaccgcagactttgttaagatttatgacctgtgtgttgatgccttgagtccaaccttctattttctcctgccaagctcaaagataagagatgttaccttccttttcaatgaggagggaaagaacatcattgttataatgtcttcggctgggtacatctatactcagcttatggaagaggccagcagtgcccagcagggacccttctatgtcactaatgtgttggaaatcaatcatgaggacctgaaggacagtaacagccaggtggcgggcggtggtgtgtccgtgtactactcccacgtgttgcagatgttgttcttcagctattgtcaaggcaaatcattcgcagccaccatcagcaggacaaccctggaggtgttgcaactcttccccatcaacatcaaaagttccaatggtggcagtaagacttctcctgctctttgccagtggtctgaggtgatgaaccaccctggcttggtgtgctgtgtccagcaaactacaggggtgccgctggtagttatggtgaaaccagacacttttcttatccaggagattaagactcttcctgctaaagcgaagatccaagacatggttgctattaggcacacggcctgcaatgagcagcagcggacaacaatgattctgctgtgtgaggatggcagcctgcgcatttacatggccaacgtggagaacacctcctactggctgcagccatccctgcagcccagcagtgtcatcagcatcatgaagcctgttcgaaagcgcaaaacagctacaatcacaacccgcacgtctagccaggtgactttccccattgacttttttgaacacaaccagcagctgacagatgtggagtttggtggtaacgacctcctacaggtctataatgcacaacagataaaacaccggctgaattccactggcatgtatgtggccaacaccaagcccggaggcttcaccattgagattagtaacaacaatagcactatggtgatgacaggcatgcggatccagattgggactcaagcaatagaacgggccccgtcatatatcgagatcttcggcagaactatgcagctcaacctgagtcgctcacgctggtttgacttccccttcaccagagaagaagccctgcaggctgataagaagctgaacctcttcagtgagtcaccaacccctggtgcagactctgtcctcattgtgactgcgaaattgggagccactggcctgtggctgtccaacattctgggatctctccactctgctgatttttctgtcctttcatcaggaaactttgagcttcatttgatgtattaaagaggcaaggtgacaggaaaggagtacaccggagcatggtagcagtaaagatagggctgcactgtgttgagtattcatttcaatagtgttgtgtccacctcactaatggggctacttctgtgtttaggccgagaggaggcagattgacatgaaattgcaaggctttcttaacgcacagaggaagacctcaggtcacacatggctgagagatggttggcaatggcttgctatgccactgaaaactaaactctcagaatacaaatccttgagccttactcaagactgcatttctctgtcatttattggccactgtctgatattctttcttctagatatagttgctgttagtgtgaatgatcatgatctgtactttgaacaaagaaagtgtgtagagacccctgggagtgaggggtaggggatacaatactctgaagcagaagaggacccttgcagtgatggttagggactcttctgagtaggagacgtaatcggcttttggtccatggaacttttaccacatgtattcagcatatatacacgattaaagtgctgcaaatatctcag

SEQ ID NO: 356711 - DNA, 554 bp, Homo sapiens
gagcacatatactaaaattggaacgatacagagaagattagcatggcccctgcgcaaggatgacacgcaaattcgtgaagcgttccatattttaggcggtatgagtttggctgggggccgggcaccccggaagaccgctgggaaccggctttctgggcttttggaggcagcctataccgggaccctgttacagacataccctatgccactgctcgagccttcaagatcattcgtgaggcttacaagaagtacattactgcccatggactgccgcccactgcctcagccctgggccccggcccgccacctcctgagcccctccctggctctgggccccgagccttgcgccagaaaattgtcattaaatgaagagatgtctagtcctcagaaacttctttcctgccctgattggggctcttgctgttccgtttcttctccctgcttctcccctttgtcatctctgatctttgcctaatctgtttctttttccttttcccctagttcttacaggtttcgttgtgttttttaatctaataaaatagaaagatcccttt

SEQ ID NO: 356712 - DNA, 405 bp, Homo sapiens
atcaagaaaagtaaactggattatagtttcttaggtcatggtctaccttttgctgttgccttattgagtagtctgaaggttcctgaaaacagcgccttgcgtggggatggggtagaacaaaggcaggttcggtaagagctgcagcggttgcagcagtgtgtgggtcatggtcccaggttgaccagacatctcagcaagcatctgccttgctcagaagatcatgttcaggtgtagtccaaagtcagggagatggctccaggcagcaggtgtggtgcttgtctgggcaatgtggtggagttactcctttcccgtggttggttcctatttcagatggagcacctgaaagcctgtgcagagattgccgcccagcgaaccatcaactggcagaaattctgcatcaaagat

SEQ ID NO: 356713 - DNA, 251 bp, Homo sapiens
ctctggtgaagagaactcctagcagtggcatgagctctaccatgaaggagtcggcatttcagagtgaacccaggatttcagagagtctagtgcgtcatgccagcacctcctcgccagctgacaaagccaaggttaccatcagtgatggaaaggttgctgacgaagagaagcccaagaagagcagcctctgccgcacagtagagggctgccgggaggaattacagaaccaggtggggctgactgatgctccc

SEQ ID NO: 356714 - DNA, 1322 bp, Homo sapiens
tgctttaattccaagcaaatttgttttttaaaatataattattaaacacaaactaaaatactatactgtatacttgtcagtaaacctttttaaagatatggcttaaatcattaaaacaatgttacacttaccatttgaaaatttgtcattttaggaggtgaaaggagcagtgtcattttggctttttggattcagttattatataactaagtatatttaggtgtgaaattaagaagaactgcgtttttaaaaattgctccttcttcttacattagcactaagccaagggacaattacattttaattggtaaagtagatacagtcagcctttcacatacatggtttctgcatcatggattcaaccaaacacggagtgaaaatatttggaaaaaaaattgagtctgtagtgacacgtacagacatgttttcttgtcgttattacataaacaatatagtatagcaactgtttacatagcacttacattgtataggcattgtaagtaatctagagatgatttaaagtactgtatagtgcatagggctatatgcaagtactatgcattttatatcagggacttttaagcatttgcagattttggtatccacagaaggtattggaaccaatccctcatggatactgagggatgactactatgaaaaatttactatactgtaataatttgtagtaaaaatttactgtagtacagtaaaggaaaattaatcttagatgcaaaaatttgagattaaattaccagttcttacttgattactagttcttaatgtcataatgttgatattatgatgtctttttaaggttatattgcctggagatatatttcatggttactaaataattgatttattattagtataaattgtatgttttaaagaaattttttaaagcagaaaagtgcaaaggataatataaaaaacatctttatttttgtcctccttaattaacagcaaattttaaaaacttgctttcagtcactagtttctacatgtgtattcttgtttattatgcatgaagttgaaactttattcattaataaacttattaatgtataaacttttaactttgtcatccatcaaaacagctaactctggtttcccaaaaccagattatgaaatattaggttgagcttttttacacacgaactcaaggagaaactgggaagcaaatttgacacatttgaaatagacacagccaggtgtggtggtatgcacttgtaatcccagcactgtaggaggctggggcagaggaatcatttgagcccaggagctcaagaccagcctgcgcaacatagtgggaccctgtctct

SEQ ID NO: 356715 - DNA, 751 bp, Homo sapiens
taacaaaagttgtgtcagatatcaactggattttcagtttagtctttagggtagataatttataaggacaaattattgtctggctgtgccattataatgcctgtcactatttgttatgggtttaagggtgagtctgcattggatatttcataggttgggagaagtggcagcagaaataggtaactgaaatgttttctaaaatggaagccatatcttaattataccaagaaatattatttaacatgcagataactgagtttcctcagactttgttttaccatttttttggagtggacatacgtgtatagactgacggtttttgttttcttttaagaaatgaatgagctcatttttgtaatatctttttgctctgtaggagtctctacagacctgatgctgttgcacagcctgtgacagagaatgagttttctttggaatctgagattatttcaaaactatacatcccaaagagaaagattatttctccacgatctataaaagatgtgcttcctcctgttgaagaggctgttgacaggtgtctctacctactggaccgttttgcacagcctgtgacaaaggataagtttgctttggaatctgaggtagagtactctcttgtgaaattaattttctcattctgaatctcattttttgtattattttcttctagcaaataataggtagcaattgtctacctatcattgttttatgttagtattaaaacttttattagagataaccattttaaaga

SEQ ID NO: 356716 - DNA, 758 bp, Homo sapiens
taacaaaagttgtgtcagatatcaactggattttcagtttagtctttagggtagataatttataaggacaaattattgtctggctgtgccattataatgcctgtcactatttgttatgggtttaagggtgagtctgcattggatatttcataggttgggagaagtggcagcagaaataggtaactgaaatgttttctaaaatggaagccatatcttaattataccaagaaatattatttaacatgcagataactgagtttcctcagactttgttttaccatttttttggagtggacatacgtgtatagactgacggtttttgttttcttttaagaaatgaatgagctcatttttgtaatatctttttgctctgtaggagtctctacagacctgatgctgttgcacagcctgtgacagagaatgagttttctttggaatctgagattatttcaaaactatacatcccaaagagaaagattatttctccacgatctataaaagatgtgcttcctcctgttgaagaggctgttgacaggtgtctctacctactggaccgttttgcacagcctgtgacaaaggataagtttgctttggaatctgagaatatttcagaaccatactttacgaacagaaggactatttctcaacaatctgcagaaaattagatgctgcatgtggcattgcaaacaggaaatggaacatgttttagccaaatgttgataggaggaagcctccagcactgcaaagcaaattttcct

SEQ ID NO: 356717 - DNA, 976 bp, Homo sapiens
taacaaaagttgtgtcagatatcaactggattttcagtttagtctttagggtagataatttataaggacaaattattgtctggctgtgccattataatgcctgtcactatttgttatgggtttaagggtgagtctgcattggatatttcataggttgggagaagtggcagcagaaataggtaactgaaatgttttctaaaatggaagccatatcttaattataccaagaaatattatttaacatgcagataactgagtttcctcagactttgttttaccatttttttggagtggacatacgtgtatagactgacggtttttgttttcttttaagaaatgaatgagctcatttttgtaatatctttttgctctgtaggagtctctacagacctgatgctgttgcacagcctgtgacagagaatgagttttctttggaatctgagattatttcaaaactatacatcccaaagagaaagattatttctccacgatctataaaagatgtgcttcctcctgttgaagaggctgttgacaggtgtctctacctactggaccgttttgcacagcctgtgacaaaggataagtttgctttggaatctgagaatatttcagaaccatactttacgaacagaaggactatttctcaacaatctgcagaaaatttagatgctgcatgtggcattgacaaaacagaaaatggaaacatgtttgaagaccaaaatgttgataaggaaggaaaagcactaccagcaactggacaaaaagcaaatgtgaatgaaaagatggcaagagaactaaagttgagaatccagaagttgaaaatatcagaagccttcatgactgtggatgacatgagtatttttagaaacgatttttctccaagtagatatctaaagtaatgattgagagcatttcctgccagcagaagcgaatgatacattttcttttctttttttttgagacggagtctcactct

SEQ ID NO: 356718 - DNA, 5595 bp, Homo sapiens
agcggggcggaggcggtgagcgcgggcggcgcggacggcagcggttggcgggcgggtcctccgctgttgcggccgctgcggcctccttgcccgggcttggggcgccgcgctggggaaagccgggggcccggacacattggcgtgagacctgggagtacgttgtgccaaatcattgccacttgccacatgagtgtaaatgatggcggatgccaagtatgtcctctgccgatgggaaaagcgattatggcctgcgaaggttttggcccgaaccgcgacttcaacaaaaaataagagaagaaaggaatattttctagctgtgcaaatcctctccctagaggaaaagttaagtgttgtgttgttttaatactgttttttcccgtgtagatttctgatacttcaatcccctactcccccaaaacagttgaagcccagcccactcttaatgggcttattcaccatttgtgtaattcattaatgctcataataacctcatgagaaagcaactagtttgattttatgtcagtttggaagctgaagatccaaacgaggcattctgtgagatctatggagagattggtacaaacactgaatacatgtaaattatactcagggtagaccctatttgtggttaaaatagggatatttccttttttttttttttttttgactgtttcttaatcagtgccatgccaggaaaatagggatgtttccttcccagagatctgtgtgtcttttttcagaaacgtctgtgacaggcccatcaattttgaaatatttggtttttgagcctgtcactctaaaccagcgtttaacgttcaaaaggcaaataactgatgaccaggcggcacattgttctgctccgtgagtgtctggcactgggaaaggtgtagattgtctagaatgacagcaattccgacgccccagtcagtcctgcgtgattgtggcgagggcgcgtctggcaccgggaaggtgtagatcatctagaatgacggcgattccgacgccccggtcagtcctgcgtgattggcgagggtgcatctgtcgtgagaattcccagttctgaagagagcaaggagactgatcccgcgtagtccaaggcattggctcccctgttgctcttccttgtggagctccccctgccccactccctcctgcctgcatcttcagagctgcctctgaagctcgcttggtccctagctcacactttccctgcggctgggaaggtaattgaatactcgagtttaaaaggaaagcacatccttttaaaccaaaacacacctgctgggctgtaaacagcttttagtgacattaccatctactctgaaaatctaacaaaggagtgatttgtgcagttgaaagtaggatttgcttcataaaagtcacaatttgaattcatttttgcttttaaatccagccaaccttttctgtcttaaaaggaaaaaaaaaaaaaaaccattcaccagggttcttgctgcctgtaacctcaggcagatgaattcctagttggctgtgacttttggtttaagtggaaggttgaggaggaaaatgaaaataattcttttgttatctaaaggaaaacatgtttgaaaatgtcttggcggcgttggctggtggtgtgtaacgtcgattttgtctctgcagaattaaggtgaaaagcactgaagttgagatcctagagaagtctcaaattgaagccattgcttcctcgttagggaacgcgaatcccctgagctgaaggagaaggaaaaatggatccgctttcttaaacctttccagaatttgcccctagaaccactcctattcttgacgcccagaatggtccctcacagaatgaggttcctgcggcacccctggaagaactggcctacagacggtcgcttcgcgtggctctggacgttctgagcgagggctcgatttggagtcaagaaagctctgcagggacaggtagagctgaccggtctctgcgagggaagcccatggagcatgtctcctcgccctgtgattcgaactcctcatctcttccccgcggagacgtgttgggcagttccagacctcacaggaggaggccatgtgtgcaacaaagcctgtcaagttcgttcacttgtgaaaaggaccccgagtgcaaagtggaccacaagaaggggctcaggaaaagtgaaaacccaagaggcccgttggtcctcccagctggaggtggtgcccaagatgagagtgggtccagaatccaccacaaaaattggactcttgcaagtaagaggggaagaaactcagcgcagaaggctagcttgtgcctgaatggatcttccctttcagaggacgacacggagagagacatggggagcaaaggaggcagctgggcagccccgtccttgccctccggggtcagggaggacgatccctgtgccaacgctgagggacacgaccccggtctgccgttgggcagcctcactgcgcccccagcccctgagccctcggcctgctcagagcctggagaatgccctgcgaaaaagaggccgcgcctggatggcagccaaaggccgcctgccgtgcagctggagcccatggcagcaggggccgcaccatcccccgggccggggccagggcccagagagtctgtgaccccgcgcagcaccgccaggctgggcccgcctccctcccacgcctctgcggatgcaaccagatgtcttccttgcccggattcccagaagctggagaaagagtgccagtcttccgaagagtccatggggtctaattccatgcgttctatcctggaggaagacgaggaagacgaggagccaccaagagtccttttataccacgaaccacgttcgtttgaagtaggaatgctagtctggcataaacataaaaaataccccttctggccagcagtggtcaaaagcgtcaggcagagagataagaaagcaagtgtgctatacatcgaaggacacatgaacccgaaaatgaaaggtttcacagtgtctcttaaaagtttaaagcactttgattgtaaagagaaacagacgcttctgaatcaagccagggaggacttcaaccaggacatcggctggtgtgtctccctcatcaccgactacagggtccggttaggctgcgggtcttttgctggctctttcctggaatattacgcggctgatataagctatcctgtccgaaaatccatccagcaggacgtcttggggaccaagcttcctcaactgagcaaggggagccccgaggagcccgtggtggggtgccccctggggcagaggcagccctgccggaaaatgctccccgaccgctcgcgggccgcccgggaccgggccaaccagaagctggtggagtacattgtgaaggccaagggcgcggagagccacctgcgggccatcctaaagagcaggaagccatctcgctggctgcagaccttcctgagctccagccagtacgtgacctgtgtggagacctacctggaggatgaggggcagctggacctggtggtgaagtacctgcagggcgtctaccaggaggtgggggccaaggtgctccagcgcaccaacggcgaccggatccggttcattctggacgtgcttctgcccgaggccatcatctgtgcgatctctgcggtggacgaggtggactacaagacggctgaggagaagtacatcaaggggccttcgctgagctaccgggaaaaagaaatatttgacaaccagctccttgaagagcggaaccggcgccgtcggtgagggagcagccggctgtgctgtcagcggggcctggcggtggaagcgcctccagtgtgcatgagcgtgtctgaagatggggggctcagggggcacgtttgcgtttggacctgtctgtgcgttctcctgcgtggcagtcctgatttccatacttctggagaatccatttcgttaacactgaaagccagttctcttttcctggcagtttttttcattttatttttggcattttttacaagataccgttcgggaaaggcttttgaaaggacggaagcgtattcactgtgcgccagtactcctggctgtgctgtggtttctcccgacgtgcacatcgatctcgtatgtgtggcatctgatattaaacgggaggttttaagaagcgtctgccgtgatcatggagcttcggaagcgggaatggttcttccgggtttgctgttttgtctgtttcccccttgtgtggtttccgcctgcgacagttccagaatttgctctcccactcagtgtgctctgcagctgtgaggaaacagccttcgttagaggcgggagcagagacgagccgctgctctgtgtcgtgtttgctgtggccgcagggagaggagcgggacacgcacctttccaggggcctctgtgtcccgcactgtgtgtgagtggaccgcagcgcgcagccacatgccctggctgccatgggccagaccgcctccacctcccccgcccgcctggcctgtcctgagtgcatttccctgcactgtgtcgtcactgcacagccagtcaccgcggtctcagtcatcggcgcggatggctatgctggggtcccagggtggccgcagcagtcagggtcactgtgggagccctggggtggagtgacaaaccgcattgtcctgtgcccgccatggcagaagcgcagcctttgtatggaggcccaaccgcgctcccgtctggagaagcggcttccggggtgtggctgccgggtcggctctggtccacagcacggtgccggggctgcaggttgttgagggctgtgactccgtggggctcagccaggctccagcagggtcagacgtgctgttaagagcaaagccacagacgatgacttgtccattctcagtggatgctccaggctgtgcctacacagcagtgctggtgacatgtccagggttccagggcccggtggcctgggagctgctttctccccactggctgggctgcatctggccctggctggaggccttgctttgaggggctgtgaccctcttcccccaggccctccccagccgacgacagccaccggagaggagatcggaacacgattgtctcagatgcagggcgctgtgcgggacgaagccgcaaggactctcgtatcgggcccttgggactcgggaggtgccagaggcggcggctgctctggacctcggtgttcactgacctttgtttcacttgcctctgctcgactccgagagcaggaaacccggccgtggcctggcagctccgcctcccatgcccgcacgctggggtctgtcttgtctggagcagtggggcacaccccggaggaggcgggggtcagggctgtcggccttggccccctgctggtcgctgtttcggggactcggggcggccagtaccaccgcctgaggcggggctcagcagcgttgcatgtacgggcctcgtactgcctcatggaaaatcctccggagccgccctccattgtgggttcctgagagtaggacacattgccatggttttgtgggaatcacgcgcccctgatggaacttttctgctgttgtgaagtacttttatccatttgcttctctgctgaccttgccaagttgttcgaggtggaattaaacacctcccagacctc

SEQ ID NO: 356719 - DNA, 6484 bp, Homo sapiens
agcggggcggaggcggtgagcgcgggcggcgcggacggcagcggttggcgggcgggtcctccgctgttgcggccgctgcggcctccttgcccgggcttggggcgccgcgctggggaaagccgggggcccggacacattggcgtgagacctgggagtacgttgtgccaaatcattgccacttgccacatgagtgtaaatgatggcggatgccaagtatgtcctctgccgatgggaaaagcgattatggcctgcgaaggttttggcccgaaccgcgacttcaacaaaaaataagagaagaaaggaatattttctagctgtgcaaatcctctccctagaggaaaagttaagtgttgtgttgttttaatactgttttttcccgtgtagatttctgatacttcaatcccctactcccccaaaacagttgaagcccagcccactcttaatgggcttattcaccatttgtgtaattcattaatgctcataataacctcatgagaaagcaactagtttgattttatgtcagtttggaagctgaagatccaaacgaggcattctgtgagatctatggagagattggtacaaacactgaatacatgtaaattatactcagggtagaccctatttgtggttaaaatagggatatttccttttttttttttttttttgactgtttcttaatcagtgccatgccaggaaaatagggatgtttccttcccagagatctgtgtgtcttttttcagaaacgtctgtgacaggcccatcaattttgaaatatttggtttttgagcctgtcactctaaaccagcgtttaacgttcaaaaggcaaataactgatgaccaggcggcacattgttctgctccgtgagtgtctggcactgggaaaggtgtagattgtctagaatgacagcaattccgacgccccagtcagtcctgcgtgattgtggcgagggcgcgtctggcaccgggaaggtgtagatcatctagaatgacggcgattccgacgccccggtcagtcctgcgtgattggcgagggtgcatctgtcgtgagaattcccagttctgaagagagcaaggagactgatcccgcgtagtccaaggcattggctcccctgttgctcttccttgtggagctccccctgccccactccctcctgcctgcatcttcagagctgcctctgaagctcgcttggtccctagctcacactttccctgcggctgggaaggtaattgaatactcgagtttaaaaggaaagcacatccttttaaaccaaaacacacctgctgggctgtaaacagcttttagtgacattaccatctactctgaaaatctaacaaaggagtgatttgtgcagttgaaagtaggatttgcttcataaaagtcacaatttgaattcatttttgcttttaaatccagccaaccttttctgtcttaaaaggaaaaaaaaaaaaaaaccattcaccagggttcttgctgcctgtaacctcaggcagatgaattcctagttggctgtgacttttggtttaagtggaaggttgaggaggaaaatgaaaataattcttttgttatctaaaggaaaacatgtttgaaaatgtcttggcggcgttggctggtggtgtgtaacgtcgattttgtctctgcagaattaaggtgaaaagcactgaagttgagatcctagagaagtctcaaattgaagccattgcttcctcgttagggaacgcgaatcccctgagctgaaggagaaggaaaaatggatccgctttcttaaacctttccagaatttgcccctagaaccactcctattcttgacgcccagaatggtccctcacagaatgaggttcctgcggcacccctggaagaactggcctacagacggtcgcttcgcgtggctctggacgttctgagcgagggctcgatttggagtcaagaaagctctgcagggacaggtagagctgaccggtctctgcgagggaagcccatggagcatgtctcctcgccctgtgattcgaactcctcatctcttccccgcggagacgtgttgggcagttccagacctcacaggaggaggccatgtgtgcaacaaagcctgtcaagttcgttcacttgtgaaaaggaccccgagtgcaaagtggaccacaagaaggggctcaggaaaagtgaaaacccaagaggcccgttggtcctcccagctggaggtggtgcccaagatgagagtgggtccagaatccaccacaaaaattggactcttgcaagtaagaggggaagaaactcagcgcagaaggctagcttgtgcctgaatggatcttccctttcagaggacgacacggagagagacatggggagcaaaggaggcagctgggcagccccgtccttgccctccggggtcagggaggacgatccctgtgccaacgctgagggacacgaccccggtctgccgttgggcagcctcactgcgcccccagcccctgagccctcggcctgctcagagcctggagaatgccctgcgaaaaagaggccgcgcctggatggcagccaaaggccgcctgccgtgcagctggagcccatggcagcaggggccgcaccatcccccgggccggggccagggcccagagagtctgtgaccccgcgcagcaccgccaggctgggcccgcctccctcccacgcctctgcggatgcaaccagatgtcttccttgcccggattcccagaagctggagaaagagtgccagtcttccgaagagtccatggggtctaattccatgcgttctatcctggaggaagacgaggaagacgaggagccaccaagagtccttttataccacgaaccacgttcgtttgaagtaggaatgctagtctggcataaacataaaaaataccccttctggccagcagtggtcaaaagcgtcaggcagagagataagaaagcaagtgtgctatacatcgaaggacacatgaacccgaaaatgaaaggtttcacagtgtctcttaaaagtttaaagcactttgattgtaaagagaaacagacgcttctgaatcaagccagggaggacttcaaccaggacatcggctggtgtgtctccctcatcaccgactacagggtccggttaggctgcgggtcttttgctggctctttcctggaatattacgcggctgatataagctatcctgtccgaaaatccatccagcaggacgtcttggggaccaagcttcctcaactgagcaaggggagccccgaggagcccgtggtggggtgccccctggggcagaggcagccctgccggaaaatgctccccgaccgctcgcgggccgcccgggaccgggccaaccagaagctggtggagtacattgtgaaggccaagggcgcggagagccacctgcgggccatcctaaagagcaggaagccatctcgctggctgcagaccttcctgagctccagccagtacgtgacctgtgtggagacctacctggaggatgaggggcagctggacctggtggtgaagtacctgcagggcgtctaccaggaggtgggggccaaggtgctccagcgcaccaacggcgaccggatccggttcattctggacgtgcttctgcccgaggccatcatctgtgcgatctctgcggtggacgaggtggactacaagacggctgaggagaagtacatcaaggggccttcgctgagctaccggtaggccgctcccggcgctatctccagccacttgcgtctctgccttgcagtttctatttccacacccacaggcagtttgactccaggctgccgcagcccctctccctcatgaggtggcccaggtgctgggtggtgagctgatcacatacgctgaactcaccctgtgggtcactcctgccccccaggaaggctgtgcccgggtctcccagctggtcgctgtgggcagcacggggccacgggcacgtgcctgggccgtgtctgttcttaatctctttttgcaggggctgatgtttgctttttgcactttcctcccctctttccacagccccatggctgtgtgagaaatacagcaagattaagcagcagcacggcccggtgctttccagcagccagaagaatgctgtgatcaagatgtttctctcacatccgtgtgcttagctgcccttggatgtttggcccccagagcgcctaatcctgtctctgggcatgcggccaggccttgctgggagccaggcggggcccacggggcagtgacaggctgaagactcaactagagtcaaggacagggtctccggccagggtggcttgcgcagccaccgacgtctcccgggcccacagtcacaggagactcctggtgaagacactgaactccctcaccagccccatgtcctccctgggcagggcaggaggggcccctggagaggccagggaggaggtgtggggcctcggtggcattggcaggccacccccgcagagctgcacaaaggtggaatttggccttgtttagggagtgttggcccagctggcttaccaaaacaggaaaggcctttggatacagaaactgggtgttttcctgctggatcttcatggttcccccgtcatgcttgccggaaaaagaaatatttgacaaccagctccttgaagagcggaaccggcgccgtcggtgagggagcagccggctgtgctgtcagcggggcctggcggtggaagcgcctccagtgtgcatgagcgtgtctgaagatggggggctcagggggcacgtttgcgtttggacctgtctgtgcgttctcctgcgtggcagtcctgatttccatacttctggagaatccatttcgttaacactgaaagccagttctcttttcctggcagtttttttcattttatttttggcattttttacaagataccgttcgggaaaggcttttgaaaggacggaagcgtattcactgtgcgccagtactcctggctgtgctgtggtttctcccgacgtgcacatcgatctcgtatgtgtggcatctgatattaaacgggaggttttaagaagcgtctgccgtgatcatggagcttcggaagcgggaatggttcttccgggtttgctgttttgtctgtttcccccttgtgtggtttccgcctgcgacagttccagaatttgctctcccactcagtgtgctctgcagctgtgaggaaacagccttcgttagaggcgggagcagagacgagccgctgctctgtgtcgtgtttgctgtggccgcagggagaggagcgggacacgcacctttccaggggcctctgtgtcccgcactgtgtgtgagtggaccgcagcgcgcagccacatgccctggctgccatgggccagaccgcctccacctcccccgcccgcctggcctgtcctgagtgcatttccctgcactgtgtcgtcactgcacagccagtcaccgcggtctcagtcatcggcgcggatggctatgctggggtcccagggtggccgcagcagtcagggtcactgtgggagccctggggtggagtgacaaaccgcattgtcctgtgcccgccatggcagaagcgcagcctttgtatggaggcccaaccgcgctcccgtctggagaagcggcttccggggtgtggctgccgggtcggctctggtccacagcacggtgccggggctgcaggttgttgagggctgtgactccgtggggctcagccaggctccagcagggtcagacgtgctgttaagagcaaagccacagacgatgacttgtccattctcagtggatgctccaggctgtgcctacacagcagtgctggtgacatgtccagggttccagggcccggtggcctgggagctgctttctccccactggctgggctgcatctggccctggctggaggccttgctttgaggggctgtgaccctcttcccccaggccctccccagccgacgacagccaccggagaggagatcggaacacgattgtctcagatgcagggcgctgtgcgggacgaagccgcaaggactctcgtatcgggcccttgggactcgggaggtgccagaggcggcggctgctctggacctcggtgttcactgacctttgtttcacttgcctctgctcgactccgagagcaggaaacccggccgtggcctggcagctccgcctcccatgcccgcacgctggggtctgtcttgtctggagcagtggggcacaccccggaggaggcgggggtcagggctgtcggccttggccccctgctggtcgctgtttcggggactcggggcggccagtaccaccgcctgaggcggggctcagcagcgttgcatgtacgggcctcgtactgcctcatggaaaatcctccggagccgccctccattgtgggttcctgagagtaggacacattgccatggttttgtgggaatcacgcgcccctgatggaacttttctgctgttgtgaagtacttttatccatttgcttctctgctgaccttgccaagttgttcgaggtggaattaaacacctcccagacctc

SEQ ID NO: 356720 - DNA, 5718 bp, Homo sapiens
agcggggcggaggcggtgagcgcgggcggcgcggacggcagcggttggcgggcgggtcctccgctgttgcggccgctgcggcctccttgcccgggcttggggcgccgcgctggggaaagccgggggcccggacacattggcgtgagacctgggagtacgttgtgccaaatcattgccacttgccacatgagtgtaaatgatggcggatgccaagtatgtcctctgccgatgggaaaagcgattatggcctgcgaaggttttggcccgaaccgcgacttcaacaaaaaataagagaagaaaggaatattttctagctgtgcaaatcctctccctagaggaaaagttaagtgttgtgttgttttaatactgttttttcccgtgtagatttctgatacttcaatcccctactcccccaaaacagttgaagcccagcccactcttaatgggcttattcaccatttgtgtaattcattaatgctcataataacctcatgagaaagcaactagtttgattttatgtcagtttggaagctgaagatccaaacgaggcattctgtgagatctatggagagattggtacaaacactgaatacatgtaaattatactcagggtagaccctatttgtggttaaaatagggatatttccttttttttttttttttttgactgtttcttaatcagtgccatgccaggaaaatagggatgtttccttcccagagatctgtgtgtcttttttcagaaacgtctgtgacaggcccatcaattttgaaatatttggtttttgagcctgtcactctaaaccagcgtttaacgttcaaaaggcaaataactgatgaccaggcggcacattgttctgctccgtgagtgtctggcactgggaaaggtgtagattgtctagaatgacagcaattccgacgccccagtcagtcctgcgtgattgtggcgagggcgcgtctggcaccgggaaggtgtagatcatctagaatgacggcgattccgacgccccggtcagtcctgcgtgattggcgagggtgcatctgtcgtgagaattcccagttctgaagagagcaaggagactgatcccgcgtagtccaaggcattggctcccctgttgctcttccttgtggagctccccctgccccactccctcctgcctgcatcttcagagctgcctctgaagctcgcttggtccctagctcacactttccctgcggctgggaaggtaattgaatactcgagtttaaaaggaaagcacatccttttaaaccaaaacacacctgctgggctgtaaacagcttttagtgacattaccatctactctgaaaatctaacaaaggagtgatttgtgcagttgaaagtaggatttgcttcataaaagtcacaatttgaattcatttttgcttttaaatccagccaaccttttctgtcttaaaaggaaaaaaaaaaaaaaaccattcaccagggttcttgctgcctgtaacctcaggcagatgaattcctagttggctgtgacttttggtttaagtggaaggttgaggaggaaaatgaaaataattcttttgttatctaaaggaaaacatgtttgaaaatgtcttggcggcgttggctggtggtgtgtaacgtcgattttgtctctgcagaattaaggtgaaaagcactgaagttgagatcctagagaagtctcaaattgaagccattgcttcctcgttaggtaagagcgtatttttaagtggccactaggttttcataaaataagaggtcatttgggagaatgtgaaggctcagctttctgggtaaaaattcaccctgttcaccatgtttttcttcatacaagggaacgcgaatcccctgagctgaaggagaaggaaaaatggatccgctttcttaaacctttccagaatttgcccctagaaccactcctattcttgacgcccagaatggtccctcacagaatgaggttcctgcggcacccctggaagaactggcctacagacggtcgcttcgcgtggctctggacgttctgagcgagggctcgatttggagtcaagaaagctctgcagggacaggtagagctgaccggtctctgcgagggaagcccatggagcatgtctcctcgccctgtgattcgaactcctcatctcttccccgcggagacgtgttgggcagttccagacctcacaggaggaggccatgtgtgcaacaaagcctgtcaagttcgttcacttgtgaaaaggaccccgagtgcaaagtggaccacaagaaggggctcaggaaaagtgaaaacccaagaggcccgttggtcctcccagctggaggtggtgcccaagatgagagtgggtccagaatccaccacaaaaattggactcttgcaagtaagaggggaagaaactcagcgcagaaggctagcttgtgcctgaatggatcttccctttcagaggacgacacggagagagacatggggagcaaaggaggcagctgggcagccccgtccttgccctccggggtcagggaggacgatccctgtgccaacgctgagggacacgaccccggtctgccgttgggcagcctcactgcgcccccagcccctgagccctcggcctgctcagagcctggagaatgccctgcgaaaaagaggccgcgcctggatggcagccaaaggccgcctgccgtgcagctggagcccatggcagcaggggccgcaccatcccccgggccggggccagggcccagagagtctgtgaccccgcgcagcaccgccaggctgggcccgcctccctcccacgcctctgcggatgcaaccagatgtcttccttgcccggattcccagaagctggagaaagagtgccagtcttccgaagagtccatggggtctaattccatgcgttctatcctggaggaagacgaggaagacgaggagccaccaagagtccttttataccacgaaccacgttcgtttgaagtaggaatgctagtctggcataaacataaaaaataccccttctggccagcagtggtcaaaagcgtcaggcagagagataagaaagcaagtgtgctatacatcgaaggacacatgaacccgaaaatgaaaggtttcacagtgtctcttaaaagtttaaagcactttgattgtaaagagaaacagacgcttctgaatcaagccagggaggacttcaaccaggacatcggctggtgtgtctccctcatcaccgactacagggtccggttaggctgcgggtcttttgctggctctttcctggaatattacgcggctgatataagctatcctgtccgaaaatccatccagcaggacgtcttggggaccaagcttcctcaactgagcaaggggagccccgaggagcccgtggtggggtgccccctggggcagaggcagccctgccggaaaatgctccccgaccgctcgcgggccgcccgggaccgggccaaccagaagctggtggagtacattgtgaaggccaagggcgcggagagccacctgcgggccatcctaaagagcaggaagccatctcgctggctgcagaccttcctgagctccagccagtacgtgacctgtgtggagacctacctggaggatgaggggcagctggacctggtggtgaagtacctgcagggcgtctaccaggaggtgggggccaaggtgctccagcgcaccaacggcgaccggatccggttcattctggacgtgcttctgcccgaggccatcatctgtgcgatctctgcggtggacgaggtggactacaagacggctgaggagaagtacatcaaggggccttcgctgagctaccgggaaaaagaaatatttgacaaccagctccttgaagagcggaaccggcgccgtcggtgagggagcagccggctgtgctgtcagcggggcctggcggtggaagcgcctccagtgtgcatgagcgtgtctgaagatggggggctcagggggcacgtttgcgtttggacctgtctgtgcgttctcctgcgtggcagtcctgatttccatacttctggagaatccatttcgttaacactgaaagccagttctcttttcctggcagtttttttcattttatttttggcattttttacaagataccgttcgggaaaggcttttgaaaggacggaagcgtattcactgtgcgccagtactcctggctgtgctgtggtttctcccgacgtgcacatcgatctcgtatgtgtggcatctgatattaaacgggaggttttaagaagcgtctgccgtgatcatggagcttcggaagcgggaatggttcttccgggtttgctgttttgtctgtttcccccttgtgtggtttccgcctgcgacagttccagaatttgctctcccactcagtgtgctctgcagctgtgaggaaacagccttcgttagaggcgggagcagagacgagccgctgctctgtgtcgtgtttgctgtggccgcagggagaggagcgggacacgcacctttccaggggcctctgtgtcccgcactgtgtgtgagtggaccgcagcgcgcagccacatgccctggctgccatgggccagaccgcctccacctcccccgcccgcctggcctgtcctgagtgcatttccctgcactgtgtcgtcactgcacagccagtcaccgcggtctcagtcatcggcgcggatggctatgctggggtcccagggtggccgcagcagtcagggtcactgtgggagccctggggtggagtgacaaaccgcattgtcctgtgcccgccatggcagaagcgcagcctttgtatggaggcccaaccgcgctcccgtctggagaagcggcttccggggtgtggctgccgggtcggctctggtccacagcacggtgccggggctgcaggttgttgagggctgtgactccgtggggctcagccaggctccagcagggtcagacgtgctgttaagagcaaagccacagacgatgacttgtccattctcagtggatgctccaggctgtgcctacacagcagtgctggtgacatgtccagggttccagggcccggtggcctgggagctgctttctccccactggctgggctgcatctggccctggctggaggccttgctttgaggggctgtgaccctcttcccccaggccctccccagccgacgacagccaccggagaggagatcggaacacgattgtctcagatgcagggcgctgtgcgggacgaagccgcaaggactctcgtatcgggcccttgggactcgggaggtgccagaggcggcggctgctctggacctcggtgttcactgacctttgtttcacttgcctctgctcgactccgagagcaggaaacccggccgtggcctggcagctccgcctcccatgcccgcacgctggggtctgtcttgtctggagcagtggggcacaccccggaggaggcgggggtcagggctgtcggccttggccccctgctggtcgctgtttcggggactcggggcggccagtaccaccgcctgaggcggggctcagcagcgttgcatgtacgggcctcgtactgcctcatggaaaatcctccggagccgccctccattgtgggttcctgagagtaggacacattgccatggttttgtgggaatcacgcgcccctgatggaacttttctgctgttgtgaagtacttttatccatttgcttctctgctgaccttgccaagttgttcgaggtggaattaaacacctcccagacctc

SEQ ID NO: 356721 - DNA, 6752 bp, Homo sapiens
agcggggcggaggcggtgagcgcgggcggcgcggacggcagcggttggcgggcgggtcctccgctgttgcggccgctgcggcctccttgcccgggcttggggcgccgcgctggggaaagccgggggcccggacacattggcgtgagacctgggagtacgttgtgccaaatcattgccacttgccacatgagtgtaaatgatggcggatgccaagtatgtcctctgccgatgggaaaagcgattatggcctgcgaaggttttggcccgaaccgcgacttcaacaaaaaataagagaagaaaggaatattttctagctgtgcaaatcctctccctagaggaaaagttaagtgttgtgttgttttaatactgttttttcccgtgtagatttctgatacttcaatcccctactcccccaaaacagttgaagcccagcccactcttaatgggcttattcaccatttgtgtaattcattaatgctcataataacctcatgagaaagcaactagtttgattttatgtcagtttggaagctgaagatccaaacgaggcattctgtgagatctatggagagattggtacaaacactgaatacatgtaaattatactcagggtagaccctatttgtggttaaaatagggatatttccttttttttttttttttttgactgtttcttaatcagtgccatgccaggaaaatagggatgtttccttcccagagatctgtgtgtcttttttcagaaacgtctgtgacaggcccatcaattttgaaatatttggtttttgagcctgtcactctaaaccagcgtttaacgttcaaaaggcaaataactgatgaccaggcggcacattgttctgctccgtgagtgtctggcactgggaaaggtgtagattgtctagaatgacagcaattccgacgccccagtcagtcctgcgtgattgtggcgagggcgcgtctggcaccgggaaggtgtagatcatctagaatgacggcgattccgacgccccggtcagtcctgcgtgattggcgagggtgcatctgtcgtgagaattcccagttctgaagagagcaaggagactgatcccgcgtagtccaaggcattggctcccctgttgctcttccttgtggagctccccctgccccactccctcctgcctgcatcttcagagctgcctctgaagctcgcttggtccctagctcacactttccctgcggctgggaaggtaattgaatactcgagtttaaaaggaaagcacatccttttaaaccaaaacacacctgctgggctgtaaacagcttttagtgacattaccatctactctgaaaatctaacaaaggagtgatttgtgcagttgaaagtaggatttgcttcataaaagtcacaatttgaattcatttttgcttttaaatccagccaaccttttctgtcttaaaaggaaaaaaaaaaaaaaaccattcaccagggttcttgctgcctgtaacctcaggcagatgaattcctagttggctgtgacttttggtttaagtggaaggttgaggaggaaaatgaaaataattcttttgttatctaaaggaaaacatgtttgaaaatgtcttggcggcgttggctggtggtgtgtaacgtcgattttgtctctgcagaattaaggtgaaaagcactgaagttgagatcctagagaagtctcaaattgaagccattgcttcctcgttagggaacgcgaatcccctgagctgaaggagaaggaaaaatggatccgctttcttaaacctttccagaatttgcccctagaaccactcctattcttgacgcccagaatggtccctcacagaatgaggttcctgcggcacccctggaagaactggcctacagacggtcgcttcgcgtggctctggacgttctgagcgagggctcgatttggagtcaagaaagctctgcagggacaggtagagctgaccggtctctgcgagggaagcccatggagcatgtctcctcgccctgtgattcgaactcctcatctcttccccgcggagacgtgttgggcagttccagacctcacaggaggaggccatgtgtgcaacaaagcctgtcaagttcgttcacttgtgaaaaggaccccgagtgcaaagtggaccacaagaaggggctcaggaaaagtgaaaacccaagaggcccgttggtcctcccagctggaggtggtgcccaagatgagagtgggtccagaatccaccacaaaaattggactcttgcaagtaagaggggaagaaactcagcgcagaaggctagcttgtgcctgaatggatcttccctttcagaggacgacacggagagagacatggggagcaaaggaggcagctgggcagccccgtccttgccctccggggtcagggaggacgatccctgtgccaacgctgagggacacgaccccggtctgccgttgggcagcctcactgcgcccccagcccctgagccctcggcctgctcagagcctggagaatgccctgcgaaaaagaggccgcgcctggatggcagccaaaggccgcctgccgtgcagctggagcccatggcagcaggggccgcaccatcccccgggccggggccagggcccagagagtctgtgaccccgcgcagcaccgccaggctgggcccgcctccctcccacgcctctgcggatgcaaccagatgtcttccttgcccggattcccagaagctggagaaagagtgccagtcttccgaagagtccatggggtctaattccatgcgttctatcctggaggaagacgaggaagacgaggagccaccaagagtccttttataccacgaaccacgttcgtttgaagtaggaatgctagtctggcataaacataaaaaataccccttctggccagcagtggtcaaaagcgtcaggcagagagataagaaagcaagtgtgctatacatcgaaggacacatgaacccgaaaatgaaaggtttcacagtgtctcttaaaagtttaaagcactttgattgtaaagagaaacagacgcttctgaatcaagccagggaggacttcaaccaggacatcggctggtgtgtctccctcatcaccgactacagggtccggttaggctgcgggtcttttgctggctctttcctggaatattacgcggctgatataagctatcctgtccgaaaatccatccagcaggacgtcttggggaccaagcttcctcaactgagcaaggggagccccgaggagcccgtggtggggtgccccctggggcagaggcagccctgccggaaaatgctccccgaccgctcgcgggccgcccgggaccgggccaaccagaagctggtggagtacattgtgaaggccaagggcgcggagagccacctgcgggccatcctaaagagcaggaagccatctcgctggctgcagaccttcctgagctccagccagtacgtgacctgtgtggagacctacctggaggatgaggggcagctggacctggtggtgaagtacctgcagggcgtctaccaggaggtgggggccaaggtgctccagcgcaccaacggcgaccggatccggttcattctggacgtgcttctgcccgaggccatcatctgtgcgatctctgcggtggacgaggtggactacaagacggctgaggagaagtacatcaaggggccttcgctgagctaccggtaggccgctcccggcgctatctccagccacttgcgtctctgccttgcagtttctatttccacacccacaggcagtttgactccaggctgccgcagcccctctccctcatgaggtggcccaggtgctgggtggtgagctgatcacatacgctgaactcaccctgtgggtcactcctgccccccaggaaggctgtgcccgggtctcccagctggtcgctgtgggcagcacggggccacgggcacgtgcctgggccgtgtctgttcttaatctctttttgcaggggctgatgtttgctttttgcactttcctcccctctttccacagccccatggctgtgtgagaaatacagcaagattaagcagcagcacggcccggtgctttccagcagccagaagaatgctgtgatcaagatgtttctctcacatccgtgtgcttagctgcccttggatgtttggcccccagagcgcctaatcctgtctctgggcatgcggccaggccttgctgggagccaggcggggcccacggggcagtgacaggctgaagactcaactagagtcaaggacagggtctccggccagggtggcttgcgcagccaccgacgtctcccgggcccacagtcacaggagactcctggtgaagacactgaactccctcaccagccccatgtcctccctgggcagggcaggaggggcccctggagaggccagggaggaggtgtggggcctcggtggcattggcaggccacccccgcagagctgcacaaaggtggaatttggccttgtttagggagtgttggcccagctggcttaccaaaacaggaaaggcctttggatacagaaactgggtgttttcctgctggatcttcatggttcccccgtcatgcttgccgtaagaataagtgaggtccggggagggggtaaggtcggagccaggacacctggacccagcctgctggtttgtcctctccctccgtctcagaagcctcttcaccgctccacgcccatctgtggaaatctttcatcctgatttttttttttgagtctgggttgccgacatcaaaacccgttaggagttcatcacagcttccagttgccatgaaagcctcccgtgacctgtgagaatggtgctggtgctgatggagaagttacttgggctgagcacacaggccgtgatttcatcacgccggggacatgctcaaaataacaagccaggaagggagcagccggctgtgctgtcagcggggcctggcggtggaagcgcctccagtgtgcatgagcgtgtctgaagatggggggctcagggggcacgtttgcgtttggacctgtctgtgcgttctcctgcgtggcagtcctgatttccatacttctggagaatccatttcgttaacactgaaagccagttctcttttcctggcagtttttttcattttatttttggcattttttacaagataccgttcgggaaaggcttttgaaaggacggaagcgtattcactgtgcgccagtactcctggctgtgctgtggtttctcccgacgtgcacatcgatctcgtatgtgtggcatctgatattaaacgggaggttttaagaagcgtctgccgtgatcatggagcttcggaagcgggaatggttcttccgggtttgctgttttgtctgtttcccccttgtgtggtttccgcctgcgacagttccagaatttgctctcccactcagtgtgctctgcagctgtgaggaaacagccttcgttagaggcgggagcagagacgagccgctgctctgtgtcgtgtttgctgtggccgcagggagaggagcgggacacgcacctttccaggggcctctgtgtcccgcactgtgtgtgagtggaccgcagcgcgcagccacatgccctggctgccatgggccagaccgcctccacctcccccgcccgcctggcctgtcctgagtgcatttccctgcactgtgtcgtcactgcacagccagtcaccgcggtctcagtcatcggcgcggatggctatgctggggtcccagggtggccgcagcagtcagggtcactgtgggagccctggggtggagtgacaaaccgcattgtcctgtgcccgccatggcagaagcgcagcctttgtatggaggcccaaccgcgctcccgtctggagaagcggcttccggggtgtggctgccgggtcggctctggtccacagcacggtgccggggctgcaggttgttgagggctgtgactccgtggggctcagccaggctccagcagggtcagacgtgctgttaagagcaaagccacagacgatgacttgtccattctcagtggatgctccaggctgtgcctacacagcagtgctggtgacatgtccagggttccagggcccggtggcctgggagctgctttctccccactggctgggctgcatctggccctggctggaggccttgctttgaggggctgtgaccctcttcccccaggccctccccagccgacgacagccaccggagaggagatcggaacacgattgtctcagatgcagggcgctgtgcgggacgaagccgcaaggactctcgtatcgggcccttgggactcgggaggtgccagaggcggcggctgctctggacctcggtgttcactgacctttgtttcacttgcctctgctcgactccgagagcaggaaacccggccgtggcctggcagctccgcctcccatgcccgcacgctggggtctgtcttgtctggagcagtggggcacaccccggaggaggcgggggtcagggctgtcggccttggccccctgctggtcgctgtttcggggactcggggcggccagtaccaccgcctgaggcggggctcagcagcgttgcatgtacgggcctcgtactgcctcatggaaaatcctccggagccgccctccattgtgggttcctgagagtaggacacattgccatggttttgtgggaatcacgcgcccctgatggaacttttctgctgttgtgaagtacttttatccatttgcttctctgctgaccttgccaagttgttcgaggtggaattaaacacctcccagacctc

SEQ ID NO: 356722 - DNA, 4187 bp, Homo sapiens
agcggggcggaggcggtgagcgcgggcggcgcggacggcagcggttggcgggcgggtcctccgctgttgcggccgctgcggcctccttgcccgggcttggggcgccgcgctggggaaagccgggggcccggacacattggcgtgagacctgggagtacgttgtgccaaatcattgccacttgccacatgagtgtaaatgatggcggatgccaagtatgtcctctgccgatgggaaaagcgattatggcctgcgaaggttttggcccgaaccgcgacttcaacaaaaaataagagaagaaaggaatattttctagctgtgcaaatcctctccctagaggaaaaaattaaggtgaaaagcactgaagttgagatcctagagaagtctcaaattgaagccattgcttcctcgttagcctcacagaatgaggttcctgcggcacccctggaagaactggcctacagacggtcgcttcgcgtggctctggacgttctgagcgagggctcgatttggagtcaagaaagctctgcagggacaggtagagctgaccggtctctgcgagggaagcccatggagcatgtctcctcgccctgtgattcgaactcctcatctcttccccgcggagacgtgttgggcagttccagacctcacaggaggaggccatgtgtgcaacaaagcctgtcaagttcgttcacttgtgaaaaggaccccgagtgcaaagtggaccacaagaaggggctcaggaaaagtgaaaacccaagaggcccgttggtcctcccagctggaggtggtgcccaagatgagagtgggtccagaatccaccacaaaaattggactcttgcaagtaagaggggaagaaactcagcgcagaaggctagcttgtgcctgaatggatcttccctttcagaggacgacacggagagagacatggggagcaaaggaggcagctgggcagccccgtccttgccctccggggtcagggaggacgatccctgtgccaacgctgagggacacgaccccggtctgccgttgggcagcctcactgcgcccccagcccctgagccctcggcctgctcagagcctggagaatgccctgcgaaaaagaggccgcgcctggatggcagccaaaggccgcctgccgtgcagctggagcccatggcagcaggggccgcaccatcccccgggccggggccagggcccagagagtctgtgaccccgcgcagcaccgccaggctgggcccgcctccctcccacgcctctgcggatgcaaccagatgtcttccttgcccggattcccagaagctggagaaagagtgccagtcttccgaagagtccatggggtctaattccatgcgttctatcctggaggaagacgaggaagacgaggagccaccaagagtccttttataccacgaaccacgttcgtttgaagtaggaatgctagtctggcataaacataaaaaataccccttctggccagcagtggtcaaaagcgtcaggcagagagataagaaagcaagtgtgctatacatcgaaggacacatgaacccgaaaatgaaaggtttcacagtgtctcttaaaagtttaaagcactttgattgtaaagagaaacagacgcttctgaatcaagccagggaggacttcaaccaggacatcggctggtgtgtctccctcatcaccgactacagggtccggttaggctgcgggtcttttgctggctctttcctggaatattacgcggctgatataagctatcctgtccgaaaatccatccagcaggacgtcttggggaccaagcttcctcaactgagcaaggggagccccgaggagcccgtggtggggtgccccctggggcagaggcagccctgccggaaaatgctccccgaccgctcgcgggccgcccgggaccgggccaaccagaagctggtggagtacattgtgaaggccaagggcgcggagagccacctgcgggccatcctaaagagcaggaagccatctcgctggctgcagaccttcctgagctccagccagtacgtgacctgtgtggagacctacctggaggatgaggggcagctggacctggtggtgaagtacctgcagggcgtctaccaggaggtgggggccaaggtgctccagcgcaccaacggcgaccggatccggttcattctggacgtgcttctgcccgaggccatcatctgtgcgatctctgcggtggacgaggtggactacaagacggctgaggagaagtacatcaaggggccttcgctgagctaccgggaaaaagaaatatttgacaaccagctccttgaagagcggaaccggcgccgtcggtgagggagcagccggctgtgctgtcagcggggcctggcggtggaagcgcctccagtgtgcatgagcgtgtctgaagatggggggctcagggggcacgtttgcgtttggacctgtctgtgcgttctcctgcgtggcagtcctgatttccatacttctggagaatccatttcgttaacactgaaagccagttctcttttcctggcagtttttttcattttatttttggcattttttacaagataccgttcgggaaaggcttttgaaaggacggaagcgtattcactgtgcgccagtactcctggctgtgctgtggtttctcccgacgtgcacatcgatctcgtatgtgtggcatctgatattaaacgggaggttttaagaagcgtctgccgtgatcatggagcttcggaagcgggaatggttcttccgggtttgctgttttgtctgtttcccccttgtgtggtttccgcctgcgacagttccagaatttgctctcccactcagtgtgctctgcagctgtgaggaaacagccttcgttagaggcgggagcagagacgagccgctgctctgtgtcgtgtttgctgtggccgcagggagaggagcgggacacgcacctttccaggggcctctgtgtcccgcactgtgtgtgagtggaccgcagcgcgcagccacatgccctggctgccatgggccagaccgcctccacctcccccgcccgcctggcctgtcctgagtgcatttccctgcactgtgtcgtcactgcacagccagtcaccgcggtctcagtcatcggcgcggatggctatgctggggtcccagggtggccgcagcagtcagggtcactgtgggagccctggggtggagtgacaaaccgcattgtcctgtgcccgccatggcagaagcgcagcctttgtatggaggcccaaccgcgctcccgtctggagaagcggcttccggggtgtggctgccgggtcggctctggtccacagcacggtgccggggctgcaggttgttgagggctgtgactccgtggggctcagccaggctccagcagggtcagacgtgctgttaagagcaaagccacagacgatgacttgtccattctcagtggatgctccaggctgtgcctacacagcagtgctggtgacatgtccagggttccagggcccggtggcctgggagctgctttctccccactggctgggctgcatctggccctggctggaggccttgctttgaggggctgtgaccctcttcccccaggccctccccagccgacgacagccaccggagaggagatcggaacacgattgtctcagatgcagggcgctgtgcgggacgaagccgcaaggactctcgtatcgggcccttgggactcgggaggtgccagaggcggcggctgctctggacctcggtgttcactgacctttgtttcacttgcctctgctcgactccgagagcaggaaacccggccgtggcctggcagctccgcctcccatgcccgcacgctggggtctgtcttgtctggagcagtggggcacaccccggaggaggcgggggtcagggctgtcggccttggccccctgctggtcgctgtttcggggactcggggcggccagtaccaccgcctgaggcggggctcagcagcgttgcatgtacgggcctcgtactgcctcatggaaaatcctccggagccgccctccattgtgggttcctgagagtaggacacattgccatggttttgtgggaatcacgcgcccctgatggaacttttctgctgttgtgaagtacttttatccatttgcttctctgctgaccttgccaagttgttcgaggtggaattaaacacctcccagacctc

SEQ ID NO: 356723 - DNA, 4189 bp, Homo sapiens
  misc_feature (14)..(14): n is a, c, g, or t
tacgcgcggcggtngcggaggcggacacattggcgtgagacctgggagtacgttgtgccaaatcattgccacttgccacatgagtgtaaatgatggcggatgccaagtatgtcctctgccgatgggaaaagcgattatggcctgcgaaggttttggcccgaaccgcgacttcaacaaaaaataagagaagaaaggaatattttctagctgtgcaaatcctctccctagaggaaaaaattaaggtgaaaagcactgaagttgagatcctagagaagtctcaaattgaagccattgcttcctcgttagggaacgcgaatcccctgagctgaaggagaaggaaaaatggatccgctttcttaaacctttccagaatttgcccctagaaccactcctattcttgacgcccagaatggtccctcacagaatgaggttcctgcggcacccctggaagaactggcctacagacggtcgcttcgcgtggctctggacgttctgagcgagggctcgatttggagtcaagaaagctctgcagggacaggtagagctgaccggtctctgcgagggaagcccatggagcatgtctcctcgccctgtgattcgaactcctcatctcttccccgcggagacgtgttgggcagttccagacctcacaggaggaggccatgtgtgcaacaaagcctgtcaagttcgttcacttgtgaaaaggaccccgagtgcaaagtggaccacaagaaggggctcaggaaaagtgaaaacccaagaggcccgttggtcctcccagctggaggtggtgcccaagatgagagtgggtccagaatccaccacaaaaattggactcttgcaagtaagaggggaagaaactcagcgcagaaggctagcttgtgcctgaatggatcttccctttcagaggacgacacggagagagacatggggagcaaaggaggcagctgggcagccccgtccttgccctccggggtcagggaggacgatccctgtgccaacgctgagggacacgaccccggtctgccgttgggcagcctcactgcgcccccagcccctgagccctcggcctgctcagagcctggagaatgccctgcgaaaaagaggccgcgcctggatggcagccaaaggccgcctgccgtgcagctggagcccatggcagcaggggccgcaccatcccccgggccggggccagggcccagagagtctgtgaccccgcgcagcaccgccaggctgggcccgcctccctcccacgcctctgcggatgcaaccagatgtcttccttgcccggattcccagaagctggagaaagagtgccagtcttccgaagagtccatggggtctaattccatgcgttctatcctggaggaagacgaggaagacgaggagccaccaagagtccttttataccacgaaccacgttcgtttgaagtaggaatgctagtctggcataaacataaaaaataccccttctggccagcagtggtcaaaagcgtcaggcagagagataagaaagcaagtgtgctatacatcgaaggacacatgaacccgaaaatgaaaggtttcacagtgtctcttaaaagtttaaagcactttgattgtaaagagaaacagacgcttctgaatcaagccagggaggacttcaaccaggacatcggctggtgtgtctccctcatcaccgactacagggtccggttaggctgcgggtcttttgctggctctttcctggaatattacgcggctgatataagctatcctgtccgaaaatccatccagcaggacgtcttggggaccaagcttcctcaactgagcaaggggagccccgaggagcccgtggtggggtgccccctggggcagaggcagccctgccggaaaatgctccccgaccgctcgcgggccgcccgggaccgggccaaccagaagctggtggagtacattgtgaaggccaagggcgcggagagccacctgcgggccatcctaaagagcaggaagccatctcgctggctgcagaccttcctgagctccagccagtacgtgacctgtgtggagacctacctggaggatgaggggcagctggacctggtggtgaagtacctgcagggcgtctaccaggaggtgggggccaaggtgctccagcgcaccaacggcgaccggatccggttcattctggacgtgcttctgcccgaggccatcatctgtgcgatctctgcggtggacgaggtggactacaagacggctgaggagaagtacatcaaggggccttcgctgagctaccgggaaaaagaaatatttgacaaccagctccttgaagagcggaaccggcgccgtcggtgagggagcagccggctgtgctgtcagcggggcctggcggtggaagcgcctccagtgtgcatgagcgtgtctgaagatggggggctcagggggcacgtttgcgtttggacctgtctgtgcgttctcctgcgtggcagtcctgatttccatacttctggagaatccatttcgttaacactgaaagccagttctcttttcctggcagtttttttcattttatttttggcattttttacaagataccgttcgggaaaggcttttgaaaggacggaagcgtattcactgtgcgccagtactcctggctgtgctgtggtttctcccgacgtgcacatcgatctcgtatgtgtggcatctgatattaaacgggaggttttaagaagcgtctgccgtgatcatggagcttcggaagcgggaatggttcttccgggtttgctgttttgtctgtttcccccttgtgtggtttccgcctgcgacagttccagaatttgctctcccactcagtgtgctctgcagctgtgaggaaacagccttcgttagaggcgggagcagagacgagccgctgctctgtgtcgtgtttgctgtggccgcagggagaggagcgggacacgcacctttccaggggcctctgtgtcccgcactgtgtgtgagtggaccgcagcgcgcagccacatgccctggctgccatgggccagaccgcctccacctcccccgcccgcctggcctgtcctgagtgcatttccctgcactgtgtcgtcactgcacagccagtcaccgcggtctcagtcatcggcgcggatggctatgctggggtcccagggtggccgcagcagtcagggtcactgtgggagccctggggtggagtgacaaaccgcattgtcctgtgcccgccatggcagaagcgcagcctttgtatggaggcccaaccgcgctcccgtctggagaagcggcttccggggtgtggctgccgggtcggctctggtccacagcacggtgccggggctgcaggttgttgagggctgtgactccgtggggctcagccaggctccagcagggtcagacgtgctgttaagagcaaagccacagacgatgacttgtccattctcagtggatgctccaggctgtgcctacacagcagtgctggtgacatgtccagggttccagggcccggtggcctgggagctgctttctccccactggctgggctgcatctggccctggctggaggccttgctttgaggggctgtgaccctcttcccccaggccctccccagccgacgacagccaccggagaggagatcggaacacgattgtctcagatgcagggcgctgtgcgggacgaagccgcaaggactctcgtatcgggcccttgggactcgggaggtgccagaggcggcggctgctctggacctcggtgttcactgacctttgtttcacttgcctctgctcgactccgagagcaggaaacccggccgtggcctggcagctccgcctcccatgcccgcacgctggggtctgtcttgtctggagcagtggggcacaccccggaggaggcgggggtcagggctgtcggccttggccccctgctggtcgctgtttcggggactcggggcggccagtaccaccgcctgaggcggggctcagcagcgttgcatgtacgggcctcgtactgcctcatggaaaatcctccggagccgccctccattgtgggttcctgagagtaggacacattgccatggttttgtgggaatcacgcgcccctgatggaacttttctgctgttgtgaagtacttttatccatttgcttctctgctgaccttgccaagttgttcgaggtggaattaaacacctcccagacctc

SEQ ID NO: 356724 - DNA, 5499 bp, Homo sapiens
agcggggcggaggcggtgagcgcgggcggcgcggacggcagcggttggcgggcgggtcctccgctgttgcggccgctgcggcctccttgcccgggcttggggcgccgcgctggggaaagccgggggcccggacacattggcgtgagacctgggagtacgttgtgccaaatcattgccacttgccacatgagtgtaaatgatggcggatgccaagtatgtcctctgccgatgggaaaagcgattatggcctgcgaaggttttggcccgaaccgcgacttcaacaaaaaataagagaagaaaggaatattttctagctgtgcaaatcctctccctagaggaaaagttaagtgttgtgttgttttaatactgttttttcccgtgtagatttctgatacttcaatcccctactcccccaaaacagttgaagcccagcccactcttaatgggcttattcaccatttgtgtaattcattaatgctcataataacctcatgagaaagcaactagtttgattttatgtcagtttggaagctgaagatccaaacgaggcattctgtgagatctatggagagattggtacaaacactgaatacatgtaaattatactcagggtagaccctatttgtggttaaaatagggatatttccttttttttttttttttttgactgtttcttaatcagtgccatgccaggaaaatagggatgtttccttcccagagatctgtgtgtcttttttcagaaacgtctgtgacaggcccatcaattttgaaatatttggtttttgagcctgtcactctaaaccagcgtttaacgttcaaaaggcaaataactgatgaccaggcggcacattgttctgctccgtgagtgtctggcactgggaaaggtgtagattgtctagaatgacagcaattccgacgccccagtcagtcctgcgtgattgtggcgagggcgcgtctggcaccgggaaggtgtagatcatctagaatgacggcgattccgacgccccggtcagtcctgcgtgattggcgagggtgcatctgtcgtgagaattcccagttctgaagagagcaaggagactgatcccgcgtagtccaaggcattggctcccctgttgctcttccttgtggagctccccctgccccactccctcctgcctgcatcttcagagctgcctctgaagctcgcttggtccctagctcacactttccctgcggctgggaaggtaattgaatactcgagtttaaaaggaaagcacatccttttaaaccaaaacacacctgctgggctgtaaacagcttttagtgacattaccatctactctgaaaatctaacaaaggagtgatttgtgcagttgaaagtaggatttgcttcataaaagtcacaatttgaattcatttttgcttttaaatccagccaaccttttctgtcttaaaaggaaaaaaaaaaaaaaaccattcaccagggttcttgctgcctgtaacctcaggcagatgaattcctagttggctgtgacttttggtttaagtggaaggttgaggaggaaaatgaaaataattcttttgttatctaaaggaaaacatgtttgaaaatgtcttggcggcgttggctggtggtgtgtaacgtcgattttgtctctgcagaattaaggtgaaaagcactgaagttgagatcctagagaagtctcaaattgaagccattgcttcctcgttagggaacgcgaatcccctgagctgaaggagaaggaaaaatggatccgctttcttaaacctttccagaatttgcccctagaaccactcctattcttgacgcccagaatggtccctcacagaatgaggttcctgcggcacccctggaagaactggcctacagacggtcgcttcgcgtggctctggacgttctgagcgagggctcgatttggagtcaagaaagctctgcagggacaggtagagctgaccggtctctgcgagggaagcccatggagcatgtctcctcgccctgtgattcgaactcctcatctcttccccgcggagacgtgttgggcagttccagacctcacaggaggaggccatgtgtgcaacaaagcctgtcaagttcgttcacttgtgaaaaggaccccgagtgcaaagtggaccacaagaaggggctcaggaaaagtgaaaacccaagaggcccgttggtcctcccagctggaggtggtgcccaagatgagagtgggtccagaatccaccacaaaaattggactcttgcaagtaagaggggaagaaactcagcgcagaaggctagcttgtgcctgaatggatcttccctttcagaggacgacacggagagagacatggggagcaaaggaggcagctgggcagccccgtccttgccctccggggtcagggaggacgatccctgtgccaacgctgagggacacgaccccggtctgccgttgggcagcctcactgcgcccccagcccctgagccctcggcctgctcagagcctggagaatgccctgcgaaaaagaggccgcgcctggatggcagccaaaggccgcctgccgtgcagctggagcccatggcagcaggggccgcaccatcccccgggccggggccagggcccagagagtctgtgaccccgcgcagcaccgccaggctgggcccgcctccctcccacgcctctgcggatgcaaccagatgtcttccttgcccggattcccagaagctggagaaagagtgccagtcttccgaagagtccatggggtctaattccatgcgttctatcctggaggaagacgaggaagacgaggagccaccaagagtccttttataccacgaaccacgttcgtttgaagtaggaatgctagtctggcataaacataaaaaataccccttctggccagcagtggtcaaaagcgtcaggcagagagataagaaagcaagtgtgctatacatcgaaggacacatgaacccgaaaatgaaaggtttcacagtgtctcttaaaagtttaaagcactttgattgtaaagagaaacagacgcttctgaatcaagccagggaggacttcaaccaggacatcggctggtgtgtctccctcatcaccgactacagggtccggttaggctgcgggtcttttgctggctctttcctggaatattacgcggctgatataagctatcctgtccgaaaatccatccagcaggacgtcttggggaccaagcttcctcaactgagcaaggggagccccgaggagcccgtggtggggtgccccctggggcagaggcagccctgccggaaaatgctccccgaccgctcgcgggccgcccgggaccgggccaaccagaagctggtggagtacattgtgaaggccaagggcgcggagagccacctgcgggccatcctaaagagcaggaagccatctcgctggctgcagaccttcctgagctccagccagtacgtgacctgtgtggagacctacctggaggatgaggggcagctggacctggtggtgaagtacctgcagggcgtctaccaggaggtgggggccaaggtgctccagcgcaccaacggcgaccggatccggttcattctggacgtgcttctgcccgaggccatcatctgtgcgatctctgcggtggacgaggtggactacaagacggctgaggagaagtacatcaaggggccttcgctgagctaccgggaaaaagaaatatttgacaaccagctccttgaagagcggaaccggcgccgtcggtgagggagcagccggctgtgctgtcagcggggcctggcggtggaagcgcctccagtgtgcatgagcgtgtctgaagatggggggctcagggggcacgtttgcgtttggacctgtctgtgcgttctcctgcgtggcagtcctgatttccatacttctggagaatccatttcgttaacactgaaagccagttctcttttcctggcagtttttttcattttatttttggcattttttacaagataccgttcgggaaaggcttttgaaaggacggaagcgtattcactgtgcgccagtactcctggctgtgctgtggtttctcccgacgtgcacatcgatctcgtatgtgtggcatctgatattaaacgggaggttttaagaagcgtctgccgtgatcatggagcttcggaagcgggaatggttcttccgggtttgctgttttgtctgtttcccccttgtgtggtttccgcctgcgacagttccagaatttgctctcccactcagtgtgctctgcgcacctttccaggggcctctgtgtcccgcactgtgtgtgagtggaccgcagcgcgcagccacatgccctggctgccatgggccagaccgcctccacctcccccgcccgcctggcctgtcctgagtgcatttccctgcactgtgtcgtcactgcacagccagtcaccgcggtctcagtcatcggcgcggatggctatgctggggtcccagggtggccgcagcagtcagggtcactgtgggagccctggggtggagtgacaaaccgcattgtcctgtgcccgccatggcagaagcgcagcctttgtatggaggcccaaccgcgctcccgtctggagaagcggcttccggggtgtggctgccgggtcggctctggtccacagcacggtgccggggctgcaggttgttgagggctgtgactccgtggggctcagccaggctccagcagggtcagacgtgctgttaagagcaaagccacagacgatgacttgtccattctcagtggatgctccaggctgtgcctacacagcagtgctggtgacatgtccagggttccagggcccggtggcctgggagctgctttctccccactggctgggctgcatctggccctggctggaggccttgctttgaggggctgtgaccctcttcccccaggccctccccagccgacgacagccaccggagaggagatcggaacacgattgtctcagatgcagggcgctgtgcgggacgaagccgcaaggactctcgtatcgggcccttgggactcgggaggtgccagaggcggcggctgctctggacctcggtgttcactgacctttgtttcacttgcctctgctcgactccgagagcaggaaacccggccgtggcctggcagctccgcctcccatgcccgcacgctggggtctgtcttgtctggagcagtggggcacaccccggaggaggcgggggtcagggctgtcggccttggccccctgctggtcgctgtttcggggactcggggcggccagtaccaccgcctgaggcggggctcagcagcgttgcatgtacgggcctcgtactgcctcatggaaaatcctccggagccgccctccattgtgggttcctgagagtaggacacattgccatggttttgtgggaatcacgcgcccctgatggaacttttctgctgttgtgaagtacttttatccatttgcttctctgctgaccttgccaagttgttcgaggtggaattaaacacctcccagacctc

SEQ ID NO: 356725 - DNA, 5331 bp, Homo sapiens
agcggggcggaggcggtgagcgcgggcggcgcggacggcagcggttggcgggcgggtcctccgctgttgcggccgctgcggcctccttgcccgggcttggggcgccgcgctggggaaagccgggggcccggacacattggcgtgagacctgggagtacgttgtgccaaatcattgccacttgccacatgagtgtaaatgatggcggatgccaagtatgtcctctgccgatgggaaaagcgattatggcctgcgaaggttttggcccgaaccgcgacttcaacaaaaaataagagaagaaaggaatattttctagctgtgcaaatcctctccctagaggaaaagttaagtgttgtgttgttttaatactgttttttcccgtgtagatttctgatacttcaatcccctactcccccaaaacagttgaagcccagcccactcttaatgggcttattcaccatttgtgtaattcattaatgctcataataacctcatgagaaagcaactagtttgattttatgtcagtttggaagctgaagatccaaacgaggcattctgtgagatctatggagagattggtacaaacactgaatacatgtaaattatactcagggtagaccctatttgtggttaaaatagggatatttccttttttttttttttttttgactgtttcttaatcagtgccatgccaggaaaatagggatgtttccttcccagagatctgtgtgtcttttttcagaaacgtctgtgacaggcccatcaattttgaaatatttggtttttgagcctgtcactctaaaccagcgtttaacgttcaaaaggcaaataactgatgaccaggcggcacattgttctgctccgtgagtgtctggcactgggaaaggtgtagattgtctagaatgacagcaattccgacgccccagtcagtcctgcgtgattgtggcgagggcgcgtctggcaccgggaaggtgtagatcatctagaatgacggcgattccgacgccccggtcagtcctgcgtgattggcgagggtgcatctgtcgtgagaattcccagttctgaagagagcaaggagactgatcccgcgtagtccaaggcattggctcccctgttgctcttccttgtggagctccccctgccccactccctcctgcctgcatcttcagagctgcctctgaagctcgcttggtccctagctcacactttccctgcggctgggaaggtaattgaatactcgagtttaaaaggaaagcacatccttttaaaccaaaacacacctgctgggctgtaaacagcttttagtgacattaccatctactctgaaaatctaacaaaggagtgatttgtgcagttgaaagtaggatttgcttcataaaagtcacaatttgaattcatttttgcttttaaatccagccaaccttttctgtcttaaaaggaaaaaaaaaaaaaaaccattcaccagggttcttgctgcctgtaacctcaggcagatgaattcctagttggctgtgacttttggtttaagtggaaggttgaggaggaaaatgaaaataattcttttgttatctaaaggaaaacatgtttgaaaatgtcttggcggcgttggctggtggtgtgtaacgtcgattttgtctctgcagaattaaggtgaaaagcactgaagttgagatcctagagaagtctcaaattgaagccattgcttcctcgttagggaacgcgaatcccctgagctgaaggagaaggaaaaatggatccgctttcttaaacctttccagaatttgcccctagaaccactcctattcttgacgcccagaatggtccctcacagaatgaggttcctgcggcacccctggaagaactggcctacagacggtcgcttcgcgtggctctggacgttctgagcgagggctcgatttggagtcaagaaagctctgcagggacaggtagagctgaccggtctctgcgagggaagcccatggagcatgtctcctcgccctgtgattcgaactcctcatctcttccccgcggagacgtgttgggcagttccagacctcacaggaggaggccatgtgtgcaacaaagcctgtcaagttcgttcacttgtgaaaaggaccccgagtgcaaagtggaccacaagaaggggctcaggaaaagtgaaaacccaagaggcccgttggtcctcccagctggaggtggtgcccaagatgagagtgggtccagaatccaccacaaaaattggactcttgcaagtaagaggggaagaaactcagcgcagaaggctagcttgtgcctgaatggatcttccctttcagaggacgacacggagagagacatggggagcaaaggaggcagctgggcagccccgtccttgccctccggggtcagggaggacgatccctgtgccaacgctgagggacacgaccccggtctgccgttgggcagcctcactgcgcccccagcccctgagccctcggcctgctcagagcctggagaatgccctgcgaaaaagaggccgcgcctggatggcagccaaaggccgcctgccgtgcagctggagcccatggcagcaggggccgcaccatcccccgggccggggccagggcccagagagtctgtgaccccgcgcagcaccgccaggctgggcccgcctccctcccacgcctctgcggatgcaaccagatgtcttccttgcccggattcccagaagctggagaaagagtgccagtcttccgaagagtccatggggtctaattccatgcgttctatcctggaggaagacgaggaagacgaggagccaccaagagtccttttataccacgaaccacgttcgtttgaagtaggaatgctagtctggcataaacataaaaaataccccttctggccagcagtggtcaaaagcgtcaggcagagagataagaaagcaagtgtgctatacatcgaaggacacatgaacccgaaaatgaaaggtttcacagtgtctcttaaaagtttaaagcactttgattgtaaagagaaacagacgcttctgaatcaagccagggaggacttcaaccaggacatcggctggtgtgtctccctcatcaccgactacagggtccggttaggctgcgggtcttttgctggctctttcctggaatattacgcggctgatataagctatcctgtccgaaaatccatccagcaggacgtcttggggaccaagcttcctcaactgagcaaggggagccccgaggagcccgtggtggggtgccccctggggcagaggcagccctgccggaaaatgctccccgaccgctcgcgggccgcccgggaccgggccaaccagaagctggtggagtacattgtgaaggccaagggcgcggagagccacctgcgggccatcctaaagagcaggaagccatctcgctggctgcagaccttcctgagctccagccagtacgtgacctgtgtggagacctacctggaggatgaggggcagctggacctggtggtgaagtacctgcagggcgtctaccaggaggtgggggccaaggtgctccagcgcaccaacggcgaccggatccggttcattctggacgtgcttctgcccgaggccatcatctgtgcgatctctgcggtggacgaggtggactacaagacggctgaggagaagtacatcaaggggccttcgctgagctaccggtaggccgctcccggcgctatctccagccacttgcgtctctgccttgcagtttctatttccacacccacaggcagtttgactccaggctgccgcagcccctctccctcatgaggtggcccaggtgctgggtggtgagctgatcacatacgctgaactcaccctgtgggtcactcctgccccccaggaaggctgtgcccgggtctcccagctggtcgctgtgggcagcacggggccacgggcacgtgcctgggccgtgtctgttcttaatctctttttgcaggggctgatgtttgctttttgcactttcctcccctctttccacagccccatggctgtgtgagaaatacagcaagattaagcagcagcacggcccggtgctttccagcagccagaagaatgctgtgatcaagatgtttctctcacatccgtgtgcttagctgcccttggatgtttggcccccagagcgcctaatcctgtctctgggcatgcggccaggccttgctgggagccaggcggggcccacggggcagtgacaggctgaagactcaactagagtcaaggacagggtctccggccagggtggcttgcgcagccaccgacgtctcccgggcccacagtcacaggagactcctggtgaagacactgaactccctcaccagccccatgtcctccctgggcagggcaggaggggcccctggagaggccagggaggaggtgtggggcctcggtggcattggcaggccacccccgcagagctgcacaaaggtggaatttggccttgtttagggagtgttggcccagctggcttaccaaaacaggaaaggcctttggatacagaaactgggtgttttcctgctggatcttcatggttcccccgtcatgcttgccgtaagaataagtgaggtccggggagggggtaaggtcggagccaggacacctggacccagcctgctggtttgtcctctccctccgtctcagaagcctcttcaccgctccacgcccatctgtggaaatctttcatcctgatttttttttttgagtctgggttgccgacatcaaaacccgttaggagttcatcacagcttccagttgccatgaaagcctcccgtgacctgtgagaatggtgctggtgctgatggagaagttacttgggctgagcacacaggccgtgatttcatcacgccggggacatgctcaaaataacaagccaggaggaaaaagaaatatttgacaaccagctccttgaagagcggaaccggcgccgtcggtgagggagcagccggctgtgctgtcagcggggcctggcggtggaagcgcctccagtgtgcatgagcgtgtctgaagatggggggctcagggggcacgtttgcgtttggacctgtctgtgcgttctcctgcgtggcagtcctgatttccatacttctggagaatccatttcgttaacactgaaagccagttctcttttcctggcagtttttttcattttatttttggcattttttacaagataccgttcgggaaaggcttttgaaaggacggaagcgtattcactgtgcgccagtactcctggctgtgctgtggtttctcccgacgtgcacatcgatctcgtatgtgtggcatctgatattaaacgggaggttttaagaag

SEQ ID NO: 356726 - DNA, 2596 bp, Homo sapiens
agcggggcggaggcggtgagcgcgggcggcgcggacggcagcggttggcgggcgggtcctccgctgttgcggccgctgcggcctccttgcccgggcttggggcgccgcgctggggaaagccgggggcccggacacattggcgtgagacctgggagtacgttgtgccaaatcattgccacttgccacatgagtgtaaatgatggcggatgccaagtatgtcctctgccgatgggaaaagcgattatggcctgcgaaggttttggcccgaaccgcgacttcaacaaaaaataagagaagaaaggaatattttctagctgtgcaaatcctctccctagaggaaaagttaagtgttgtgttgttttaatactgttttttcccgtgtagatttctgatacttcaatcccctactcccccaaaacagttgaagcccagcccactcttaatgggcttattcaccatttgtgtaattcattaatgctcataataacctcatgagaaagcaactagtttgattttatgtcagtttggaagctgaagatccaaacgaggcattctgtgagatctatggagagattggtacaaacactgaatacatgtaaattatactcagggtagaccctatttgtggttaaaatagggatatttccttttttttttttttttttgactgtttcttaatcagtgccatgccaggaaaatagggatgtttccttcccagagatctgtgtgtcttttttcagaaacgtctgtgacaggcccatcaattttgaaatatttggtttttgagcctgtcactctaaaccagcgtttaacgttcaaaaggcaaataactgatgaccaggcggcacattgttctgctccgtgagtgtctggcactgggaaaggtgtagattgtctagaatgacagcaattccgacgccccagtcagtcctgcgtgattgtggcgagggcgcgtctggcaccgggaaggtgtagatcatctagaatgacggcgattccgacgccccggtcagtcctgcgtgattggcgagggtgcatctgtcgtgagaattcccagttctgaagagagcaaggagactgatcccgcgtagtccaaggcattggctcccctgttgctcttccttgtggagctccccctgccccactccctcctgcctgcatcttcagagctgcctctgaagctcgcttggtccctagctcacactttccctgcggctgggaaggtaattgaatactcgagtttaaaaggaaagcacatccttttaaaccaaaacacacctgctgggctgtaaacagcttttagtgacattaccatctactctgaaaatctaacaaaggagtgatttgtgcagttgaaagtaggatttgcttcataaaagtcacaatttgaattcatttttgcttttaaatccagccaaccttttctgtcttaaaaggaaaaaaaaaaaaaaaccattcaccagggttcttgctgcctgtaacctcaggcagatgaattcctagttggctgtgacttttggtttaagtggaaggttgaggaggaaaatgaaaataattcttttgttatctaaaggaaaacatgtttgaaaatgtcttggcggcgttggctggtggtgtgtaacgtcgattttgtctctgcagaattaaggtgaaaagcactgaagttgagatcctagagaagtctcaaattgaagccattgcttcctcgttaggtaagagcgtatttttaagtggccactaggttttcataaaataagaggtcatttgggagaatgtgaaggctcagctttctgggtaaaaattcaccctgttcaccatgtttttcttcatacaagggaacgcgaatcccctgagctgaaggagaaggaaaaatggatccgctttcttaaacctttccagaatttgcccctagaaccactcctattcttgacgcccagaatggtcagtggtgagcatcaaggtcatctcgtaccctcgtggcctccagtacacaagacgaggaaggactttgctgccataaggggggaggtcctcctttttcctttcctcttcctatagtaagatttgctgtggtactgtcgctgcctggccagtctggtctcagcccaaggtttgagaagcagttggttgtgtgtttaaaattccagagcagagcccaagggagagaacgggtggcctggcactggggttggtggcacccattgtttgaggcactgtcatggggggcacgaggcaggtcggaagtggagctctcggcttcccatccatccgggtgcgctttctcccaggccttcagtttagcacccacctcctttgcacactgtgggtgagaaaagctttgcctgagtccagccggggactggtcatgcacatacatgacaagtgaggagcactggtgactgcctgccccctagccacagttgtgcaaacccaaacctgccagccttccttctcaaagtggaactgtttatcccatttgcaaataattgtttctcttgtgaaaagatggaccggaattccttccaatgatgtttataaaatcaggtctattttcctgtgtcttccgaaaaacagctcttgtttaaagcaggatcca

SEQ ID NO: 356727 - DNA, 461 bp, Homo sapiens
tccttgtgtttgggtcttctccgcgtgccattacctcacctctgttttgtgccacacactctttaaaagtgtcttcccgcggggtttagagttaggaaagtcgcgcacacataggacagagccccagccgcccctcgtggcacccctcccatcccaagggtgcgtttgtcgcagctgggaacccagtgcagcaccccactcagctgctggtttcactgtctcatcattggtggttagactcaagtagtgtggggtatgtgaatctgcctttcagattctcctgatcttttaagcgaatgacacaaagtcaggttttaacaatatcgtgctaactgtgttttctcaggctgttacacctggtgcttgatatggatttgacttgtctattcttttttttttgtttttcttttttctttaattctagaaccacgttcgtttgaagtaggaatgctagtctggca

SEQ ID NO: 356728 - DNA, 311 bp, Homo sapiens
atcttttttgttttgacgttttattttcttggatttgtgaacaggtcaaaagcgtcaggcagagagataagaaagcaagtgtgctatacatcgaaggacacatgaacccgaaaatgaaagggtaacccgctgttcttggtttctgtgaatgggcctgaggggccaggccggccgctctcagagtcagagcgggcgtggggatggagggacagaggggaggccccggcaggagtccaggcccgggcagggctagtgaggtctcactggaggtgtgcccttcttgtggcctctcactccctgggatgggtgag

SEQ ID NO: 356729 - DNA, 475 bp, Homo sapiens
tttttgttttgacgttttattttcttggatttgtgaacaggtcaaaagcgtcaggcagagagataagaaagcaagtgtgctatacatcgaaggacacatgaacccgaaaatgaaagggtaacccgctgttcttggtttctgtgaatgggcctgaggggccaggccggccgctctcagagtcagagcgggcgtggggatggagggacagaggggaggccccggcaggagtccaggcccgggcagggctagtgaggtctcactggaggtgtgcccttcttgtggcctctcactccctgggatgggtgagtcagacagaggctgggtgtgaagggtctggtcaaacaccccagttttcacaacttgatttgctggctttgaaaggcagcccaaccagacactcactggggccctgtttcccacaaaccagcaaaatgtccacgcaggtgtgcagacagcatccctgcgtccacctgag

SEQ ID NO: 356730 - DNA, 286 bp, Homo sapiens
taacaaggattttcttttgttttaaatgtaggttttggcccgaaccgcgacttcaacaaaaaataagagaagaaaggaatattttctagctgtgcaaatcctctccctagaggaaaagttaagtgttgtgttgttttaatactgttttttcccgtgtagatttctgatacttcaatcccctactcccccaaaacagttgaagcccagcccactcttaatgggcttattcaccatttgtgtaattcattaatgctcataataacctcatgagaaagcaactagtttg

SEQ ID NO: 356731 - DNA, 465 bp, Homo sapiens
tttcacagtgtctcttaaaagtttaaagcactttgattgtaaagagaaacagacgcttctggtaggtggatgatgttttgtgcttgctttaaatggtttactttgtgattagtaaatatgtcctctgtgtgtagctcttgaaatccatggctgcggtgtacgcgtgtgaatgattgtgggaagtagcagagccaggctgcgctctggccgttagagttagatcgtgggctcagtcactgcgctgaattctcacaactgtcctgggaagttgcggccccatttccccgctttacgggtaaggaagctggggctccggcgaggacagtttacccagggccaccaggcaaggctacagcagagagcctctgcgcaaggccaccgccttccctggccgactgtctcagtccaccccatgtcacggtggcctcggtagccagccccttgcggccgggggcgtccctagct

SEQ ID NO: 356732 - DNA, 430 bp, Homo sapiens
tttggtattttttgtagagacagggtttcaccgtgttagccaggatggtcctgatctcctgaccttgtgatccgcctgcctcggcctcccaaagtgctgggattacaggcgtgagcgaccacacccagtcctctctctcatattctttaacacacaatgattaattactaaaatgaagactcttgttttctgaagggaaaaagaaatatttgacaaccagctccttgaagagcggaaccggcgccgtcggtgagggagcagccggctgtgctgtcagcggggcctggcggtggaagcgcctccagtgtgcatgagcgtgtctgaagatggggggctcagggggcacgtttgcgtttggacctgtctgtgcgttctcctgcgtggcagtcctgatttccatacttctggagaatccatttcgttaacactg

SEQ ID NO: 356733 - DNA, 5488 bp, Homo sapiens
  misc_feature (14)..(14): n is a, c, g, or t
tacgcgcggcggtngcggaggcggacacattggcgtgagacctgggagtacgttgtgccaaatcattgccacttgccacatgagtgtaaatgatggcggatgccaagtatgtcctctgccgatgggaaaagcgattatggcctgcgaaggttttggcccgaaccgcgacttcaacaaaaaataagagaagaaaggaatattttctagctgtgcaaatcctctccctagaggaaaagttaagtgttgtgttgttttaatactgttttttcccgtgtagatttctgatacttcaatcccctactcccccaaaacagttgaagcccagcccactcttaatgggcttattcaccatttgtgtaattcattaatgctcataataacctcatgagaaagcaactagtttgattttatgtcagtttggaagctgaagatccaaacgaggcattctgtgagatctatggagagattggtacaaacactgaatacatgtaaattatactcagggtagaccctatttgtggttaaaatagggatatttccttttttttttttttttttgactgtttcttaatcagtgccatgccaggaaaatagggatgtttccttcccagagatctgtgtgtcttttttcagaaacgtctgtgacaggcccatcaattttgaaatatttggtttttgagcctgtcactctaaaccagcgtttaacgttcaaaaggcaaataactgatgaccaggcggcacattgttctgctccgtgagtgtctggcactgggaaaggtgtagattgtctagaatgacagcaattccgacgccccagtcagtcctgcgtgattgtggcgagggcgcgtctggcaccgggaaggtgtagatcatctagaatgacggcgattccgacgccccggtcagtcctgcgtgattggcgagggtgcatctgtcgtgagaattcccagttctgaagagagcaaggagactgatcccgcgtagtccaaggcattggctcccctgttgctcttccttgtggagctccccctgccccactccctcctgcctgcatcttcagagctgcctctgaagctcgcttggtccctagctcacactttccctgcggctgggaaggtaattgaatactcgagtttaaaaggaaagcacatccttttaaaccaaaacacacctgctgggctgtaaacagcttttagtgacattaccatctactctgaaaatctaacaaaggagtgatttgtgcagttgaaagtaggatttgcttcataaaagtcacaatttgaattcatttttgcttttaaatccagccaaccttttctgtcttaaaaggaaaaaaaaaaaaaaaccattcaccagggttcttgctgcctgtaacctcaggcagatgaattcctagttggctgtgacttttggtttaagtggaaggttgaggaggaaaatgaaaataattcttttgttatctaaaggaaaacatgtttgaaaatgtcttggcggcgttggctggtggtgtgtaacgtcgattttgtctctgcagaattaaggtgaaaagcactgaagttgagatcctagagaagtctcaaattgaagccattgcttcctcgttagggaacgcgaatcccctgagctgaaggagaaggaaaaatggatccgctttcttaaacctttccagaatttgcccctagaaccactcctattcttgacgcccagaatggtccctcacagaatgaggttcctgcggcacccctggaagaactggcctacagacggtcgcttcgcgtggctctggacgttctgagcgagggctcgatttggagtcaagaaagctctgcagggacaggtagagctgaccggtctctgcgagggaagcccatggagcatgtctcctcgccctgtgattcgaactcctcatctcttccccgcggagacgtgttgggcagttccagacctcacaggaggaggccatgtgtgcaacaaagcctgtcaagttcgttcacttgtgaaaaggaccccgagtgcaaagtggaccacaagaaggggctcaggaaaagtgaaaacccaagaggcccgttggtcctcccagctggaggtggtgcccaagatgagagtgggtccagaatccaccacaaaaattggactcttgcaagtaagaggggaagaaactcagcgcagaaggctagcttgtgcctgaatggatcttccctttcagaggacgacacggagagagacatggggagcaaaggaggcagctgggcagccccgtccttgccctccggggtcagggaggacgatccctgtgccaacgctgagggacacgaccccggtctgccgttgggcagcctcactgcgcccccagcccctgagccctcggcctgctcagagcctggagaatgccctgcgaaaaagaggccgcgcctggatggcagccaaaggccgcctgccgtgcagctggagcccatggcagcaggggccgcaccatcccccgggccggggccagggcccagagagtctgtgaccccgcgcagcaccgccaggctgggcccgcctccctcccacgcctctgcggatgcaaccagatgtcttccttgcccggattcccagaagctggagaaagagtgccagtcttccgaagagtccatggggtctaattccatgcgttctatcctggaggaagacgaggaagacgaggagccaccaagagtccttttataccacgaaccacgttcgtttgaagtaggaatgctagtctggcataaacataaaaaataccccttctggccagcagtggtcaaaagcgtcaggcagagagataagaaagcaagtgtgctatacatcgaaggacacatgaacccgaaaatgaaaggtttcacagtgtctcttaaaagtttaaagcactttgattgtaaagagaaacagacgcttctgaatcaagccagggaggacttcaaccaggacatcggctggtgtgtctccctcatcaccgactacagggtccggttaggctgcgggtcttttgctggctctttcctggaatattacgcggctgatataagctatcctgtccgaaaatccatccagcaggacgtcttggggaccaagcttcctcaactgagcaaggggagccccgaggagcccgtggtggggtgccccctggggcagaggcagccctgccggaaaatgctccccgaccgctcgcgggccgcccgggaccgggccaaccagaagctggtggagtacattgtgaaggccaagggcgcggagagccacctgcgggccatcctaaagagcaggaagccatctcgctggctgcagaccttcctgagctccagccagtacgtgacctgtgtggagacctacctggaggatgaggggcagctggacctggtggtgaagtacctgcagggcgtctaccaggaggtgggggccaaggtgctccagcgcaccaacggcgaccggatccggttcattctggacgtgcttctgcccgaggccatcatctgtgcgatctctgcggtggacgaggtggactacaagacggctgaggagaagtacatcaaggggccttcgctgagctaccgggaaaaagaaatatttgacaaccagctccttgaagagcggaaccggcgccgtcggtgagggagcagccggctgtgctgtcagcggggcctggcggtggaagcgcctccagtgtgcatgagcgtgtctgaagatggggggctcagggggcacgtttgcgtttggacctgtctgtgcgttctcctgcgtggcagtcctgatttccatacttctggagaatccatttcgttaacactgaaagccagttctcttttcctggcagtttttttcattttatttttggcattttttacaagataccgttcgggaaaggcttttgaaaggacggaagcgtattcactgtgcgccagtactcctggctgtgctgtggtttctcccgacgtgcacatcgatctcgtatgtgtggcatctgatattaaacgggaggttttaagaagcgtctgccgtgatcatggagcttcggaagcgggaatggttcttccgggtttgctgttttgtctgtttcccccttgtgtggtttccgcctgcgacagttccagaatttgctctcccactcagtgtgctctgcagctgtgaggaaacagccttcgttagaggcgggagcagagacgagccgctgctctgtgtcgtgtttgctgtggccgcagggagaggagcgggacacgcacctttccaggggcctctgtgtcccgcactgtgtgtgagtggaccgcagcgcgcagccacatgccctggctgccatgggccagaccgcctccacctcccccgcccgcctggcctgtcctgagtgcatttccctgcactgtgtcgtcactgcacagccagtcaccgcggtctcagtcatcggcgcggatggctatgctggggtcccagggtggccgcagcagtcagggtcactgtgggagccctggggtggagtgacaaaccgcattgtcctgtgcccgccatggcagaagcgcagcctttgtatggaggcccaaccgcgctcccgtctggagaagcggcttccggggtgtggctgccgggtcggctctggtccacagcacggtgccggggctgcaggttgttgagggctgtgactccgtggggctcagccaggctccagcagggtcagacgtgctgttaagagcaaagccacagacgatgacttgtccattctcagtggatgctccaggctgtgcctacacagcagtgctggtgacatgtccagggttccagggcccggtggcctgggagctgctttctccccactggctgggctgcatctggccctggctggaggccttgctttgaggggctgtgaccctcttcccccaggccctccccagccgacgacagccaccggagaggagatcggaacacgattgtctcagatgcagggcgctgtgcgggacgaagccgcaaggactctcgtatcgggcccttgggactcgggaggtgccagaggcggcggctgctctggacctcggtgttcactgacctttgtttcacttgcctctgctcgactccgagagcaggaaacccggccgtggcctggcagctccgcctcccatgcccgcacgctggggtctgtcttgtctggagcagtggggcacaccccggaggaggcgggggtcagggctgtcggccttggccccctgctggtcgctgtttcggggactcggggcggccagtaccaccgcctgaggcggggctcagcagcgttgcatgtacgggcctcgtactgcctcatggaaaatcctccggagccgccctccattgtgggttcctgagagtaggacacattgccatggttttgtgggaatcacgcgcccctgatggaacttttctgctgttgtgaagtacttttatccatttgcttctctgctgaccttgccaagttgttcgaggtggaattaaacacctcccagacctc

SEQ ID NO: 356734 - DNA, 5445 bp, Homo sapiens
tcagctcggtaccaatagttacacaacacttgccacatgagtgtaaatgatggcggatgccaagtatgtcctctgccgatgggaaaagcgattatggcctgcgaaggttttggcccgaaccgcgacttcaacaaaaaataagagaagaaaggaatattttctagctgtgcaaatcctctccctagaggaaaagttaagtgttgtgttgttttaatactgttttttcccgtgtagatttctgatacttcaatcccctactcccccaaaacagttgaagcccagcccactcttaatgggcttattcaccatttgtgtaattcattaatgctcataataacctcatgagaaagcaactagtttgattttatgtcagtttggaagctgaagatccaaacgaggcattctgtgagatctatggagagattggtacaaacactgaatacatgtaaattatactcagggtagaccctatttgtggttaaaatagggatatttccttttttttttttttttttgactgtttcttaatcagtgccatgccaggaaaatagggatgtttccttcccagagatctgtgtgtcttttttcagaaacgtctgtgacaggcccatcaattttgaaatatttggtttttgagcctgtcactctaaaccagcgtttaacgttcaaaaggcaaataactgatgaccaggcggcacattgttctgctccgtgagtgtctggcactgggaaaggtgtagattgtctagaatgacagcaattccgacgccccagtcagtcctgcgtgattgtggcgagggcgcgtctggcaccgggaaggtgtagatcatctagaatgacggcgattccgacgccccggtcagtcctgcgtgattggcgagggtgcatctgtcgtgagaattcccagttctgaagagagcaaggagactgatcccgcgtagtccaaggcattggctcccctgttgctcttccttgtggagctccccctgccccactccctcctgcctgcatcttcagagctgcctctgaagctcgcttggtccctagctcacactttccctgcggctgggaaggtaattgaatactcgagtttaaaaggaaagcacatccttttaaaccaaaacacacctgctgggctgtaaacagcttttagtgacattaccatctactctgaaaatctaacaaaggagtgatttgtgcagttgaaagtaggatttgcttcataaaagtcacaatttgaattcatttttgcttttaaatccagccaaccttttctgtcttaaaaggaaaaaaaaaaaaaaaccattcaccagggttcttgctgcctgtaacctcaggcagatgaattcctagttggctgtgacttttggtttaagtggaaggttgaggaggaaaatgaaaataattcttttgttatctaaaggaaaacatgtttgaaaatgtcttggcggcgttggctggtggtgtgtaacgtcgattttgtctctgcagaattaaggtgaaaagcactgaagttgagatcctagagaagtctcaaattgaagccattgcttcctcgttagggaacgcgaatcccctgagctgaaggagaaggaaaaatggatccgctttcttaaacctttccagaatttgcccctagaaccactcctattcttgacgcccagaatggtccctcacagaatgaggttcctgcggcacccctggaagaactggcctacagacggtcgcttcgcgtggctctggacgttctgagcgagggctcgatttggagtcaagaaagctctgcagggacaggtagagctgaccggtctctgcgagggaagcccatggagcatgtctcctcgccctgtgattcgaactcctcatctcttccccgcggagacgtgttgggcagttccagacctcacaggaggaggccatgtgtgcaacaaagcctgtcaagttcgttcacttgtgaaaaggaccccgagtgcaaagtggaccacaagaaggggctcaggaaaagtgaaaacccaagaggcccgttggtcctcccagctggaggtggtgcccaagatgagagtgggtccagaatccaccacaaaaattggactcttgcaagtaagaggggaagaaactcagcgcagaaggctagcttgtgcctgaatggatcttccctttcagaggacgacacggagagagacatggggagcaaaggaggcagctgggcagccccgtccttgccctccggggtcagggaggacgatccctgtgccaacgctgagggacacgaccccggtctgccgttgggcagcctcactgcgcccccagcccctgagccctcggcctgctcagagcctggagaatgccctgcgaaaaagaggccgcgcctggatggcagccaaaggccgcctgccgtgcagctggagcccatggcagcaggggccgcaccatcccccgggccggggccagggcccagagagtctgtgaccccgcgcagcaccgccaggctgggcccgcctccctcccacgcctctgcggatgcaaccagatgtcttccttgcccggattcccagaagctggagaaagagtgccagtcttccgaagagtccatggggtctaattccatgcgttctatcctggaggaagacgaggaagacgaggagccaccaagagtccttttataccacgaaccacgttcgtttgaagtaggaatgctagtctggcataaacataaaaaataccccttctggccagcagtggtcaaaagcgtcaggcagagagataagaaagcaagtgtgctatacatcgaaggacacatgaacccgaaaatgaaaggtttcacagtgtctcttaaaagtttaaagcactttgattgtaaagagaaacagacgcttctgaatcaagccagggaggacttcaaccaggacatcggctggtgtgtctccctcatcaccgactacagggtccggttaggctgcgggtcttttgctggctctttcctggaatattacgcggctgatataagctatcctgtccgaaaatccatccagcaggacgtcttggggaccaagcttcctcaactgagcaaggggagccccgaggagcccgtggtggggtgccccctggggcagaggcagccctgccggaaaatgctccccgaccgctcgcgggccgcccgggaccgggccaaccagaagctggtggagtacattgtgaaggccaagggcgcggagagccacctgcgggccatcctaaagagcaggaagccatctcgctggctgcagaccttcctgagctccagccagtacgtgacctgtgtggagacctacctggaggatgaggggcagctggacctggtggtgaagtacctgcagggcgtctaccaggaggtgggggccaaggtgctccagcgcaccaacggcgaccggatccggttcattctggacgtgcttctgcccgaggccatcatctgtgcgatctctgcggtggacgaggtggactacaagacggctgaggagaagtacatcaaggggccttcgctgagctaccgggaaaaagaaatatttgacaaccagctccttgaagagcggaaccggcgccgtcggtgagggagcagccggctgtgctgtcagcggggcctggcggtggaagcgcctccagtgtgcatgagcgtgtctgaagatggggggctcagggggcacgtttgcgtttggacctgtctgtgcgttctcctgcgtggcagtcctgatttccatacttctggagaatccatttcgttaacactgaaagccagttctcttttcctggcagtttttttcattttatttttggcattttttacaagataccgttcgggaaaggcttttgaaaggacggaagcgtattcactgtgcgccagtactcctggctgtgctgtggtttctcccgacgtgcacatcgatctcgtatgtgtggcatctgatattaaacgggaggttttaagaagcgtctgccgtgatcatggagcttcggaagcgggaatggttcttccgggtttgctgttttgtctgtttcccccttgtgtggtttccgcctgcgacagttccagaatttgctctcccactcagtgtgctctgcagctgtgaggaaacagccttcgttagaggcgggagcagagacgagccgctgctctgtgtcgtgtttgctgtggccgcagggagaggagcgggacacgcacctttccaggggcctctgtgtcccgcactgtgtgtgagtggaccgcagcgcgcagccacatgccctggctgccatgggccagaccgcctccacctcccccgcccgcctggcctgtcctgagtgcatttccctgcactgtgtcgtcactgcacagccagtcaccgcggtctcagtcatcggcgcggatggctatgctggggtcccagggtggccgcagcagtcagggtcactgtgggagccctggggtggagtgacaaaccgcattgtcctgtgcccgccatggcagaagcgcagcctttgtatggaggcccaaccgcgctcccgtctggagaagcggcttccggggtgtggctgccgggtcggctctggtccacagcacggtgccggggctgcaggttgttgagggctgtgactccgtggggctcagccaggctccagcagggtcagacgtgctgttaagagcaaagccacagacgatgacttgtccattctcagtggatgctccaggctgtgcctacacagcagtgctggtgacatgtccagggttccagggcccggtggcctgggagctgctttctccccactggctgggctgcatctggccctggctggaggccttgctttgaggggctgtgaccctcttcccccaggccctccccagccgacgacagccaccggagaggagatcggaacacgattgtctcagatgcagggcgctgtgcgggacgaagccgcaaggactctcgtatcgggcccttgggactcgggaggtgccagaggcggcggctgctctggacctcggtgttcactgacctttgtttcacttgcctctgctcgactccgagagcaggaaacccggccgtggcctggcagctccgcctcccatgcccgcacgctggggtctgtcttgtctggagcagtggggcacaccccggaggaggcgggggtcagggctgtcggccttggccccctgctggtcgctgtttcggggactcggggcggccagtaccaccgcctgaggcggggctcagcagcgttgcatgtacgggcctcgtactgcctcatggaaaatcctccggagccgccctccattgtgggttcctgagagtaggacacattgccatggttttgtgggaatcacgcgcccctgatggaacttttctgctgttgtgaagtacttttatccatttgcttctctgctgaccttgccaagttgttcgaggtggaattaaacacctcccagacctc

SEQ ID NO: 356735 - DNA, 6267 bp, Homo sapiens
  misc_feature (6267)..(6267): n is a, c, g, or t
agcggggcggaggcggtgagcgcgggcggcgcggacggcagcggttggcgggcgggtcctccgctgttgcggccgctgcggcctccttgcccgggcttggggcgccgcgctggggaaagccgggggcccggacacattggcgtgagacctgggagtacgttgtgccaaatcattgccacttgccacatgagtgtaaatgatggcggatgccaagtatgtcctctgccgatgggaaaagcgattatggcctgcgaaggttttggcccgaaccgcgacttcaacaaaaaataagagaagaaaggaatattttctagctgtgcaaatcctctccctagaggaaaagttaagtgttgtgttgttttaatactgttttttcccgtgtagatttctgatacttcaatcccctactcccccaaaacagttgaagcccagcccactcttaatgggcttattcaccatttgtgtaattcattaatgctcataataacctcatgagaaagcaactagtttgattttatgtcagtttggaagctgaagatccaaacgaggcattctgtgagatctatggagagattggtacaaacactgaatacatgtaaattatactcagggtagaccctatttgtggttaaaatagggatatttccttttttttttttttttttgactgtttcttaatcagtgccatgccaggaaaatagggatgtttccttcccagagatctgtgtgtcttttttcagaaacgtctgtgacaggcccatcaattttgaaatatttggtttttgagcctgtcactctaaaccagcgtttaacgttcaaaaggcaaataactgatgaccaggcggcacattgttctgctccgtgagtgtctggcactgggaaaggtgtagattgtctagaatgacagcaattccgacgccccagtcagtcctgcgtgattgtggcgagggcgcgtctggcaccgggaaggtgtagatcatctagaatgacggcgattccgacgccccggtcagtcctgcgtgattggcgagggtgcatctgtcgtgagaattcccagttctgaagagagcaaggagactgatcccgcgtagtccaaggcattggctcccctgttgctcttccttgtggagctccccctgccccactccctcctgcctgcatcttcagagctgcctctgaagctcgcttggtccctagctcacactttccctgcggctgggaaggtaattgaatactcgagtttaaaaggaaagcacatccttttaaaccaaaacacacctgctgggctgtaaacagcttttagtgacattaccatctactctgaaaatctaacaaaggagtgatttgtgcagttgaaagtaggatttgcttcataaaagtcacaatttgaattcatttttgcttttaaatccagccaaccttttctgtcttaaaaggaaaaaaaaaaaaaaaccattcaccagggttcttgctgcctgtaacctcaggcagatgaattcctagttggctgtgacttttggtttaagtggaaggttgaggaggaaaatgaaaataattcttttgttatctaaaggaaaacatgtttgaaaatgtcttggcggcgttggctggtggtgtgtaacgtcgattttgtctctgcagaattaaggtgaaaagcactgaagttgagatcctagagaagtctcaaattgaagccattgcttcctcgttagggaacgcgaatcccctgagctgaaggagaaggaaaaatggatccgctttcttaaacctttccagaatttgcccctagaaccactcctattcttgacgcccagaatggtccctcacagaatgaggttcctgcggcacccctggaagaactggcctacagacggtcgcttcgcgtggctctggacgttctgagcgagggctcgatttggagtcaagaaagctctgcagggacaggtagagctgaccggtctctgcgagggaagcccatggagcatgtctcctcgccctgtgattcgaactcctcatctcttccccgcggagacgtgttgggcagttccagacctcacaggaggaggccatgtgtgcaacaaagcctgtcaagttcgttcacttgtgaaaaggaccccgagtgcaaagtggaccacaagaaggggctcaggaaaagtgaaaacccaagaggcccgttggtcctcccagctggaggtggtgcccaagatgagagtgggtccagaatccaccacaaaaattggactcttgcaagtaagaggggaagaaactcagcgcagaaggctagcttgtgcctgaatggatcttccctttcagaggacgacacggagagagacatggggagcaaaggaggcagctgggcagccccgtccttgccctccggggtcagggaggacgatccctgtgccaacgctgagggacacgaccccggtctgccgttgggcagcctcactgcgcccccagcccctgagccctcggcctgctcagagcctggagaatgccctgcgaaaaagaggccgcgcctggatggcagccaaaggccgcctgccgtgcagctggagcccatggcagcaggggccgcaccatcccccgggccggggccagggcccagagagtctgtgaccccgcgcagcaccgccaggctgggcccgcctccctcccacgcctctgcggatgcaaccagatgtcttccttgcccggattcccagaagctggagaaagagtgccagtcttccgaagagtccatggggtctaattccatgcgttctatcctggaggaagacgaggaagacgaggagccaccaagagtccttttataccacgaaccacgttcgtttgaagtaggaatgctagtctggcataaacataaaaaataccccttctggccagcagtggtcaaaagcgtcaggcagagagataagaaagcaagtgtgctatacatcgaaggacacatgaacccgaaaatgaaaggtttcacagtgtctcttaaaagtttaaagcactttgattgtaaagagaaacagacgcttctgaatcaagccagggaggacttcaaccaggacatcggctggtgtgtctccctcatcaccgactacagggtccggttaggctgcgggtcttttgctggctctttcctggaatattacgcggctgatataagctatcctgtccgaaaatccatccagcaggacgtcttggggaccaagcttcctcaactgagcaaggggagccccgaggagcccgtggtggggtgccccctggggcagaggcagccctgccggaaaatgctccccgaccgctcgcgggccgcccgggaccgggccaaccagaagctggtggagtacattgtgaaggccaagggcgcggagagccacctgcgggccatcctaaagagcaggaagccatctcgctggctgcagaccttcctgagctccagccagtacgtgacctgtgtggagacctacctggaggatgaggggcagctggacctggtggtgaagtacctgcagggcgtctaccaggaggtgggggccaaggtgctccagcgcaccaacggcgaccggatccggttcattctggacgtgcttctgcccgaggccatcatctgtgcgatctctgcggtggacgaggtggactacaagacggctgaggagaagtacatcaaggggccttcgctgagctaccgggaaaaagaaatatttgacaaccagctccttgaagagcggaaccggcgccgtcggtgagggagcagccggctgtgctgtcagcggggcctggcggtggaagcgcctccagtgtgcatgagcgtgtctgaagatggggggctcagggggcacgtttgcgtttggacctgtctgtgcgttctcctgcgtggcagtcctgatttccatacttctggagaatccatttcgttaacactgaaagccagttctcttttcctggcagtttttttcattttatttttggcattttttacaagataccgttcgggaaaggcttttgaaaggacggaagcgtattcactgtgcgccagtactcctggctgtgctgtggtttctcccgacgtgcacatcgatctcgtatgtgtggcatctgatattaaacgggaggttttaagaagcgtctgccgtgatcatggagcttcggaagcgggaatggttcttccgggtttgctgttttgtctgtttcccccttgtgtggtttccgcctgcgacagttccagaatttgctctcccactcagtgtgctctgcagctgtgaggaaacagccttcgttagaggcgggagcagagacgagccgctgctctgtgtcgtgtttgctgtggccgcagggagaggagcgggacacgcacctttccaggggcctctgtgtcccgcactgtgtgtgagtggaccgcagcgcgcagccacatgccctggctgccatgggccagaccgcctccacctcccccgcccgcctggcctgtcctgagtgcatttccctgcactgtgtcgtcactgcacagccagtcaccgcggtctcagtcatcggcgcggatggctatgctggggtcccagggtggccgcagcagtcagggtcactgtgggagccctggggtggagtgacaaaccgcattgtcctgtgcccgccatggcagaagcgcagcctttgtatggaggcccaaccgcgctcccgtctggagaagcggcttccggggtgtggctgccgggtcggctctggtccacagcacggtgccggggctgcaggttgttgagggctgtgactccgtggggctcagccaggctccagcagggtcagacgtgctgttaagagcaaagccacagacgatgacttgtccattctcagtggatgctccaggctgtgcctacacagcagtgctggtgacatgtccagggttccagggcccggtggcctgggagctgctttctccccactggctgggctgcatctggccctggctggaggccttgctttgaggggctgtgaccctcttcccccaggccctccccagccgacgacagccaccggagaggagatcggaacacgattgtctcagatgcagggcgctgtgcgggacgaagccgcaaggactctcgtatcgggcccttgggactcgggaggtgccagaggcggcggctgctctggacctcggtgttcactgacctttgtttcacttgcctctgctcgactccgagagcaggaaacccggccgtggcctggcagctccgcctcccatgcccgcacgctggggtctgtcttgtctggagcagtggggcacaccccggaggaggcgggggtcagggctgtcggccttggccccctgctggtcgctgtttcggggactcggggcggccagtaccaccgcctgaggcggggctcagcagcgttgcatgtacgggcctcgtactgcctcatggaaaatcctccggagccgccctccattgtgggttcctgagagtaggacacattgccatggttttgtgggaatcacgcgcccctgatggaacttttctgctgttgtgaagtacttttatccatttgcttctctgctgaccttgccaagttgttcgaggtggaattaaacacctcccagacctcaaaaaaaaaaaaaacaaacaaacaaagaaaaaaaataaaaaaaagaacaaaaaaagaaacaacaagacaaaaaaaaaaacaaaagaaaacaagaaaaaaaaaaagaaaaaaaaaaaaaagagggggggggggggcgaatatattaatttccacgaggggggggggacactaagtatcgttagcgactagctggttgttgttatgtaaaagaaggaggggggccctcacaaataagtggaggggctgtattatattataattacaaggcagcaggggggtcgtgacgtgttgttataaaaatagagtggtgggatgcgggagtaaaaaacatagtgtctgtgggtagtaggatattttgtgaggaaaggcaaacccccaacacaacgtaggggggagggagtgagacacacaataagtggcggaacccaacaaacacacatccaacgccgaagggcgatgtatacatacgctggcacggggcggggagccaaaaaaaaaaaatcacaatccgatggactatgaaagagatgcgcagtggacaccaccaccaccacaaaatgatagttagagcggcggacggggaaacaagaaccgtgaggccacagaaagcgagcgtagacaacgcagcagaaaaatactttccaccgggcgagaggtacttcacaccacgcn

SEQ ID NO: 356736 - DNA, 4117 bp, Homo sapiens
agcggggcggaggcggtgagcgcgggcggcgcggacggcagcggttggcgggcgggtcctccgctgttgcggccgctgcggcctccttgcccgggcttggggcgccgcgctggggaaagccgggggcccggacacattggcgtgagacctgggagtacgttgtgccaaatcattgccacttgccacatgagtgtaaatgatggcggatgccaagtatgtcctctgccgatgggaaaagcgattatggcctgcgaaggttttggcccgaaccgcgacttcaacaaaaaataagagaagaaaggaatattttctagctgtgcaaatcctctccctagaggaaaagttaagtgttgtgttgttttaatactgttttttcccgtgtagatttctgatacttcaatcccctactcccccaaaacagttgaagcccagcccactcttaatgggcttattcaccatttgtgtaattcattaatgctcataataacctcatgagaaagcaactagtttgattttatgtcagtttggaagctgaagatccaaacgaggcattctgtgagatctatggagagattggtacaaacactgaatacatgtaaattatactcagggtagaccctatttgtggttaaaatagggatatttccttttttttttttttttttgactgtttcttaatcagtgccatgccaggaaaatagggatgtttccttcccagagatctgtgtgtcttttttcagaaacgtctgtgacaggcccatcaattttgaaatatttggtttttgagcctgtcactctaaaccagcgtttaacgttcaaaaggcaaataactgatgaccaggcggcacattgttctgctccgtgagtgtctggcactgggaaaggtgtagattgtctagaatgacagcaattccgacgccccagtcagtcctgcgtgattgtggcgagggcgcgtctggcaccgggaaggtgtagatcatctagaatgacggcgattccgacgccccggtcagtcctgcgtgattggcgagggtgcatctgtcgtgagaattcccagttctgaagagagcaaggagactgatcccgcgtagtccaaggcattggctcccctgttgctcttccttgtggagctccccctgccccactccctcctgcctgcatcttcagagctgcctctgaagctcgcttggtccctagctcacactttccctgcggctgggaaggtaattgaatactcgagtttaaaaggaaagcacatccttttaaaccaaaacacacctgctgggctgtaaacagcttttagtgacattaccatctactctgaaaatctaacaaaggagtgatttgtgcagttgaaagtaggatttgcttcataaaagtcacaatttgaattcatttttgcttttaaatccagccaaccttttctgtcttaaaaggaaaaaaaaaaaaaaaccattcaccagggttcttgctgcctgtaacctcaggcagatgaattcctagttggctgtgacttttggtttaagtggaaggttgaggaggaaaatgaaaataattcttttgttatctaaaggaaaacatgtttgaaaatgtcttggcggcgttggctggtggtgtgtaacgtcgattttgtctctgcagaattaaggtgaaaagcactgaagttgagatcctagagaagtctcaaattgaagccattgcttcctcgttagggaacgcgaatcccctgagctgaaggagaaggaaaaatggatccgctttcttaaacctttccagaatttgcccctagaaccactcctattcttgacgcccagaatggtccctcacagaatgaggttcctgcggcacccctggaagaactggcctacagacggtcgcttcgcgtggctctggacgttctgagcgagggctcgatttggagtcaagaaagctctgcagggacaggtagagctgaccggtctctgcgagggaagcccatggagcatgtctcctcgccctgtgattcgaactcctcatctcttccccgcggagacgtgttgggcagttccagacctcacaggaggaggccatgtgtgcaacaaagcctgtcaagttcgttcacttgtgaaaaggaccccgagtgcaaagtggaccacaagaaggggctcaggaaaagtgaaaacccaagaggcccgttggtcctcccagctggaggtggtgcccaagatgagagtgggtccagaatccaccacaaaaattggactcttgcaagtaagaggggaagaaactcagcgcagaaggctagcttgtgcctgaatggatcttccctttcagaggacgacacggagagagacatggggagcaaaggaggcagctgggcagccccgtccttgccctccggggtcagggaggacgatccctgtgccaacgctgagggacacgaccccggtctgccgttgggcagcctcactgcgcccccagcccctgagccctcggcctgctcagagcctggagaatgccctgcgaaaaagaggccgcgcctggatggcagccaaaggccgcctgccgtgcagctggagcccatggcagcaggggccgcaccatcccccgggccggggccagggcccagagagtctgtgaccccgcgcagcaccgccaggctgggcccgcctccctcccacgcctctgcggatgcaaccagatgtcttccttgcccggattcccagaagctggagaaagagtgccagtcttccgaagagtccatggggtctaattccatgcgttctatcctggaggaagacgaggaagacgaggagccaccaagagtccttttataccacgaaccacgttcgtttgaagtaggaatgctagtctggcataaacataaaaaataccccttctggccagcagtggtcaaaagcgtcaggcagagagataagaaagcaagtgtgctatacatcgaaggacacatgaacccgaaaatgaaaggtttcacagtgtctcttaaaagtttaaagcactttgattgtaaagagaaacagacgcttctgaatcaagccagggaggacttcaaccaggacatcggctggtgtgtctccctcatcaccgactacagggtccggttaggctgcgggtcttttgctggctctttcctggaatattacgcggctgatataagctatcctgtccgaaaatccatccagcaggacgtcttggggaccaagcttcctcaactgagcaaggggagccccgaggagcccgtggtggggtgccccctggggcagaggcagccctgccggaaaatgctccccgaccgctcgcgggccgcccgggaccgggccaaccagaagctggtggagtacattgtgaaggccaagggcgcggagagccacctgcgggccatcctaaagagcaggaagccatctcgctggctgcagaccttcctgagctccagccagtacgtgacctgtgtggagacctacctggaggatgaggggcagctggacctggtggtgaagtacctgcagggcgtctaccaggaggtgggggccaaggtgctccagcgcaccaacggcgaccggatccggttcattctggacgtgcttctgcccgaggccatcatctgtgcgatctctgcggtggacgaggtggactacaagacggctgaggagaagtacatcaaggggccttcgctgagctaccgggaaaaagaaatatttgacaaccagctccttgaagagcggaaccggcgccgtcggtgagggagcagccggctgtgctgtcagcggggcctggcggtggaagcgcctccagtgtgcatgagcgtgtctgaagatggggggctcagggggcacgtttgcgtttggacctgtctgtgcgttctcctgcgtggcagtcctgatttccatacttctggagaatccatttcgttaacactgaaagccagttctcttttcctggcagtttttttcattttatttttggcattttttacaagataccgttcgggaaaggcttttgaaaggacggaagcgtattcactgtgcgccagtactcctggctgtgctgtggtttctcccgacgtgcacatcgatctcgtatgtgtggcatctgatattaaacgggaggttttaagaag

SEQ ID NO: 356737 - DNA, 4021 bp, Homo sapiens
  misc_feature (28)..(28): n is a, c, g, or t
  misc_feature (382)..(382): n is a, c, g, or t
ctggatctattgaaacatgtttaaaacngggttggggcagggacgctgctcagcaccctgcagcgcctaggacagccccacctcagagaacagtctggccccgacgtccacagggccgagtgggagagactctgctctgaaccgaatggactctgttaaaaatgtgtttaccataatcacaaaagtaaaaaatagggatgatttcttaatgtcaggtatgtattgtgtattcaggatactcttttttttttataacaataaacttaaggccgggtgtggtggctcgcatcggtaattccagcactttgggaggccgaggcaggtggatcatgaggccaggagcttgagaccagcctggccaacatggtgaaaccccgtttcnactaaaaatacaaaaattagctgggcgtggtggcgcgtacctataatcccagctactcgggaggctgaggcaggagaatcacctgaacccgggaggcagaggttgcagtgagctgagattatgccattgcgctccagcctgggcgacagggcgagactctgtaccagaaaaaaccgccaccaaaaaaaaaacttaaaatttttgagaaatgctcttgtgggtttgggtcttgccttttcttctctgcttttagtgatctgagctattgtgtctagtccgaaagatagtactgatttaattaagaaacatcattacaagcagggattcatggactaggtttgcaccttctgaaccatgagctagaccatgtctggaggctggaacctggtgacccaggctccctgcggccttcttaaccgcaggccacttggggccagttgggcagtgcctgctgctattgagccccgtgccctctcacaggccatcatctgtgcgatctctgcggtggacgaggtggactacaagacggctgaggagaagtacatcaaggggccttcgctgagctaccggtaggccgctcccggcgctatctccagccacttgcgtctctgccttgcagtttctatttccacacccacaggcagtttgactccaggctgccgcagcccctctccctcatgaggtggcccaggtgctgggtggtgagctgatcacatacgctgaactcaccctgtgggtcactcctgccccccaggaaggctgtgcccgggtctcccagctggtcgctgtgggcagcacggggccacgggcacgtgcctgggccgtgtctgttcttaatctctttttgcaggggctgatgtttgctttttgcactttcctcccctctttccacagccccatggctgtgtgagaaatacagcaagattaagcagcagcacggcccggtgctttccagcagccagaagaatgctgtgatcaagatgtttctctcacatccgtgtgcttagctgcccttggatgtttggcccccagagcgcctaatcctgtctctgggcatgcggccaggccttgctgggagccaggcggggcccacggggcagtgacaggctgaagactcaactagagtcaaggacagggtctccggccagggtggcttgcgcagccaccgacgtctcccgggcccacagtcacaggagactcctggtgaagacactgaactccctcaccagccccatgtcctccctgggcagggcaggaggggcccctggagaggccagggaggaggtgtggggcctcggtggcattggcaggccacccccgcagagctgcacaaaggtggaatttggccttgtttagggagtgttggcccagctggcttaccaaaacaggaaaggcctttggatacagaaactgggtgttttcctgctggatcttcatggttcccccgtcatgcttgccgtaagaataagtgaggtccggggagggggtaaggtcggagccaggacacctggacccagcctgctggtttgtcctctccctccgtctcagaagcctcttcaccgctccacgcccatctgtggaaatctttcatcctgatttttttttttgagtctgggttgccgacatcaaaacccgttaggagttcatcacagcttccagttgccatgaaagcctcccgtgacctgtgagaatggtgctggtgctgatggagaagttacttgggctgagcacacaggccgtgatttcatcacgccggggacatgctcaaaataacaagccaggaagggagcagccggctgtgctgtcagcggggcctggcggtggaagcgcctccagtgtgcatgagcgtgtctgaagatggggggctcagggggcacgtttgcgtttggacctgtctgtgcgttctcctgcgtggcagtcctgatttccatacttctggagaatccatttcgttaacactgaaagccagttctcttttcctggcagtttttttcattttatttttggcattttttacaagataccgttcgggaaaggcttttgaaaggacggaagcgtattcactgtgcgccagtactcctggctgtgctgtggtttctcccgacgtgcacatcgatctcgtatgtgtggcatctgatattaaacgggaggttttaagaagcgtctgccgtgatcatggagcttcggaagcgggaatggttcttccgggtttgctgttttgtctgtttcccccttgtgtggtttccgcctgcgacagttccagaatttgctctcccactcagtgtgctctgcagctgtgaggaaacagccttcgttagaggcgggagcagagacgagccgctgctctgtgtcgtgtttgctgtggccgcagggagaggagcgggacacgcacctttccaggggcctctgtgtcccgcactgtgtgtgagtggaccgcagcgcgcagccacatgccctggctgccatgggccagaccgcctccacctcccccgcccgcctggcctgtcctgagtgcatttccctgcactgtgtcgtcactgcacagccagtcaccgcggtctcagtcatcggcgcggatggctatgctggggtcccagggtggccgcagcagtcagggtcactgtgggagccctggggtggagtgacaaaccgcattgtcctgtgcccgccatggcagaagcgcagcctttgtatggaggcccaaccgcgctcccgtctggagaagcggcttccggggtgtggctgccgggtcggctctggtccacagcacggtgccggggctgcaggttgttgagggctgtgactccgtggggctcagccaggctccagcagggtcagacgtgctgttaagagcaaagccacagacgatgacttgtccattctcagtggatgctccaggctgtgcctacacagcagtgctggtgacatgtccagggttccagggcccggtggcctgggagctgctttctccccactggctgggctgcatctggccctggctggaggccttgctttgaggggctgtgaccctcttcccccaggccctccccagccgacgacagccaccggagaggagatcggaacacgattgtctcagatgcagggcgctgtgcgggacgaagccgcaaggactctcgtatcgggcccttgggactcgggaggtgccagaggcggcggctgctctggacctcggtgttcactgacctttgtttcacttgcctctgctcgactccgagagcaggaaacccggccgtggcctggcagctccgcctcccatgcccgcacgctggggtctgtcttgtctggagcagtggggcacaccccggaggaggcgggggtcagggctgtcggccttggccccctgctggtcgctgtttcggggactcggggcggccagtaccaccgcctgaggcggggctcagcagcgttgcatgtacgggcctcgtactgcctcatggaaaatcctccggagccgccctccattgtgggttcctgagagtaggacacattgccatggttttgtgggaatcacgcgcccctgatggaacttttctgctgttgtgaagtacttttatccatttgcttctctgctgaccttgccaagttgttcgaggtggaattaaacacctcccagacctc

SEQ ID NO: 356738 - DNA, 5236 bp, Homo sapiens
agcggggcggaggcggtgagcgcgggcggcgcggacggcagcggttggcgggcgggtcctccgctgttgcggccgctgcggcctccttgcccgggcttggggcgccgcgctggggaaagccgggggcccggacacattggcgtgagacctgggagtacgttgtgccaaatcattgccacttgccacatgagtgtaaatgatggcggatgccaagtatgtcctctgccgatgggaaaagcgattatggcctgcgaaggttttggcccgaaccgcgacttcaacaaaaaataagagaagaaaggaatattttctagctgtgcaaatcctctccctagaggaaaagttaagtgttgtgttgttttaatactgttttttcccgtgtagatttctgatacttcaatcccctactcccccaaaacagttgaagcccagcccactcttaatgggcttattcaccatttgtgtaattcattaatgctcataataacctcatgagaaagcaactagtttgattttatgtcagtttggaagctgaagatccaaacgaggcattctgtgagatctatggagagattggtacaaacactgaatacatgtaaattatactcagggtagaccctatttgtggttaaaatagggatatttccttttttttttttttttttgactgtttcttaatcagtgccatgccaggaaaatagggatgtttccttcccagagatctgtgtgtcttttttcagaaacgtctgtgacaggcccatcaattttgaaatatttggtttttgagcctgtcactctaaaccagcgtttaacgttcaaaaggcaaataactgatgaccaggcggcacattgttctgctccgtgagtgtctggcactgggaaaggtgtagattgtctagaatgacagcaattccgacgccccagtcagtcctgcgtgattgtggcgagggcgcgtctggcaccgggaaggtgtagatcatctagaatgacggcgattccgacgccccggtcagtcctgcgtgattggcgagggtgcatctgtcgtgagaattcccagttctgaagagagcaaggagactgatcccgcgtagtccaaggcattggctcccctgttgctcttccttgtggagctccccctgccccactccctcctgcctgcatcttcagagctgcctctgaagctcgcttggtccctagctcacactttccctgcggctgggaaggtaattgaatactcgagtttaaaaggaaagcacatccttttaaaccaaaacacacctgctgggctgtaaacagcttttagtgacattaccatctactctgaaaatctaacaaaggagtgatttgtgcagttgaaagtaggatttgcttcataaaagtcacaatttgaattcatttttgcttttaaatccagccaaccttttctgtcttaaaaggaaaaaaaaaaaaaaaccattcaccagggttcttgctgcctgtaacctcaggcagatgaattcctagttggctgtgacttttggtttaagtggaaggttgaggaggaaaatgaaaataattcttttgttatctaaaggaaaacatgtttgaaaatgtcttggcggcgttggctggtggtgtgtaacgtcgattttgtctctgcagaattaaggtgaaaagcactgaagttgagatcctagagaagtctcaaattgaagccattgcttcctcgttagggaacgcgaatcccctgagctgaaggagaaggaaaaatggatccgctttcttaaacctttccagaatttgcccctagaaccactcctattcttgacgcccagaatggtccctcacagaatgaggttcctgcggcacccctggaagaactggcctacagacggtcgcttcgcgtggctctggacgttctgagcgagggctcgatttggagtcaagaaagctctgcagggacaggtagagctgaccggtctctgcgagggaagcccatggagcatgtctcctcgccctgtgattcgaactcctcatctcttccccgcggagacgtgttgggcagttccagacctcacaggaggaggccatgtgtgcaacaaagcctgtcaagttcgttcacttgtgaaaaggaccccgagtgcaaagtggaccacaagaaggggctcaggaaaagtgaaaacccaagaggcccgttggtcctcccagctggaggtggtgcccaagatgagagtgggtccagaatccaccacaaaaattggactcttgcaagtaagaggggaagaaactcagcgcagaaggctagcttgtgcctgaatggatcttccctttcagaggacgacacggagagagacatggggagcaaaggaggcagctgggcagccccgtccttgccctccggggtcagggaggacgatccctgtgccaacgctgagggacacgaccccggtctgccgttgggcagcctcactgcgcccccagcccctgagccctcggcctgctcagagcctggagaatgccctgcgaaaaagaggccgcgcctggatggcagccaaaggccgcctgccgtgcagctggagcccatggcagcaggggccgcaccatcccccgggccggggccagggcccagagagtctgtgaccccgcgcagcaccgccaggctgggcccgcctccctcccacgcctctgcggatgcaaccagatgtcttccttgcccggattcccagaagctggagaaagagtgccagtcttccgaagagtccatggggtctaattccatgcgttctatcctggaggaagacgaggaagacgaggagccaccaagagtccttttataccacgaaccacgttcgtttgaagtaggaatgctagtctggcataaacataaaaaataccccttctggccagcagtggtcaaaagcgtcaggcagagagataagaaagcaagtgtgctatacatcgaaggacacatgaacccgaaaatgaaaggtttcacagtgtctcttaaaagtttaaagcactttgattgtaaagagaaacagacgcttctgaatcaagccagggaggacttcaaccaggacatcggctggtgtgtctccctcatcaccgactacagggtccggttaggctgcgggtcttttgctggctctttcctggaatattacgcggctgatataagctatcctgtccgaaaatccatccagcaggacgtcttggggaccaagcttcctcaactgagcaaggggagccccgaggagcccgtggtggggtgccccctggggcagaggcagccctgccggaaaatgctccccgaccgctcgcgggccgcccgggaccgggccaaccagaagctggtggagtacattgtgaaggccaagggcgcggagagccacctgcgggccatcctaaagagcaggaagccatctcgctggctgcagaccttcctgagctccagccagtacgtgacctgtgtggagacctacctggaggatgaggggcagctggacctggtggtgaagtacctgcagggcgtctaccaggaggtgggggccaaggtgctccagcgcaccaacggcgaccggatccggttcattctggacgtgcttctgcccgaggccatcatctgtgcgatctctgcggtggacgaggtggactacaagacggctgaggagaagtacatcaaggggccttcgctgagctaccgggaaaaagaaatatttgacaaccagctccttgaagagcggaaccggcgccgtcggtgagggagcagccggctgtgctgtcagcggggcctggcggtggaagcgcctccagtgtgcatgagcgtgtctgaagatggggggctcagggggcacgtttgcgtttggacctgtctgtgcgttctcctgcgtggcagtcctgatttccatacttctggagaatccatttcgttaacactgaaagccagttctcttttcctggcagtttttttcattttatttttggcattttttacaagataccgttcgggaaaggcttttgaaaggacggaagcgtattcactgtgcgccagtactcctggctgtgctgtggtttctcccgacgtgcacatcgatctcgtatgtgtggcatctgatattaaacgggaggttttaagaagcgtctgccgtgatcatggagcttcggaagcgggaatggttcttccgggtttgctgttttgtctgtttcccccttgtgtggtttccgcctgcgacagttccagaatttgctctcccactcagtgtgctctgcgcattgtcctgtgcccgccatggcagaagcgcagcctttgtatggaggcccaaccgcgctcccgtctggagaagcggcttccggggtgtggctgccgggtcggctctggtccacagcacggtgccggggctgcaggttgttgagggctgtgactccgtggggctcagccaggctccagcagggtcagacgtgctgttaagagcaaagccacagacgatgacttgtccattctcagtggatgctccaggctgtgcctacacagcagtgctggtgacatgtccagggttccagggcccggtggcctgggagctgctttctccccactggctgggctgcatctggccctggctggaggccttgctttgaggggctgtgaccctcttcccccaggccctccccagccgacgacagccaccggagaggagatcggaacacgattgtctcagatgcagggcgctgtgcgggacgaagccgcaaggactctcgtatcgggcccttgggactcgggaggtgccagaggcggcggctgctctggacctcggtgttcactgacctttgtttcacttgcctctgctcgactccgagagcaggaaacccggccgtggcctggcagctccgcctcccatgcccgcacgctggggtctgtcttgtctggagcagtggggcacaccccggaggaggcgggggtcagggctgtcggccttggccccctgctggtcgctgtttcggggactcggggcggccagtaccaccgcctgaggcggggctcagcagcgttgcatgtacgggcctcgtactgcctcatggaaaatcctccggagccgccctccattgtgggttcctgagagtaggacacattgccatggttttgtgggaatcacgcgcccctgatggaacttttctgctgttgtgaagtacttttatccatttgcttctctgctgaccttgccaagttgttcgaggtggaattaaacacctcccagacctc

SEQ ID NO: 356739 - DNA, 2650 bp, Homo sapiens
gactgtctgtgatttcgaacttcagctgcggatttggggcttggtgaggagcaaatacagatgattttgaagtttgtatctgaaatttcagagaggacattgctgggcatatgtgtacatctgtgggaaaaaaacatactcaaaactatttaactttataactatgggaattttcaaatagacccaaaaagaaaatagcataatgaactctaatgtgcccataacctgcctggaattattttttggagcataaaaaccctcaagctttttttttttttttttgagattatgccattgcgctccagcctgggcgacagggcgagactctgtaccagaaaaaaccgccaccaaaaaaaaaacttaaaatttttgagaaatgctcttgtgggtttgggtcttgccttttcttctctgcttttagtgatctgagctattgtgtctagtccgaaagatagtactgatttaattaagaaacatcattacaagcagggattcatggactaggtttgcaccttctgaaccatgagctagaccatgtctggaggctggaacctggtgacccaggctccctgcggccttcttaaccgcaggccacttggggccagttgggcagtgcctgctgctattgagccccgtgccctctcacaggccatcatctgtgcgatctctgcggtggacgaggtggactacaagacggctgaggagaagtacatcaaggggccttcgctgagctaccgggaaaaagaaatatttgacaaccagctccttgaagagcggaaccggcgccgtcggtgagggagcagccggctgtgctgtcagcggggcctggcggtggaagcgcctccagtgtgcatgagcgtgtctgaagatggggggctcagggggcacgtttgcgtttggacctgtctgtgcgttctcctgcgtggcagtcctgatttccatacttctggagaatccatttcgttaacactgaaagccagttctcttttcctggcagtttttttcattttatttttggcattttttacaagataccgttcgggaaaggcttttgaaaggacggaagcgtattcactgtgcgccagtactcctggctgtgctgtggtttctcccgacgtgcacatcgatctcgtatgtgtggcatctgatattaaacgggaggttttaagaagcgtctgccgtgatcatggagcttcggaagcgggaatggttcttccgggtttgctgttttgtctgtttcccccttgtgtggtttccgcctgcgacagttccagaatttgctctcccactcagtgtgctctgcagctgtgaggaaacagccttcgttagaggcgggagcagagacgagccgctgctctgtgtcgtgtttgctgtggccgcagggagaggagcgggacacgcacctttccaggggcctctgtgtcccgcactgtgtgtgagtggaccgcagcgcgcagccacatgccctggctgccatgggccagaccgcctccacctcccccgcccgcctggcctgtcctgagtgcatttccctgcactgtgtcgtcactgcacagccagtcaccgcggtctcagtcatcggcgcggatggctatgctggggtcccagggtggccgcagcagtcagggtcactgtgggagccctggggtggagtgacaaaccgcattgtcctgtgcccgccatggcagaagcgcagcctttgtatggaggcccaaccgcgctcccgtctggagaagcggcttccggggtgtggctgccgggtcggctctggtccacagcacggtgccggggctgcaggttgttgagggctgtgactccgtggggctcagccaggctccagcagggtcagacgtgctgttaagagcaaagccacagacgatgacttgtccattctcagtggatgctccaggctgtgcctacacagcagtgctggtgacatgtccagggttccagggcccggtggcctgggagctgctttctccccactggctgggctgcatctggccctggctggaggccttgctttgaggggctgtgaccctcttcccccaggccctccccagccgacgacagccaccggagaggagatcggaacacgattgtctcagatgcagggcgctgtgcgggacgaagccgcaaggactctcgtatcgggcccttgggactcgggaggtgccagaggcggcggctgctctggacctcggtgttcactgacctttgtttcacttgcctctgctcgactccgagagcaggaaacccggccgtggcctggcagctccgcctcccatgcccgcacgctggggtctgtcttgtctggagcagtggggcacaccccggaggaggcgggggtcagggctgtcggccttggccccctgctggtcgctgtttcggggactcggggcggccagtaccaccgcctgaggcggggctcagcagcgttgcatgtacgggcctcgtactgcctcatggaaaatcctccggagccgccctccattgtgggttcctgagagtaggacacattgccatggttttgtgggaatcacgcgcccctgatggaacttttctgctgttgtgaagtacttttatccatttgcttctctgctgaccttgccaagttgttcgaggtggaattaaacacctcccagacctc

SEQ ID NO: 356740 - DNA, 1282 bp, Homo sapiens
  misc_feature (15)..(15): n is a, c, g, or t
  misc_feature (29)..(29): n is a, c, g, or t
caaattaggctagtngaggctgggtttangcgcacctttccaggggcctctgtgtcccgcactgtgtgtgagtggaccgcagcgcgcagccacatgccctggctgccatgggccagaccgcctccacctcccccgcccgcctggcctgtcctgagtgcatttccctgcactgtgtcgtcactgcacagccagtcaccgcggtctcagtcatcggcgcggatggctatgctggggtcccagggtggccgcagcagtcagggtcactgtgggagccctggggtggagtgacaaaccgcattgtcctgtgcccgccatggcagaagcgcagcctttgtatggaggcccaaccgcgctcccgtctggagaagcggcttccggggtgtggctgccgggtcggctctggtccacagcacggtgccggggctgcaggttgttgagggctgtgactccgtggggctcagccaggctccagcagggtcagacgtgctgttaagagcaaagccacagacgatgacttgtccattctcagtggatgctccaggctgtgcctacacagcagtgctggtgacatgtccagggttccagggcccggtggcctgggagctgctttctccccactggctgggctgcatctggccctggctggaggccttgctttgaggggctgtgaccctcttcccccaggccctccccagccgacgacagccaccggagaggagatcggaacacgattgtctcagatgcagggcgctgtgcgggacgaagccgcaaggactctcgtatcgggcccttgggactcgggaggtgccagaggcggcggctgctctggacctcggtgttcactgacctttgtttcacttgcctctgctcgactccgagagcaggaaacccggccgtggcctggcagctccgcctcccatgcccgcacgctggggtctgtcttgtctggagcagtggggcacaccccggaggaggcgggggtcagggctgtcggccttggccccctgctggtcgctgtttcggggactcggggcggccagtaccaccgcctgaggcggggctcagcagcgttgcatgtacgggcctcgtactgcctcatggaaaatcctccggagccgccctccattgtgggttcctgagagtaggacacattgccatggttttgtgggaatcacgcgcccctgatggaacttttctgctgttgtgaagtacttttatccatttgcttctctgctgaccttgccaagttgttcgaggtggaattaaacacctcccagacctc

SEQ ID NO: 356741 - DNA, 1067 bp, Homo sapiens
  misc_feature (14)..(14): n is a, c, g, or t
tacgcgcggcggtngcggaggcggacacattggcgtgagacctgggagtacgttgtgccaaatcattgccacttgccacatgagtgtaaatgatggcggatgccaagtatgtcctctgccgatgggaaaagcgattatggcctgcgaaggttttggcccgaaccgcgacttcaacaaaaaataagagaagaaaggaatattttctagctgtgcaaatcctctccctagaggaaaaaattaaggtgaaaagcactgaagttgagatcctagagaagtctcaaattgaagccattgcttcctcgttagggaacgcgaatcccctgagctgaaggagaaggaaaaatggatccgctttcttaaacctttccagaatttgcccctagaaccactcctattcttgacgcccagaatggtcagtggtgagcatcaaggtcatctcgtaccctcgtggcctccagtacacaagacgaggaaggactttgctgccataaggggggaggtcctcctttttcctttcctcttcctatagtaagatttgctgtggtactgtcgctgcctggccagtctggtctcagcccaaggtttgagaagcagttggttgtgtgtttaaaattccagagcagagcccaagggagagaacgggtggcctggcactggggttggtggcacccattgtttgaggcactgtcatggggggcacgaggcaggtcggaagtggagctctcggcttcccatccatccgggtgcgctttctcccaggccttcagtttagcacccacctcctttgcacactgtgggtgagaaaagctttgcctgagtccagccggggactggtcatgcacatacatgacaagtgaggagcactggtgactgcctgccccctagccacagttgtgcaaacccaaacctgccagccttccttctcaaagtggaactgtttatcccatttgcaaataattgtttctcttgtgaaaagatggaccggaattccttccaatgatgtttataaaatcaggtctattttcctgtgtcttccgaaaaacagctcttgtttaaagcaggatcca

SEQ ID NO: 356742 - DNA, 2471 bp, Homo sapiens
gccgcggcaaccagcacaccccggcacctcctctgcggcagctgcgcctcgcaagcgcagtgccgcagcgcacgccggagtggctgtagctgcccggcgcggcgccgccctgcgcgggctgtgggctgcgggctgcgcccccgctgctggccagctctgcacggctgcgggctctgcggcgcccggtgctctgcaacgctgcggcgggcggcatgggataacgcggccatggtgcgccgagatcgcctccgcaggatgagggagtggtgggtccaggtggggctgctggccgtgcccctgcttgctgcgtacctgcacatcccaccccctcagctctcccctgcccttcactcatggaagtcttcaggcaagtttttcacttacaagggactgcgtatcttctaccaagactctgtgggtgtggttggaagtccagagatagttgtgcttttacacggttttccaacatccagctacgactggtacaagatttgggaaggtctgaccttgaggtttcatcgggtgattgcccttgatttcttaggctttggcttcagtgacaaaccgagaccacatcactattccatatttgagcaggccagcatcgtggaagcgcttttgcggcatctggggctccagaaccgcaggatcaaccttctttctcatgactatggagatattgttgctcaggagcttctctacaggtacaagcagaatcgatctggtcggcttaccataaagagtctctgtctgtcaaatggaggtatctttcctgagactcaccgtccactccttctccaaaagctactcaaagatggaggtgtgctgtcacccatcctcacacgactgatgaacttctttgtattctctcgaggtctcaccccagtctttgggccgtatactcggccctctgagagtgagctgtgggacatgtgggcagggatccgcaacaatgacgggaacttagtcattgacagtctcttacagtacatcaatcagaggaagaagttcagaaggcgctgggtgggagctcttgcctctgtaactatccccattcattttatctatgggccattggatcctgtaaatccctatccagagtttttggagctgtacaggaaaacgctgccgcggtccacagtgtcgattctggatgaccacattagccactatccacagctagaggatcccatgggcttcttgaatgcatatatgggcttcatcaactccttctgagctggaaagagtagcttccctgtattacctcccctactcccttatctgttgtgtattccacttaggaagaaatgcccaaaagaggtcctggccatcaaacataattctctcacaaagtccactttactcaaattggtgaacagtgtataggaagaagccagcaggagctctgactaaggttgacataatagtccacctcccattactttgatatctgatcaaatgtatagacttggctttgttttttgtgctattaggaaattctgatgagcattactattcactgatgcagaaagacgttcttttgcataaaagactttttttaacactttggacttctctgaaatatttagaagtgctaatttctggcccacccccaacaggaattctatagtaaggaggaggagaaggggggctccttccctctcctcgaatgacgttatgggcacatgccttttaaaagttctttaagcaacacagagctgagtcctctttgtcatacctttggatttagtgtttcatcagctgtttttagttataaacattttgttaaaatagatattggtttaaatgatacagtattttaggtatgatttaagactatgatttacctatacattatatatattttataaagatactaaaccagcatacccttactctgccagagtagtgaagctaattaaacacgtttggtttctgaataaattgaactaaatccaaactatttcctaaaatcacaggacattaaggaccaatagcatctgtgccagagatgtactgttattagctgggaagaccaattctaacagcaaataacagtctgagactcctcatacctcagtggttagaagcatgtctctcttgagctacagtagaggggaagggattgttgtgtagtcaagtcaccatgctgaatgtacactgattcctttatgatgactgcttaactccccactgcctgtcccagagaggctttccaatgtagctcagtaattcctgttactttacagacaggaaagttccagaaactttaagaacaaactctgaaagacctatgagcaaatggtgctgaatactttttttttaaagccacatttcattgtcttagtcaaagcaggattattaagtgattatttaaaattcgtttttttaaattagcaacttcaagtataacaactttgaaactggaataagtgtttattttctattaataaaaatgaattgtgacaaaa

SEQ ID NO: 356743 - DNA, 1558 bp, Homo sapiens
gtttgctcagctacatgtgtgtttcctcgtctcccttctaggtacaagcagaatcgatctggtcggcttaccataaagagtctctgtctgtcaaatggaggtatctttcctgagactcaccgtccactccttctccaaaagctactcaaagatggaggtgtgctgtcacccatcctcacacgactgatgaacttctttgggtaagtgtcactgtcaaagattgtggcctagagcaatgtcgtgaaaagttgctgccattacaattctgggccaaatcctaaggcttgatattttaaagcaaaggtgttggccgcttgccagggaagtagaaggaattcataaatcacttatgggtcagactgcatggcccagactgcatggcctctgaggttccagccatattgaacattctgagttctcctcacacttatcttcctgcgttttggactattctctcgaggtctcaccccagtctttgggccgtatactcggccctctgagagtgagctgtgggacatgtgggcagggatccgcaacaatgacgggaacttagtcattgacaggtaagaagttaccctttgctttggtttccagagacgtgtttctgtggagaagtggggattgcttgttctgttccttggctggcttattccctatcacaggaaggctgatgatgacctatggggcaaaccaaaaagtcatggtctatatgaagaaagaaatagaaaataagagtgaaactggactctttgttagtattaaatgcttcaaagtattgaatcatggttgtgaaagtagcctagtgcctccctcaaggtacaaggctcttccttttgcctatctttctgcagcaacggggagtgagagggcagacttctctttctctgtcttgtacaaagaattcccatgccttggttcaaatgagaatgtagacactttcacaagggacccagaggtggtgatagctgtaactacttgggataagactctgacttctagccacctggctcagtgtagcttccagtgtttttactgatggctttgctggggattgtatgttagagggagccaatcctcccaccctctcctaagccccaacaggatccctgaatatttcattttagtattaaaaaactgaagaacaattaagactgtcttttaaaattatattttcctttccaaaaagtaaatactatttgtaagatgagatatttgaggttcacaaaaataactgtcctggagttgccaggcagaatgagtagaatacatgagtttgagttctaaaatgtggcagtggtgtcttacgctggagaaagaggaatcctctccattttatctgtggtcagatgaagctttgtgctcatcaacatctacacttagaattttgaagtagatgtcggctgggcacagtggctcacgcctgtaatttgagcactttgggaggccaaggtgggcgaatcatatgaggtcaggagtttagagaccagcctggccaacatgatgaaaccccgtgtctactaaaaatacaaaaattagccagtaattccagctactcagg

SEQ ID NO: 356744 - DNA, 1270 bp, Homo sapiens
atttactgaagggaataaacaactccttggcactctggaagggatcactgccaagttaccctccctcaacagggattaattaccaggaataaagcattttccaagaggatcatctgtgggacctgtggtagtttcatggcgttttctctttatggaagtctgttaagccaagatagggctgaagctcctgtgcaactgtaggtctggtgaaagggaggggcaggagcagaaagcccaaatcatcgtttctttcttgtagatttgggaaggtctgaccttgaggtttcatcgggtgattgcccttgatttcttaggctttggcttcagtgacaaaccgagaccacatcactattccatatttgagcaggccagcatcgtggaagcgcttttgcggcatctggggctccagaaccgcaggatcaaccttctttctcatgactatggagatattgttgctcaggagcttctctacaggtacaagcagaatcgatctggtcggcttaccataaagagtctctgtctgtcaaatggaggtaattgccttggcggtaggtagaaagtgggtgtaatctagaagggccatctttagatacagcggcacctaaatggtaatctgataatatttcaagtagacataattaaactatgggatctctacctcttctgtgccatcaactcctttggtggtctgacaagatttatggaccctttctcagaatgttttaaaataaagaaacaaacagcattacaaaggatagtgactttacttacatagtcaataaaaagctgcattatagtcacatgtgctttttcaatgcattagatagcaagttctagtggaggacctagtaacagctatatcagaaggagtgaggagtgtaaagactgtttgccatatctgaaacaactgcaataggttatgagagtgtaggattgaagatacagaaaaaagccacaagtgtttctaatactactatgatgttagtgtagaaaatccttacttaatgtcatcaatgggttcttggaaactgtgactttaaatgaaacgttataatggaaccaattttttttctcatcaatgttttaaagaaaggatgttattcaaggacctgctgtacctcattctgcttaaagccgaagtttccaagaacctatcctgatgttaagtgaggacttaactgtatgagattccccaactcctaactgatggcagtgccaagtttcagttagaaaataccgaacccctgattagactttctgggtagccagc

SEQ ID NO: 356745 - DNA, 569 bp, Homo sapiens
ggggataggggcggggacagcgcaaggtggatcagaaagctggggactcacgaagtggcccaaagatcaaagctattcctcagctccagggctacctgcgatctgtgtttgctctgacgaatggaatttatcctcacaaattggtgttctaaatgtcttaagaacctaattaaatagctgactaccaaaaaaaaaataaaaaaaaaaaaaacctcgtgccgaattcggcacgagcggcacgagaagcatgtctctcttgagctacagtagaggggaagggattgttgtgtagtcaagtcaccatgctgaatgtacactgattcctttatgatgactgcttaactccccactgcctgtcccagagaggctttccaatgtagctcagtaattcctgttactttacagacaggaaagttccagataaagccacatttcattgtcttagtcaaagcaggattattaagtgattatttaaaattcgtttttttaaattagcaacttcaagtataacaactttgaaactggaataagtgtttattttctattaataaaaatgaattgtgacaaaa

SEQ ID NO: 356746 - DNA, 2611 bp, Homo sapiens
gccgcggcaaccagcacaccccggcacctcctctgcggcagctgcgcctcgcaagcgcagtgccgcagcgcacgccggagtggctgtagctgcccggcgcggcgccgccctgcgcgggctgtgggctgcgggctgcgcccccgctgctggccagctctgcacggctgcgggctctgcggcgcccggtgctctgcaacgctgcggcgggcggcatgggataacgcggccatggtgcgccgagatcgcctccgcaggatgagggagtggtgggtccaggtggggctgctggccgtgcccctgcttgctgcgtacctgcacatcccaccccctcagctctcccctgcccttcactcatggaagtcttcaggcaagtttttcacttacaagggactgcgtatcttctaccaagactctgtgggtgtggttggaagtccagagatagttgtgcttttacacggttttccaacatccagctacgactggtacaagatttgggaaggtctgaccttgaggtttcatcgggtgattgcccttgatttcttaggctttggcttcagtgacaaaccgagaccacatcactattccatatttgagcaggccagcatcgtggaagcgcttttgcggcatctggggctccagaaccgcaggatcaaccttctttctcatgactatggagatattgttgctcaggagcttctctacaggtacaagcagaatcgatctggtcggcttaccataaagagtctctgtctgtcaaatggaggtatctttcctgagactcaccgtccactccttctccaaaagctactcaaagatggaggtgtgctgtcacccatcctcacacgactgatgaacttctttgtattctctcgaggtctcaccccagtctttgggccgtatactcggccctctgagagtgagctgtgggacatgtgggcagggatccgcaacaatgacgggaacttagtcattgacagtctcttacagtacatcaatcagaggaagaagttcagaaggcgctgggtgggagctcttgcctctgtaactatccccattcattttatctatgggccattggatcctgtaaatccctatccagagtttttggagctgtacaggaaaacgctgccgcggtccacagtgtcgattctggatgaccacattagccactatccacagctagaggatcccatgggcttcttgaatgcatatatgggcttcatcaactccttctgagctggaaagagtagcttccctgtattacctcccctactcccttatctgttgtgtattccacttaggaagaaatgcccaaaagaggtcctggccatcaaacataattctctcacaaagtccactttactcaaattggtgaacagtgtataggaagaagccagcaggagctctgactaaggttgacataatagtccacctcccattactttgatatctgatcaaatgtatagacttggctttgttttttgtgctattaggaaattctgatgagcattactattcactgatgcagaaagacgttcttttgcataaaagactttttttaacactttggacttctctgaaatatttagaagtgctaatttctggcccacccccaacaggaattctatagtaaggaggaggagaaggggggctccttccctctcctcgaatgacgttatgggcacatgccttttaaaagttctttaagcaacacagagctgagtcctctttgtcatacctttggatttagtgtttcatcagctgtttttagttataaacattttgttaaaatagatattggtttaaatgatacagtattttaggtatgatttaagactatgatttacctatacattatatatattttataaagatactaaaccagcatacccttactctgccagagtagtgaagctaattaaacacgtttggtttctgaataaattgaactaaatccaaactatttcctaaaatcacaggacattaaggaccaatagcatctgtgccagagatgtactgttattagctgggaagaccaattctaacagcaaataacagtctgagactcctcatacctcagtggttagaagcatgtctctcttgagctacagtagaggggaagggattgttgtgtagtcaagtcaccatgctgaatgtacactgattcctttatgatgactgcttaactccccactgcctgtcccagagaggctttccaatgtagctcagtaattcctgttactttacagacaggaaagttccagaaactttaagaacaaactctgaaagacctatgagcaaatggtgctgaatactttttttttaaagccacatttcattgtcttagtcaaagcaggattattaagtgattatttaaaattcgtttttttaaattagcaacttcaagtataacaactttgaaactggaataagtgtttattttctattaataaaaatgaattgtgacaaaaaaaaaaaaaaaaaaaaaaaaaaaaaaaaaagtaaaaaaagtaaactgaaaaggtattaaactatctaccaagaattatgtatataattattcttccattccattttacattttgggggggggccctggtccaaaattccc

SEQ ID NO: 356747 - DNA, 2385 bp, Homo sapiens
ggctgcgagggcgctgctgtggccaggcgtctggcatgctgaccacgtcgcgctgctgtaaaggaaacctgccccgcgcagcggcggtggctggagcgggagaaaccggactttgtgcaactttggccatagtggccatcccatgaatctgtttactagcttggtcaggatgagggagtggtgggtccaggtggggctgctggccgtgcccctgcttgctgcgtacctgcacatcccaccccctcagctctcccctgcccttcactcatggaagtcttcaggcaagtttttcacttacaagggactgcgtatcttctaccaagactctgtgggtgtggttggaagtccagagatagttgtgcttttacacggttttccaacatccagctacgactggtacaagatttgggaaggtctgaccttgaggtttcatcgggtgattgcccttgatttcttaggctttggcttcagtgacaaaccgagaccacatcactattccatatttgagcaggccagcatcgtggaagcgcttttgcggcatctggggctccagaaccgcaggatcaaccttctttctcatgactatggagatattgttgctcaggagcttctctacaggtacaagcagaatcgatctggtcggcttaccataaagagtctctgtctgtcaaatggaggtatctttcctgagactcaccgtccactccttctccaaaagctactcaaagatggaggtgtgctgtcacccatcctcacacgactgatgaacttctttgtattctctcgaggtctcaccccagtctttgggccgtatactcggccctctgagagtgagctgtgggacatgtgggcagggatccgcaacaatgacgggaacttagtcattgacagtctcttacagtacatcaatcagaggaagaagttcagaaggcgctgggtgggagctcttgcctctgtaactatccccattcattttatctatgggccattggatcctgtaaatccctatccagagtttttggagctgtacaggaaaacgctgccgcggtccacagtgtcgattctggatgaccacattagccactatccacagctagaggatcccatgggcttcttgaatgcatatatgggcttcatcaactccttctgagctggaaagagtagcttccctgtattacctcccctactcccttatctgttgtgtattccacttaggaagaaatgcccaaaagaggtcctggccatcaaacataattctctcacaaagtccactttactcaaattggtgaacagtgtataggaagaagccagcaggagctctgactaaggttgacataatagtccacctcccattactttgatatctgatcaaatgtatagacttggctttgttttttgtgctattaggaaattctgatgagcattactattcactgatgcagaaagacgttcttttgcataaaagactttttttaacactttggacttctctgaaatatttagaagtgctaatttctggcccacccccaacaggaattctatagtaaggaggaggagaaggggggctccttccctctcctcgaatgacgttatgggcacatgccttttaaaagttctttaagcaacacagagctgagtcctctttgtcatacctttggatttagtgtttcatcagctgtttttagttataaacattttgttaaaatagatattggtttaaatgatacagtattttaggtatgatttaagactatgatttacctatacattatatatattttataaagatactaaaccagcatacccttactctgccagagtagtgaagctaattaaacacgtttggtttctgaataaattgaactaaatccaaactatttcctaaaatcacaggacattaaggaccaatagcatctgtgccagagatgtactgttattagctgggaagaccaattctaacagcaaataacagtctgagactcctcatacctcagtggttagaagcatgtctctcttgagctacagtagaggggaagggattgttgtgtagtcaagtcaccatgctgaatgtacactgattcctttatgatgactgcttaactccccactgcctgtcccagagaggctttccaatgtagctcagtaattcctgttactttacagacaggaaagttccagaaactttaagaacaaactctgaaagacctatgagcaaatggtgctgaatactttttttttaaagccacatttcattgtcttagtcaaagcaggattattaagtgattatttaaaattcgtttttttaaattagcaacttcaagtataacaactttgaaactggaataagtgtttattttctattaataaaaatgaattgtgacaaaa

SEQ ID NO: 356748 - DNA, 2703 bp, Homo sapiens
tcaaaatgtcacttctttggccttcacttttattatgtaaaagtactcagatcaggccgaatacaattttattctctttatccaatgccggaggctattgtcgaagccacggcctgccatttcataccctttgcaataggtggcgctgacgcctggcagggagaaggcggcagcacatgctgggctcgggggcgatgggcttgtgcgcggacctggcgacgctctagccccgagccgcgtattcgtggccgggtcctccctgggaacagggtgaaggccgagaacctctggcctcaggaagcgcatgcgcaaccggttctccgaaacatggagtcctgtaggcaaggtcttacctgaatcaggtaagaggcgggcggggaaggagtggagcctccccgtgcaccctcgcagcccgctccaggagtgggactagccctccttgggggtgtggctcgtgtgcgtgggccacaccagtcctaggggcaggatgagggagtggtgggtccaggtggggctgctggccgtgcccctgcttgctgcgtacctgcacatcccaccccctcagctctcccctgcccttcactcatggaagtcttcaggcaagtttttcacttacaagggactgcgtatcttctaccaagactctgtgggtgtggttggaagtccagagatagttgtgcttttacacggttttccaacatccagctacgactggtacaagatttgggaaggtctgaccttgaggtttcatcgggtgattgcccttgatttcttaggctttggcttcagtgacaaaccgagaccacatcactattccatatttgagcaggccagcatcgtggaagcgcttttgcggcatctggggctccagaaccgcaggatcaaccttctttctcatgactatggagatattgttgctcaggagcttctctacaggtacaagcagaatcgatctggtcggcttaccataaagagtctctgtctgtcaaatggaggtatctttcctgagactcaccgtccactccttctccaaaagctactcaaagatggaggtgtgctgtcacccatcctcacacgactgatgaacttctttgtattctctcgaggtctcaccccagtctttgggccgtatactcggccctctgagagtgagctgtgggacatgtgggcagggatccgcaacaatgacgggaacttagtcattgacagtctcttacagtacatcaatcagaggaagaagttcagaaggcgctgggtgggagctcttgcctctgtaactatccccattcattttatctatgggccattggatcctgtaaatccctatccagagtttttggagctgtacaggaaaacgctgccgcggtccacagtgtcgattctggatgaccacattagccactatccacagctagaggatcccatgggcttcttgaatgcatatatgggcttcatcaactccttctgagctggaaagagtagcttccctgtattacctcccctactcccttatctgttgtgtattccacttaggaagaaatgcccaaaagaggtcctggccatcaaacataattctctcacaaagtccactttactcaaattggtgaacagtgtataggaagaagccagcaggagctctgactaaggttgacataatagtccacctcccattactttgatatctgatcaaatgtatagacttggctttgttttttgtgctattaggaaattctgatgagcattactattcactgatgcagaaagacgttcttttgcataaaagactttttttaacactttggacttctctgaaatatttagaagtgctaatttctggcccacccccaacaggaattctatagtaaggaggaggagaaggggggctccttccctctcctcgaatgacgttatgggcacatgccttttaaaagttctttaagcaacacagagctgagtcctctttgtcatacctttggatttagtgtttcatcagctgtttttagttataaacattttgttaaaatagatattggtttaaatgatacagtattttaggtatgatttaagactatgatttacctatacattatatatattttataaagatactaaaccagcatacccttactctgccagagtagtgaagctaattaaacacgtttggtttctgaataaattgaactaaatccaaactatttcctaaaatcacaggacattaaggaccaatagcatctgtgccagagatgtactgttattagctgggaagaccaattctaacagcaaataacagtctgagactcctcatacctcagtggttagaagcatgtctctcttgagctacagtagaggggaagggattgttgtgtagtcaagtcaccatgctgaatgtacactgattcctttatgatgactgcttaactccccactgcctgtcccagagaggctttccaatgtagctcagtaattcctgttactttacagacaggaaagttccagaaactttaagaacaaactctgaaagacctatgagcaaatggtgctgaatactttttttttaaagccacatttcattgtcttagtcaaagcaggattattaagtgattatttaaaattcgtttttttaaattagcaacttcaagtataacaactttgaaactggaataagtgtttattttctattaataaaaatgaattgtgacaaaa

SEQ ID NO: 356749 - DNA, 2411 bp, Homo sapiens
gccgcggcaaccagcacaccccggcacctcctctgcggcagctgcgcctcgcaagcgcagtgccgcagcgcacgccggagtggctgtagctgcccggcgcggcgccgccctgcgcgggctgtgggctgcgggctgcgcccccgctgctggccagctctgcacggctgcgggctctgcggcgcccggtgctctgcaacgctgcggcgggcggcatgggataacgcggccatggtgcgccgagatcgcctccgcaggatgagggagtggtgggtccaggtggggctgctggccgtgcccctgcttgctgcgtacctgcacatcccaccccctcagctctcccctgcccttcactcatggaagtcttcaggcaagtttttcacttacaagggactgcgtatcttctaccaagactctgtgggtgtggttggaagtccagagatagttgtgcttttacacggttttccaacatccagctacgactggtacaagatttgggaaggtctgaccttgaggtttcatcgggtgattgcccttgatttcttaggctttggcttcagtgacaaaccgagaccacatcactattccatatttgagcaggccagcatcgtggaagcgcttttgcggcatctggggctccagaaccgcaggatcaaccttctttctcatgactatggagatattgttgctcaggagcttctctacaggtacaagcagaatcgatctggtcggcttaccataaagagtctctgtctgtcaaatggaggtatctttcctgagactcaccgtccactccttctccaaaagctactcaaagatggaggtgtgctgtcacccatcctcacacgactgatgaacttctttgtgtgggacatgtgggcagggatccgcaacaatgacgggaacttagtcattgacagtctcttacagtacatcaatcagaggaagaagttcagaaggcgctgggtgggagctcttgcctctgtaactatccccattcattttatctatgggccattggatcctgtaaatccctatccagagtttttggagctgtacaggaaaacgctgccgcggtccacagtgtcgattctggatgaccacattagccactatccacagctagaggatcccatgggcttcttgaatgcatatatgggcttcatcaactccttctgagctggaaagagtagcttccctgtattacctcccctactcccttatctgttgtgtattccacttaggaagaaatgcccaaaagaggtcctggccatcaaacataattctctcacaaagtccactttactcaaattggtgaacagtgtataggaagaagccagcaggagctctgactaaggttgacataatagtccacctcccattactttgatatctgatcaaatgtatagacttggctttgttttttgtgctattaggaaattctgatgagcattactattcactgatgcagaaagacgttcttttgcataaaagactttttttaacactttggacttctctgaaatatttagaagtgctaatttctggcccacccccaacaggaattctatagtaaggaggaggagaaggggggctccttccctctcctcgaatgacgttatgggcacatgccttttaaaagttctttaagcaacacagagctgagtcctctttgtcatacctttggatttagtgtttcatcagctgtttttagttataaacattttgttaaaatagatattggtttaaatgatacagtattttaggtatgatttaagactatgatttacctatacattatatatattttataaagatactaaaccagcatacccttactctgccagagtagtgaagctaattaaacacgtttggtttctgaataaattgaactaaatccaaactatttcctaaaatcacaggacattaaggaccaatagcatctgtgccagagatgtactgttattagctgggaagaccaattctaacagcaaataacagtctgagactcctcatacctcagtggttagaagcatgtctctcttgagctacagtagaggggaagggattgttgtgtagtcaagtcaccatgctgaatgtacactgattcctttatgatgactgcttaactccccactgcctgtcccagagaggctttccaatgtagctcagtaattcctgttactttacagacaggaaagttccagaaactttaagaacaaactctgaaagacctatgagcaaatggtgctgaatactttttttttaaagccacatttcattgtcttagtcaaagcaggattattaagtgattatttaaaattcgtttttttaaattagcaacttcaagtataacaactttgaaactggaataagtgtttattttctattaataaaaatgaattgtgacaaaa

SEQ ID NO: 356750 - DNA, 2340 bp, Homo sapiens
gccgcggcaaccagcacaccccggcacctcctctgcggcagctgcgcctcgcaagcgcagtgccgcagcgcacgccggagtggctgtagctgcccggcgcggcgccgccctgcgcgggctgtgggctgcgggctgcgcccccgctgctggccagctctgcacggctgcgggctctgcggcgcccggtgctctgcaacgctgcggcgggcggcatgggataacgcggccatggtgcgccgagatcgcctccgcaggatgagggagtggtgggtccaggtggggctgctggccgtgcccctgcttgctgcgtacctgcacatcccaccccctcagctctcccctgcccttcactcatggaagtcttcaggcaagtttttcacttacaagggactgcgtatcttctaccaagactctgtgggtgtggttggaagtccagagatagttgtgcttttacacggttttccaacatccagctacgactggtacaagatttgggaaggtctgaccttgaggtttcatcgggtgattgcccttgatttcttaggctttggcttcagtgacaaaccgagaccacatcactattccatatttgagcaggccagcatcgtggaagcgcttttgcggcatctggggctccagaaccgcaggatcaaccttctttctcatgactatggagatattgttgctcaggagcttctctacaggtacaagcagaatcgatctggtcggcttaccataaagagtctctgtctgtcaaatggaggtatctttcctgagactcaccgtccactccttctccaaaagctactcaaagatggaggtgtgctgtcacccatcctcacacgactgatgaacttctttgtattctctcgaggtctcaccccagtctttgggccgtatactcggccctctgagagtgagctgtgggacatgtgggcagggatccgcaacaatgacgggaacttagtcattgacagtctcttacagtacatcaatcagaggaagaagttcagaaggcgctgggtgggagctcttgcctctgtaactatccccattcattttatctatgggccattggatcctgtaaatccctatccagagtttttggagctgtacaggaaaacgctgccgcggtccacagtgtcgattctggatgaccacattagccactatccacagctagaggatcccatgggcttcttgaatgcatatatgggcttcatcaactccttctgagctggaaagagtagcttccctgtattacctcccctactcccttatctgttgtgtattccacttaggaagaaatgcccaaaagaggtcctggccatcaaacataattctctcacaaagtccactttactcaaattggtgaacagtgtataggaagaagccagcaggagctctgactaaggttgacataatagtccacctcccattactttgatatctgatcaaatgtatagacttggctttgttttttgtgctattaggaaattctgatgagcattactattcactgatgcagaaagacgttcttttgcataaaagactttttttaacactttggacttctctgaaatatttagaagtgctaatttctggcccacccccaacaggaattctatagtaaggaggaggagaaggggggctccttccctctcctcgaatgacgttatgggcacatgccttttaaaagttctttaagcaacacagagctgagtcctctttgtcatacctttggatttagtgtttcatcagctgtttttagttataaacattttgttaaaatagatattggtttctgaataaattgaactaaatccaaactatttcctaaaatcacaggacattaaggaccaatagcatctgtgccagagatgtactgttattagctgggaagaccaattctaacagcaaataacagtctgagactcctcatacctcagtggttagaagcatgtctctcttgagctacagtagaggggaagggattgttgtgtagtcaagtcaccatgctgaatgtacactgattcctttatgatgactgcttaactccccactgcctgtcccagagaggctttccaatgtagctcagtaattcctgttactttacagacaggaaagttccagaaactttaagaacaaactctgaaagacctatgagcaaatggtgctgaatactttttttttaaagccacatttcattgtcttagtcaaagcaggattattaagtgattatttaaaattcgtttttttaaattagcaacttcaagtataacaactttgaaactggaataagtgtttattttctattaataaaaatgaattgtgacaaaa

SEQ ID NO: 356751 - DNA, 2477 bp, Homo sapiens
tcaaaatgtcacttctttggccttcacttttattatgtaaaagtactcagatcaggccgaatacaattttattctctttatccaatgccggaggctattgtcgaagccacggcctgccatttcataccctttgcaataggtggcgctgacgcctggcagggagaaggcggcagcacatgctgggctcgggggcgatgggcttgtgcgcggacctggcgacgctctagccccgagccgcgtattcgtggccgggtcctccctgggaacagggtgaaggccgagaacctctggcctcaggaagcgcatgcgcaaccggttctccgaaacatggagtcctgtaggcaaggtcttacctgaatcaggatgagggagtggtgggtccaggtggggctgctggccgtgcccctgcttgctgcgtacctgcacatcccaccccctcagctctcccctgcccttcactcatggaagtcttcaggcaagtttttcacttacaagatttgggaaggtctgaccttgaggtttcatcgggtgattgcccttgatttcttaggctttggcttcagtgacaaaccgagaccacatcactattccatatttgagcaggccagcatcgtggaagcgcttttgcggcatctggggctccagaaccgcaggatcaaccttctttctcatgactatggagatattgttgctcaggagcttctctacaggtacaagcagaatcgatctggtcggcttaccataaagagtctctgtctgtcaaatggaggtatctttcctgagactcaccgtccactccttctccaaaagctactcaaagatggaggtgtgctgtcacccatcctcacacgactgatgaacttctttgtattctctcgaggtctcaccccagtctttgggccgtatactcggccctctgagagtgagctgtgggacatgtgggcagggatccgcaacaatgacgggaacttagtcattgacagtctcttacagtacatcaatcagaggaagaagttcagaaggcgctgggtgggagctcttgcctctgtaactatccccattcattttatctatgggccattggatcctgtaaatccctatccagagtttttggagctgtacaggaaaacgctgccgcggtccacagtgtcgattctggatgaccacattagccactatccacagctagaggatcccatgggcttcttgaatgcatatatgggcttcatcaactccttctgagctggaaagagtagcttccctgtattacctcccctactcccttatctgttgtgtattccacttaggaagaaatgcccaaaagaggtcctggccatcaaacataattctctcacaaagtccactttactcaaattggtgaacagtgtataggaagaagccagcaggagctctgactaaggttgacataatagtccacctcccattactttgatatctgatcaaatgtatagacttggctttgttttttgtgctattaggaaattctgatgagcattactattcactgatgcagaaagacgttcttttgcataaaagactttttttaacactttggacttctctgaaatatttagaagtgctaatttctggcccacccccaacaggaattctatagtaaggaggaggagaaggggggctccttccctctcctcgaatgacgttatgggcacatgccttttaaaagttctttaagcaacacagagctgagtcctctttgtcatacctttggatttagtgtttcatcagctgtttttagttataaacattttgttaaaatagatattggtttaaatgatacagtattttaggtatgatttaagactatgatttacctatacattatatatattttataaagatactaaaccagcatacccttactctgccagagtagtgaagctaattaaacacgtttggtttctgaataaattgaactaaatccaaactatttcctaaaatcacaggacattaaggaccaatagcatctgtgccagagatgtactgttattagctgggaagaccaattctaacagcaaataacagtctgagactcctcatacctcagtggttagaagcatgtctctcttgagctacagtagaggggaagggattgttgtgtagtcaagtcaccatgctgaatgtacactgattcctttatgatgactgcttaactccccactgcctgtcccagagaggctttccaatgtagctcagtaattcctgttactttacagacaggaaagttccagaaactttaagaacaaactctgaaagacctatgagcaaatggtgctgaatactttttttttaaagccacatttcattgtcttagtcaaagcaggattattaagtgattatttaaaattcgtttttttaaattagcaacttcaagtataacaactttgaaactggaataagtgtttattttctattaataaaaatgaattgtgacaaaa

SEQ ID NO: 356752 - DNA, 2723 bp, Homo sapiens
  misc_feature (2472)..(2472): n is a, c, g, or t
gccgcggcaaccagcacaccccggcacctcctctgcggcagctgcgcctcgcaagcgcagtgccgcagcgcacgccggagtggctgtagctgcccggcgcggcgccgccctgcgcgggctgtgggctgcgggctgcgcccccgctgctggccagctctgcacggctgcgggctctgcggcgcccggtgctctgcaacgctgcggcgggcggcatgggataacgcggccatggtgcgccgagatcgcctccgcaggatgagggagtggtgggtccaggtggggctgctggccgtgcccctgcttgctgcgtacctgcacatcccaccccctcagctctcccctgcccttcactcatggaagtcttcaggcaagtttttcacttacaagggactgcgtatcttctaccaagactctgtgggtgtggttggaagtccagagatagttgtgcttttacacggttttccaacatccagctacgactggtacaagatttgggaaggtctgaccttgaggtttcatcgggtgattgcccttgatttcttaggctttggcttcagtgacaaaccgagaccacatcactattccatatttgagcaggccagcatcgtggaagcgcttttgcggcatctggggctccagaaccgcaggatcaaccttctttctcatgactatggagatattgttgctcaggagcttctctacaggtacaagcagaatcgatctggtcggcttaccataaagagtctctgtctgtcaaatggaggtatctttcctgagactcaccgtccactccttctccaaaagctactcaaagatggaggtgtgctgtcacccatcctcacacgactgatgaacttctttgtattctctcgaggtctcaccccagtctttgggccgtatactcggccctctgagagtgagctgtgggacatgtgggcagggatccgcaacaatgacgggaacttagtcattgacagtctcttacagtacatcaatcagaggaagaagttcagaaggcgctgggtgggagctcttgcctctgtaactatccccattcattttatctatgggccattggatcctgtaaatccctatccagagtttttggagctgtacaggaaaacgctgccgcggtccacagtgtcgattctggatgaccacattagccactatccacagctagaggatcccatgggcttcttgaatgcatatatgggcttcatcaactccttctgagctggaaagagtagcttccctgtattacctcccctactcccttatctgttgtgtattccacttaggaagaaatgcccaaaagaggtcctggccatcaaacataattctctcacaaagtccactttactcaaattggtgaacagtgtataggaagaagccagcaggagctctgactaaggttgacataatagtccacctcccattactttgatatctgatcaaatgtatagacttggctttgttttttgtgctattaggaaattctgatgagcattactattcactgatgcagaaagacgttcttttgcataaaagactttttttaacactttggacttctctgaaatatttagaagtgctaatttctggcccacccccaacaggaattctatagtaaggaggaggagaaggggggctccttccctctcctcgaatgacgttatgggcacatgccttttaaaagttctttaagcaacacagagctgagtcctctttgtcatacctttggatttagtgtttcatcagctgtttttagttataaacattttgttaaaatagatattggtttaaatgatacagtattttaggtatgatttaagactatgatttacctatacattatatatattttataaagatactaaaccagcatacccttactctgccagagtagtgaagctaattaaacacgtttggtttctgaataaattgaactaaatccaaactatttcctaaaatcacaggacattaaggaccaatagcatctgtgccagagatgtactgttattagctgggaagaccaattctaacagcaaataacagtctgagactcctcatacctcagtggttagaagcatgtctctcttgagctacagtagaggggaagggattgttgtgtagtcaagtcaccatgctgaatgtacactgattcctttatgatgactgcttaactccccactgcctgtcccagagaggctttccaatgtagctcagtaattcctgttactttacagacaggaaagttccagaaactttaagaacaaactctgaaagacctatgagcaaatggtgctgaatactttttttttaaagccacatttcattgtcttagtcaaagcaggattattaagtgattatttaaaattcgtttttttaaattagcaacttcaagtataacaactttgaaactggaataagtgtttattttctattaataaaaatgaattgtgacaaaanaaaataaaaaaaaaaaaaacaaaaaaaaaaaaaaaaaaaaaaaataaaaaaatctacaacaaacaatccataccacactcatattctgctactccacataaaaaaaaaaaaacccctgggggggggggccgggccccaaatttccccaatagggggggggtataaaaaatcacgggcccgggttttaacaagggggggggggaaaaaaccccgggggtcccccaaaaaaaaacgcttttgaaaaaaaaccc

SEQ ID NO: 356753 - DNA, 1551 bp, Homo sapiens
atccctgtaacagtaaaggtttcttgttctgcacatgctgacttacctgtcctacagtctcttacagtacatcaatcagaggaagaagttcagaaggcgctgggtgggagctcttgcctctgtaactatccccattcattttatctatgggccattggatcctgtaaatccctatccagagtttttggagctgtacaggaaaacgctgccgcggtccacagtgtcgattctggatgaccacattagccactatccacagctagaggatcccatgggcttcttgaatgcatatatgggcttcatcaactccttctgagctggaaagagtagcttccctgtattacctcccctactcccttatctgttgtgtattccacttaggaagaaatgcccaaaagaggtcctggccatcaaacataattctctcacaaagtccactttactcaaattggtgaacagtgtataggaagaagccagcaggagctctgactaaggttgacataatagtccacctcccattactttgatatctgatcaaatgtatagacttggctttgttttttgtgctattaggaaattctgatgagcattactattcactgatgcagaaagacgttcttttgcataaaagactttttttaacactttggacttctctgaaatatttagaagtgctaatttctggcccacccccaacaggaattctatagtaaggaggaggagaaggggggctccttccctctcctcgaatgacgttatgggcacatgccttttaaaagttctttaagcaacacagagctgagtcctctttgtcatacctttggatttagtgtttcatcagctgtttttagttataaacattttgttaaaatagatattggtttaaatgatacagtattttaggtatgatttaagactatgatttacctatacattatatatattttataaagatactaaaccagcatacccttactctgccagagtagtgaagctaattaaacacgtttggtttctgaataaattgaactaaatccaaactatttcctaaaatcacaggacattaaggaccaatagcatctgtgccagagatgtactgttattagctgggaagaccaattctaacagcaaataacagtctgagactcctcatacctcagtggttagaagcatgtctctcttgagctacagtagaggggaagggattgttgtgtagtcaagtcaccatgctgaatgtacactgattcctttatgatgactgcttaactccccactgcctgtcccagagaggctttccaatgtagctcagtaattcctgttactttacagacaggaaagttccagaaactttaagaacaaactctgaaagacctatgagcaaatggtgctgaatactttttttttaaagccacatttcattgtcttagtcaaagcaggattattaagtgattatttaaaattcgtttttttaaattagcaacttcaagtataacaactttgaaactggaataagtgtttattttctattaataaaaatgaattgtgacaaaa

SEQ ID NO: 356754 - DNA, 1368 bp, Homo sapiens
  misc_feature (9)..(9): n is a, c, g, or t
gggtgccgngcccagcacagccccccagcgtgtccctgttgcctccccatccggccacattagccactatccacagctagaggatcccatgggcttcttgaatgcatatatgggcttcatcaactccttctgagctggaaagagtagcttccctgtattacctcccctactcccttatctgttgtgtattccacttaggaagaaatgcccaaaagaggtcctggccatcaaacataattctctcacaaagtccactttactcaaattggtgaacagtgtataggaagaagccagcaggagctctgactaaggttgacataatagtccacctcccattactttgatatctgatcaaatgtatagacttggctttgttttttgtgctattaggaaattctgatgagcattactattcactgatgcagaaagacgttcttttgcataaaagactttttttaacactttggacttctctgaaatatttagaagtgctaatttctggcccacccccaacaggaattctatagtaaggaggaggagaaggggggctccttccctctcctcgaatgacgttatgggcacatgccttttaaaagttctttaagcaacacagagctgagtcctctttgtcatacctttggatttagtgtttcatcagctgtttttagttataaacattttgttaaaatagatattggtttaaatgatacagtattttaggtatgatttaagactatgatttacctatacattatatatattttataaagatactaaaccagcatacccttactctgccagagtagtgaagctaattaaacacgtttggtttctgaataaattgaactaaatccaaactatttcctaaaatcacaggacattaaggaccaatagcatctgtgccagagatgtactgttattagctgggaagaccaattctaacagcaaataacagtctgagactcctcatacctcagtggttagaagcatgtctctcttgagctacagtagaggggaagggattgttgtgtagtcaagtcaccatgctgaatgtacactgattcctttatgatgactgcttaactccccactgcctgtcccagagaggctttccaatgtagctcagtaattcctgttactttacagacaggaaagttccagaaactttaagaacaaactctgaaagacctatgagcaaatggtgctgaatactttttttttaaagccacatttcattgtcttagtcaaagcaggattattaagtgattatttaaaattcgtttttttaaattagcaacttcaagtataacaactttgaaactggaataagtgtttattttctattaataaaaatgaattgtgacaaaa

SEQ ID NO: 356755 - DNA, 2413 bp, Homo sapiens
gccgcggcaaccagcacaccccggcacctcctctgcggcagctgcgcctcgcaagcgcagtgccgcagcgcacgccggagtggctgtagctgcccggcgcggcgccgccctgcgcgggctgtgggctgcgggctgcgcccccgctgctggccagctctgcacggctgcgggctctgcggcgcccggtgctctgcaacgctgcggcgggcggcatgggataacgcggccatggtgcgccgagatcgcctccgcaggatgagggagtggtgggtccaggtggggctgctggccgtgcccctgcttgctgcgtacctgcacatcccaccccctcagctctcccctgcccttcactcatggaagtcttcaggcaagtttttcacttacaagggactgcgtatcttctaccaagactctgtgggtgtggttggaagtccagagatagttgtgcttttacacggttttccaacatccagctacgactggtacaagatttgggaaggtctgaccttgaggtttcatcgggtgattgcccttgatttcttaggctttggcttcagtgacaaaccgagaccacatcactattccatatttgagcaggccagcatcgtggaagcgcttttgcggcatctggggctccagaaccgcaggatcaaccttctttctcatgactatggagatattgttgctcaggagcttctctacaggtacaagcagaatcgatctggtcggcttaccataaagagtctctgtctgtcaaatggaggtatctttcctgagactcaccgtccactccttctccaaaagctactcaaagatggaggtgtgctgtcacccatcctcacacgactgatgaacttctttgtattctctcgaggtctcaccccagtctttgggccgtatactcggccctctgagagtgagctgtgggacatgtgggcagggatccgcaacaatgacgggaacttagtcattgacagtctcttacagtacatcaatcagaggaagaagttcagaaggcgctgggtgggagctcttgcctctgtaactatccccattcattttatctatgggccattggatcctgtaaatccctatccagagtttttggagctgtacaggaaaacgctgccgcggtccacagtgtcgattctggatgaccacattagccactatccacagctagaggatcccatgggcttcttgaatgcatatatgggcttcatcaactccttctgagctggaaagagtagcttccctgtattacctcccctactcccttatctgttgtgtattccacttaggaagaaatgcccaaaagaggtcctggccatcaaacataattctctcacaaagtccactttactcaaattggtgaacagtgtataggaagaagccagcaggagctctgactaaggttgacataatagtccacctcccattactttgatatctgatcaaatgtatagacttggctttgttttttgtgctattaggaaattctgatgagcattactattcactgatgcagaaagacgttcttttgcataaaagactttttttaacactttggacttctctgaaatatttagaagtgctaatttctggcccacccccaacaggaattctatagtaaggaggaggagaaggggggctccttccctctcctcgaatgacgttatgggcacatgccttttaaaagttctttaagcaacacagagctgagtcctctttgtcatacctttggatttagtgtttcatcagctgtttttagttataaacattttgttaaaatagatattggtttaaatgatacagtattttaggtatgatttaagactatgatttacctatacattatatatattttataaagatactaaaccagcatacccttactctgccagagtagtgaagctaattaaacacgtttggtttctgaataaattgaactaaatccaaactatttcctaaaatcacaggacattaaggaccaatagcatctgtgccagagatgtactgttattagctgggaagaccaattctaacagcaaataacagtctgagactcctcatacctcagtggttagaagcatgtctctcttgagctacagtagaggggaagggattgttgtgtagtcaagtcaccatgctgaatgtacactgattcctttatgatgactgcttaactccccactgcctgtcccagagaggctttccaatgtagctcagtaattcctgttactttacagacaggaaagttccagataaagccacatttcattgtcttagtcaaagcaggattattaagtgattatttaaaattcgtttttttaaattagcaacttcaagtataacaactttgaaactggaataagtgtttattttctattaataaaaatgaattgtgacaaaa

SEQ ID NO: 356756 - DNA, 2258 bp, Homo sapiens
gccgcggcaaccagcacaccccggcacctcctctgcggcagctgcgcctcgcaagcgcagtgccgcagcgcacgccggagtggctgtagctgcccggcgcggcgccgccctgcgcgggctgtgggctgcgggctgcgcccccgctgctggccagctctgcacggctgcgggctctgcggcgcccggtgctctgcaacgctgcggcgggcggcatgggataacgcggccatggtgcgccgagatcgcctccgcaggatgagggagtggtgggtccaggtggggctgctggccgtgcccctgcttgctgcgtacctgcacatcccaccccctcagctctcccctgcccttcactcatggaagtcttcaggcaagtttttcacttacaagggactgcgtatcttctaccaagactctgtgggtgtggttggaagtccagagatagttgtgcttttacacggttttccaacatccagctacgactggtacaagatttgggaaggtctgaccttgaggtttcatcgggtgattgcccttgatttcttaggctttggcttcagtgacaaaccgagaccacatcactattccatatttgagcaggccagcatcgtggaagcgcttttgcggcatctggggctccagaaccgcaggatcaaccttctttctcatgactatggagatattgttgctcaggagcttctctacaggtacaagcagaatcgatctggtcggcttaccataaagagtctctgtctgtcaaatggaggtatctttcctgagactcaccgtccactccttctccaaaagctactcaaagatggaggtgtgctgtcacccatcctcacacgactgatgaacttctttgtattctctcgaggtctcaccccagtctttgggccgtatactcggccctctgagagtgagctgtgggacatgtgggcagggatccgcaacaatgacgggaacttagtcattgacagtctcttacagtacatcaatcagaggaagaagttcagaaggcgctgggtgggagctcttgcctctgtaactatccccattcattttatctatgggccattggatcctgtaaatccctatccagagtttttggagctgtacaggaaaacgctgccgcggtccacagtgtcgattctggatgaccacattagccactatccacagctagaggatcccatgggcttcttgaatgcatatatgggcttcatcaactccttctgagctggaaagagtagcttccctgtattacctcccctactcccttatctgttgtgtattccacttaggaagaaatgcccaaaagaggtcctggccatcaaacataattctctcacaaagtccactttactcaaattggtgaacagtgtataggaagaagccagcaggagctctgactaaggttgacataatagtccacctcccattactttgatatctgatcaaatgtatagacttggctttgttttttgtgctattaggaaattctgatgagcattactattcactgatgcagaaagacgttcttttgcataaaagactttttttaacactttggacttctctgaaatatttagaagtgctaatttctggcccacccccaacaggaattctatagtaaggaggaggagaaggggggctccttccctctcctcgaatgacgttatgggcacatgccttttaaaagttctttaagcaacacagagctgagtcctctttgtcatacctttggatttagtgtttcatcagctgtttttagttataaacattttgttaaaatagatattggtttaaatgatacagtattttaggtatgatttaagactatgatttacctatacattatatatattttataaagatactaaaccagcatacccttactctgccagagtagtgaagctaattaaacacgtttggtttctgaataaattgaactaaatccaaactatttcctaaaatcacaggacattaaggaccaatagcatctgtgccagagatgtactgttattagctgggaagaccaattctaacagcaaataacagtctgagactcctcatacctcagtggttagaagcatgtctctcttgagctacagtagaggggaagggattgttgtgtagtcaagtcaccatgctgaatgtacactgattcctttatgatgactgcttaactccccactgcctgtcgggctagtcggggactgtcggactagtagtggggatacagagtcataattcgtaat

SEQ ID NO: 356757 - DNA, 1334 bp, Homo sapiens
gccgcggcaaccagcacaccccggcacctcctctgcggcagctgcgcctcgcaagcgcagtgccgcagcgcacgccggagtggctgtagctgcccggcgcggcgccgccctgcgcgggctgtgggctgcgggctgcgcccccgctgctggccagctctgcacggctgcgggctctgcggcgcccggtgctctgcaacgctgcggcgggcggcatgggataacgcggccatggtgcgccgagatcgcctccgcaggatgagggagtggtgggtccaggtggggctgctggccgtgcccctgcttgctgcgtacctgcacatcccaccccctcagctctcccctgcccttcactcatggaagtcttcaggcaagtttttcacttacaagggactgcgtatcttctaccaagactctgtgggtgtggttggaagtccagagatagttgtgcttttacacggttttccaacatccagctacgactggtacaagatttgggaaggtctgaccttgaggtttcatcgggtgattgcccttgatttcttaggctttggcttcagtgacaaaccgagaccacatcactattccatatttgagcaggccagcatcgtggaagcgcttttgcggcatctggggctccagaaccgcaggatcaaccttctttctcatgactatggagatattgttgctcaggagcttctctacaggtacaagcagaatcgatctggtcggcttaccataaagagtctctgtctgtcaaatggaggtatctttcctgagactcaccgtccactccttctccaaaagctactcaaagatggaggtgtgctgtcacccatcctcacacgactgatgaacttctttgtattctctcgaggtctcaccccagtctttgggccgtatactcggccctctgagagtgagctgtgggacatgtgggcagggatccgcaacaatgacgggaacttagtcattgacagtctcttacagtacatcaatcagaggaagaagttcagaaggcgctgggtgggagctcttgcctctgtaactatccccattcattttatctatgggccattggatcctgtaaatccctatccagagtttttggagctgtacaggaaaacgctgccgcggtccacagtgtcgattctggatgaccacattagccactatccacagctagaggatcccatgggcttcttgaatgcatatatgggcttcatcaactccttctgagctggaaagagtagcttccctgtattacctcccctactcccttatagtgttgcgggatccctgaccaccctcctctttaagatcctgtagagtcgatc

SEQ ID NO: 356758 - DNA, 1972 bp, Homo sapiens
gccgcggcaaccagcacaccccggcacctcctctgcggcagctgcgcctcgcaagcgcagtgccgcagcgcacgccggagtggctgtagctgcccggcgcggcgccgccctgcgcgggctgtgggctgcgggctgcgcccccgctgctggccagctctgcacggctgcgggctctgcggcgcccggtgctctgcaacgctgcggcgggcggcatgggataacgcggccatggtgcgccgagatcgcctccgcaggatgagggagtggtgggtccaggtggggctgctggccgtgcccctgcttgctgcgtacctgcacatcccaccccctcagctctcccctgcccttcactcatggaagtcttcaggcaagtttttcacttacaagggactgcgtatcttctaccaagactctgtgggtgtggttggaagtccagagatagttgtgcttttacacggttttccaacatccagctacgactggtacaagatttgggaaggtctgaccttgaggtttcatcgggtgattgcccttgatttcttaggctttggcttcagtgacaaaccgagaccacatcactattccatatttgagcaggccagcatcgtggaagcgcttttgcggcatctggggctccagaaccgcaggatcaaccttctttctcatgactatggagatattgttgctcaggagcttctctacaggtacaagcagaatcgatctggtcggcttaccataaagagtctctgtctgtcaaatggaggtatctttcctgagactcaccgtccactccttctccaaaagctactcaaagatggaggtgtgctgtcacccatcctcacacgactgatgaacttctttgtattctctcgaggtctcaccccagtctttgggccgtatactcggccctctgagagtgagctgtgggacatgtgggcagggatccgcaacaatgacgggaacttagtcattgacaggtaagaagttaccctttgctttggtttccagagacgtgtttctgtggagaagtggggattgcttgttctgttccttggctggcttattccctatcacaggaaggctgatgatgacctatggggcaaaccaaaaagtcatggtctatatgaagaaagaaatagaaaataagagtgaaactggactctttgttagtattaaatgcttcaaagtattgaatcatggttgtgaaagtagcctagtgcctccctcaaggtacaaggctcttccttttgcctatctttctgcagcaacggggagtgagagggcagacttctctttctctgtcttgtacaaagaattcccatgccttggttcaaatgagaatgtagacactttcacaagggacccagaggtggtgatagctgtaactacttgggataagactctgacttctagccacctggctcagtgtagcttccagtgtttttactgatggctttgctggggattgtatgttagagggagccaatcctcccaccctctcctaagccccaacaggatccctgaatatttcattttagtattaaaaaactgaagaacaattaagactgtcttttaaaattatattttcctttccaaaaagtaaatactatttgtaagatgagatatttgaggttcacaaaaataactgtcctggagttgccaggcagaatgagtagaatacatgagtttgagttctaaaatgtggcagtggtgtcttacgctggagaaagaggaatcctctccattttatctgtggtcagatgaagctttgtgctcatcaacatctacacttagaattttgaagtagatgtcggctgggcacagtggctcacgcctgtaatttgagcactttgggaggccaaggtgggcgaatcatatgaggtcaggagtttagagaccagcctggccaacatgatgaaaccccgtgtctactaaaaatacaaaaattagccagtaattccagctactcagg

SEQ ID NO: 356759 - DNA, 410 bp, Homo sapiens
tgaacatttaaaaactagtttgtataaatggaattggcaagtttatctgcctaagatacaatttcagagtagaaggtgaataagctctttggtggctccttccagtgtggtgtgtccacagggtcatttactggggcttcccactggcttacatccctcccgctccagcctcaagttcacctgcgtgctgttctcttccactaggaaaacgctgccgcggtccacagtgtcgattctggatgaccacattagccactatccacagctagaggatcccatgggcttcttgaatgcatatatgggcttcatcaactccttctgagctggaaagagtagcttccctgtattacctcccctactcccttatctgttgtgtattccacttaggaagaaatgcccaaaagaggtcc

SEQ ID NO: 356760 - DNA, 2940 bp, Homo sapiens
  misc_feature (2940)..(2940): n is a, c, g, or t
gccgcggcaaccagcacaccccggcacctcctctgcggcagctgcgcctcgcaagcgcagtgccgcagcgcacgccggagtggctgtagctgcccggcgcggcgccgccctgcgcgggctgtgggctgcgggctgcgcccccgctgctggccagctctgcacggctgcgggctctgcggcgcccggtgctctgcaacgctgcggcgggcggcatgggataacgcggccatggtgcgccgagatcgcctccgcaggatgagggagtggtgggtccaggtggggctgctggccgtgcccctgcttgctgcgtacctgcacatcccaccccctcagctctcccctgcccttcactcatggaagtcttcaggcaagtttttcacttacaagggactgcgtatcttctaccaagactctgtgggtgtggttggaagtccagagatagttgtgcttttacacggttttccaacatccagctacgactggtacaagatttgggaaggtctgaccttgaggtttcatcgggtgattgcccttgatttcttaggctttggcttcagtgacaaaccgagaccacatcactattccatatttgagcaggccagcatcgtggaagcgcttttgcggcatctggggctccagaaccgcaggatcaaccttctttctcatgactatggagatattgttgctcaggagcttctctacaggtacaagcagaatcgatctggtcggcttaccataaagagtctctgtctgtcaaatggaggtatctttcctgagactcaccgtccactccttctccaaaagctactcaaagatggaggtgtgctgtcacccatcctcacacgactgatgaacttctttgtattctctcgaggtctcaccccagtctttgggccgtatactcggccctctgagagtgagctgtgggacatgtgggcagggatccgcaacaatgacgggaacttagtcattgacagtctcttacagtacatcaatcagaggaagaagttcagaaggcgctgggtgggagctcttgcctctgtaactatccccattcattttatctatgggccattggatcctgtaaatccctatccagagtttttggagctgtacaggaaaacgctgccgcggtccacagtgtcgattctggatgaccacattagccactatccacagctagaggatcccatgggcttcttgaatgcatatatgggcttcatcaactccttctgagctggaaagagtagcttccctgtattacctcccctactcccttatctgttgtgtattccacttaggaagaaatgcccaaaagaggtcctggccatcaaacataattctctcacaaagtccactttactcaaattggtgaacagtgtataggaagaagccagcaggagctctgactaaggttgacataatagtccacctcccattactttgatatctgatcaaatgtatagacttggctttgttttttgtgctattaggaaattctgatgagcattactattcactgatgcagaaagacgttcttttgcataaaagactttttttaacactttggacttctctgaaatatttagaagtgctaatttctggcccacccccaacaggaattctatagtaaggaggaggagaaggggggctccttccctctcctcgaatgacgttatgggcacatgccttttaaaagttctttaagcaacacagagctgagtcctctttgtcatacctttggatttagtgtttcatcagctgtttttagttataaacattttgttaaaatagatattggtttaaatgatacagtattttaggtatgatttaagactatgatttacctatacattatatatattttataaagatactaaaccagcatacccttactctgccagagtagtgaagctaattaaacacgtttggtttctgaataaattgaactaaatccaaactatttcctaaaatcacaggacattaaggaccaatagcatctgtgccagagatgtactgttattagctgggaagaccaattctaacagcaaataacagtctgagactcctcatacctcagtggttagaagcatgtctctcttgagctacagtagaggggaagggattgttgtgtagtcaagtcaccatgctgaatgtacactgattcctttatgatgactgcttaactccccactgcctgtcccagagaggctttccaatgtagctcagtaattcctgttactttacagacaggaaagttccagaaactttaagaacaaactctgaaagacctatgagcaaatggtgctgaatactttttttttaaagccacatttcattgtcttagtcaaagcaggattattaagtgattatttaaaattcgtttttttaaattagcaacttcaagtataacaactttgaaactggaataagtgtttattttctattaataaaaatgaattgtgacaaaaaaaaaaaaaaaaaaaaaaaaaaaaaaaaaaaaaaaaaaaaaaaaaaaaaaaaaaaaaaaaaaaaaaagaaaaaaagaagaacaaaagcgacgcacgacagaggaacgcaaagaagaaagaagaagaaaagaggcagagcgcgagagacacgaggaccagcgggagacaggacgcgaacgcaacaagaagggaaggggcgggggggacgcagaagaacggagaagaaaaaagagggaggagaaggaaacaggcggagaagagcaaaagagaggaaaagaaaggagggagggggggcacgacgacagacagcaaaagagagaggaggaggaaaagagaacagaggcacagcaaagaagagaacagaagggaagaaagaacgatgagagacagaaggaaggaaggaagagaacagaggaagataaagatgaaaggaggagaagaaagagagcaggccggagggggggaggan

SEQ ID NO: 356761 - DNA, 2579 bp, Homo sapiens
tcaaaatgtcacttctttggccttcacttttattatgtaaaagtactcagatcaggccgaatacaattttattctctttatccaatgccggaggctattgtcgaagccacggcctgccatttcataccctttgcaataggtggcgctgacgcctggcagggagaaggcggcagcacatgctgggctcgggggcgatgggcttgtgcgcggacctggcgacgctctagccccgagccgcgtattcgtggccgggtcctccctgggaacagggtgaaggccgagaacctctggcctcaggaagcgcatgcgcaaccggttctccgaaacatggagtcctgtaggcaaggtcttacctgaatcaggatgagggagtggtgggtccaggtggggctgctggccgtgcccctgcttgctgcgtacctgcacatcccaccccctcagctctcccctgcccttcactcatggaagtcttcaggcaagtttttcacttacaagggactgcgtatcttctaccaagactctgtgggtgtggttggaagtccagagatagttgtgcttttacacggttttccaacatccagctacgactggtacaagatttgggaaggtctgaccttgaggtttcatcgggtgattgcccttgatttcttaggctttggcttcagtgacaaaccgagaccacatcactattccatatttgagcaggccagcatcgtggaagcgcttttgcggcatctggggctccagaaccgcaggatcaaccttctttctcatgactatggagatattgttgctcaggagcttctctacaggtacaagcagaatcgatctggtcggcttaccataaagagtctctgtctgtcaaatggaggtatctttcctgagactcaccgtccactccttctccaaaagctactcaaagatggaggtgtgctgtcacccatcctcacacgactgatgaacttctttgtattctctcgaggtctcaccccagtctttgggccgtatactcggccctctgagagtgagctgtgggacatgtgggcagggatccgcaacaatgacgggaacttagtcattgacagtctcttacagtacatcaatcagaggaagaagttcagaaggcgctgggtgggagctcttgcctctgtaactatccccattcattttatctatgggccattggatcctgtaaatccctatccagagtttttggagctgtacaggaaaacgctgccgcggtccacagtgtcgattctggatgaccacattagccactatccacagctagaggatcccatgggcttcttgaatgcatatatgggcttcatcaactccttctgagctggaaagagtagcttccctgtattacctcccctactcccttatctgttgtgtattccacttaggaagaaatgcccaaaagaggtcctggccatcaaacataattctctcacaaagtccactttactcaaattggtgaacagtgtataggaagaagccagcaggagctctgactaaggttgacataatagtccacctcccattactttgatatctgatcaaatgtatagacttggctttgttttttgtgctattaggaaattctgatgagcattactattcactgatgcagaaagacgttcttttgcataaaagactttttttaacactttggacttctctgaaatatttagaagtgctaatttctggcccacccccaacaggaattctatagtaaggaggaggagaaggggggctccttccctctcctcgaatgacgttatgggcacatgccttttaaaagttctttaagcaacacagagctgagtcctctttgtcatacctttggatttagtgtttcatcagctgtttttagttataaacattttgttaaaatagatattggtttaaatgatacagtattttaggtatgatttaagactatgatttacctatacattatatatattttataaagatactaaaccagcatacccttactctgccagagtagtgaagctaattaaacacgtttggtttctgaataaattgaactaaatccaaactatttcctaaaatcacaggacattaaggaccaatagcatctgtgccagagatgtactgttattagctgggaagaccaattctaacagcaaataacagtctgagactcctcatacctcagtggttagaagcatgtctctcttgagctacagtagaggggaagggattgttgtgtagtcaagtcaccatgctgaatgtacactgattcctttatgatgactgcttaactccccactgcctgtcccagagaggctttccaatgtagctcagtaattcctgttactttacagacaggaaagttccagaaactttaagaacaaactctgaaagacctatgagcaaatggtgctgaatactttttttttaaagccacatttcattgtcttagtcaaagcaggattattaagtgattatttaaaattcgtttttttaaattagcaacttcaagtataacaactttgaaactggaataagtgtttattttctattaataaaaatgaattgtgacaaaa

SEQ ID NO: 356762 - DNA, 2360 bp, Homo sapiens
gccgcggcaaccagcacaccccggcacctcctctgcggcagctgcgcctcgcaagcgcagtgccgcagcgcacgccggagtggctgtagctgcccggcgcggcgccgccctgcgcgggctgtgggctgcgggctgcgcccccgctgctggccagctctgcacggctgcgggctctgcggcgcccggtgctctgcaacgctgcggcgggcggcatgggataacgcggccatggtgcgccgagatcgcctccgcaggatgagggagtggtgggtccaggtggggctgctggccgtgcccctgcttgctgcgtacctgcacatcccaccccctcagctctcccctgcccttcactcatggaagtcttcaggcaagtttttcacttacaagggactgcgtatcttctaccaagactctgtgggtgtggttggaagtccagagatagttgtgcttttacacggttttccaacatccagctacgactggtacaagatttgggaaggtctgaccttgaggtttcatcgggtgattgcccttgatttcttaggctttggcttcagtgacaaaccgagaccacatcactattccatatttgagcaggccagcatcgtggaagcgcttttgcggcatctggggctccagaaccgcaggatcaaccttctttctcatgactatggagatattgttgctcaggagcttctctacaggtacaagcagaatcgatctggtcggcttaccataaagagtctctgtctgtcaaatggaggtatctttcctgagactcaccgtccactccttctccaaaagctactcaaagatggaggtgtgctgtcacccatcctcacacgactgatgaacttctttgacagtctcttacagtacatcaatcagaggaagaagttcagaaggcgctgggtgggagctcttgcctctgtaactatccccattcattttatctatgggccattggatcctgtaaatccctatccagagtttttggagctgtacaggaaaacgctgccgcggtccacagtgtcgattctggatgaccacattagccactatccacagctagaggatcccatgggcttcttgaatgcatatatgggcttcatcaactccttctgagctggaaagagtagcttccctgtattacctcccctactcccttatctgttgtgtattccacttaggaagaaatgcccaaaagaggtcctggccatcaaacataattctctcacaaagtccactttactcaaattggtgaacagtgtataggaagaagccagcaggagctctgactaaggttgacataatagtccacctcccattactttgatatctgatcaaatgtatagacttggctttgttttttgtgctattaggaaattctgatgagcattactattcactgatgcagaaagacgttcttttgcataaaagactttttttaacactttggacttctctgaaatatttagaagtgctaatttctggcccacccccaacaggaattctatagtaaggaggaggagaaggggggctccttccctctcctcgaatgacgttatgggcacatgccttttaaaagttctttaagcaacacagagctgagtcctctttgtcatacctttggatttagtgtttcatcagctgtttttagttataaacattttgttaaaatagatattggtttaaatgatacagtattttaggtatgatttaagactatgatttacctatacattatatatattttataaagatactaaaccagcatacccttactctgccagagtagtgaagctaattaaacacgtttggtttctgaataaattgaactaaatccaaactatttcctaaaatcacaggacattaaggaccaatagcatctgtgccagagatgtactgttattagctgggaagaccaattctaacagcaaataacagtctgagactcctcatacctcagtggttagaagcatgtctctcttgagctacagtagaggggaagggattgttgtgtagtcaagtcaccatgctgaatgtacactgattcctttatgatgactgcttaactccccactgcctgtcccagagaggctttccaatgtagctcagtaattcctgttactttacagacaggaaagttccagaaactttaagaacaaactctgaaagacctatgagcaaatggtgctgaatactttttttttaaagccacatttcattgtcttagtcaaagcaggattattaagtgattatttaaaattcgtttttttaaattagcaacttcaagtataacaactttgaaactggaataagtgtttattttctattaataaaaatgaattgtgacaaaa

SEQ ID NO: 356763 - DNA, 2441 bp, Homo sapiens
gccgcggcaaccagcacaccccggcacctcctctgcggcagctgcgcctcgcaagcgcagtgccgcagcgcacgccggagtggctgtagctgcccggcgcggcgccgccctgcgcgggctgtgggctgcgggctgcgcccccgctgctggccagctctgcacggctgcgggctctgcggcgcccggtgctctgcaacgctgcggcgggcggcatgggataacgcggccatggtgcgccgagatcgcctccgcaggatgagggagtggtgggtccaggtggggctgctggccgtgcccctgcttgctgcgtacctgcacatcccaccccctcagctctcccctgcccttcactcatggaagtcttcaggcaagtttttcacttacaagggactgcgtatcttctaccaagactctgtgggtgtggttggaagtccagagatagttgtgcttttacacggttttccaacatccagctacgactggtacaagatttgggaaggtctgaccttgaggtttcatcgggtgattgcccttgatttcttaggctttggcttcagtgacaaaccggccagcatcgtggaagcgcttttgcggcatctggggctccagaaccgcaggatcaaccttctttctcatgactatggagatattgttgctcaggagcttctctacaggtacaagcagaatcgatctggtcggcttaccataaagagtctctgtctgtcaaatggaggtatctttcctgagactcaccgtccactccttctccaaaagctactcaaagatggaggtgtgctgtcacccatcctcacacgactgatgaacttctttgtattctctcgaggtctcaccccagtctttgggccgtatactcggccctctgagagtgagctgtgggacatgtgggcagggatccgcaacaatgacgggaacttagtcattgacagtctcttacagtacatcaatcagaggaagaagttcagaaggcgctgggtgggagctcttgcctctgtaactatccccattcattttatctatgggccattggatcctgtaaatccctatccagagtttttggagctgtacaggaaaacgctgccgcggtccacagtgtcgattctggatgaccacattagccactatccacagctagaggatcccatgggcttcttgaatgcatatatgggcttcatcaactccttctgagctggaaagagtagcttccctgtattacctcccctactcccttatctgttgtgtattccacttaggaagaaatgcccaaaagaggtcctggccatcaaacataattctctcacaaagtccactttactcaaattggtgaacagtgtataggaagaagccagcaggagctctgactaaggttgacataatagtccacctcccattactttgatatctgatcaaatgtatagacttggctttgttttttgtgctattaggaaattctgatgagcattactattcactgatgcagaaagacgttcttttgcataaaagactttttttaacactttggacttctctgaaatatttagaagtgctaatttctggcccacccccaacaggaattctatagtaaggaggaggagaaggggggctccttccctctcctcgaatgacgttatgggcacatgccttttaaaagttctttaagcaacacagagctgagtcctctttgtcatacctttggatttagtgtttcatcagctgtttttagttataaacattttgttaaaatagatattggtttaaatgatacagtattttaggtatgatttaagactatgatttacctatacattatatatattttataaagatactaaaccagcatacccttactctgccagagtagtgaagctaattaaacacgtttggtttctgaataaattgaactaaatccaaactatttcctaaaatcacaggacattaaggaccaatagcatctgtgccagagatgtactgttattagctgggaagaccaattctaacagcaaataacagtctgagactcctcatacctcagtggttagaagcatgtctctcttgagctacagtagaggggaagggattgttgtgtagtcaagtcaccatgctgaatgtacactgattcctttatgatgactgcttaactccccactgcctgtcccagagaggctttccaatgtagctcagtaattcctgttactttacagacaggaaagttccagaaactttaagaacaaactctgaaagacctatgagcaaatggtgctgaatactttttttttaaagccacatttcattgtcttagtcaaagcaggattattaagtgattatttaaaattcgtttttttaaattagcaacttcaagtataacaactttgaaactggaataagtgtttattttctattaataaaaatgaattgtgacaaaa

SEQ ID NO: 356764 - DNA, 3174 bp, Homo sapiens
gccgcggcaaccagcacaccccggcacctcctctgcggcagctgcgcctcgcaagcgcagtgccgcagcgcacgccggagtggctgtagctgcccggcgcggcgccgccctgcgcgggctgtgggctgcgggctgcgcccccgctgctggccagctctgcacggctgcgggctctgcggcgcccggtgctctgcaacgctgcggcgggcggcatgggataacgcggccatggtgcgccgagatcgcctccgcaggatgagggagtggtgggtccaggtggggctgctggccgtgcccctgcttgctgcgtacctgcacatcccaccccctcagctctcccctgcccttcactcatggaagtcttcaggcaagtttttcacttacaagggactgcgtatcttctaccaagactctgtgggtgtggttggaagtccagagatagttgtgcttttacacggttttccaacatccagctacgactggtacaagatttgggaaggtctgaccttgaggtttcatcgggtgattgcccttgatttcttaggctttggcttcagtgacaaaccgagaccacatcactattccatatttgagcaggccagcatcgtggaagcgcttttgcggcatctggggctccagaaccgcaggatcaaccttctttctcatgactatggagatattgttgctcaggagcttctctacaggtacaagcagaatcgatctggtcggcttaccataaagagtctctgtctgtcaaatggaggtatctttcctgagactcaccgtccactccttctccaaaagctactcaaagatggaggtgtgctgtcacccatcctcacacgactgatgaacttctttgtattctctcgaggtctcaccccagtctttgggccgtatactcggccctctgagagtgagctgtgggacatgtgggcagggatccgcaacaatgacgggaacttagtcattgacagtctcttacagtacatcaatcagaggaagaagttcagaaggcgctgggtgggagctcttgcctctgtaactatccccattcattttatctatgggccattggatcctgtaaatccctatccagagtttttggagctgtacaggaaaacgctgccgcggtccacagtgtcgattctggatgaccacattagccactatccacagctagaggatcccatgggcttcttgaatgcatatatgggcttcatcaactccttctgagctggaaagagtagcttccctgtattacctcccctactcccttatctgttgtgtattccacttaggaagaaatgcccaaaagaggtcctggccatcaaacataattctctcacaaagtccactttactcaaattggtgaacagtgtataggaagaagccagcaggagctctgactaaggttgacataatagtccacctcccattactttgatatctgatcaaatgtatagacttggctttgttttttgtgctattaggaaattctgatgagcattactattcactgatgcagaaagacgttcttttgcataaaagactttttttaacactttggacttctctgaaatatttagaagtgctaatttctggcccacccccaacaggaattctatagtaaggaggaggagaaggggggctccttccctctcctcgaatgacgttatgggcacatgccttttaaaagttctttaagcaacacagagctgagtcctctttgtcatacctttggatttagtgtttcatcagctgtttttagttataaacattttgttaaaatagatattggtttaaatgatacagtattttaggtatgatttaagactatgatttacctatacattatatatattttataaagatactaaaccagcatacccttactctgccagagtagtgaagctaattaaacacgtttggtttctgaataaattgaactaaatccaaactatttcctaaaatcacaggacattaaggaccaatagcatctgtgccagagatgtactgttattagctgggaagaccaattctaacagcaaataacagtctgagactcctcatacctcagtggttagaagcatgtctctcttgagctacagtagaggggaagggattgttgtgtagtcaagtcaccatgctgaatgtacactgattcctttatgatgactgcttaactccccactgcctgtcccagagaggctttccaatgtagctcagtaattcctgttactttacagacaggaaagttccagaaactttaagaacaaactctgaaagacctatgagcaaatggtgctgaatactttttttttaaagccacatttcattgtcttagtcaaagcaggattattaagtgattatttaaaattcgtttttttaaattagcaacttcaagtataacaactttgaaactggaataagtgtttattttctattaataaaaatgaattgtgacaaaagtggactctggcttcccctcccccctacccctctgggataaaaattttccagcattgccaggagctttcaggtacacattaaagaataaaatgaagttaagcagctggagtataggatagtatttgattttcaagatcacccaaagctgcactatcgtcccaaagctgaccaagtagaataaaaagaaaaaaaaaaaaaacaacccatgcgcaaagatagacatttgcttgatctgctggctcagggccaaatgtttaatttgcttctccaaagtcattcatcttcaaaagtctgattctgggaaactgatgccactagcctaaaagcccactgaccatgtagtgtgcatcagtttcctcttgtccagtaagcatttatccaacagaagctaagataacatctacaggtgttctctctttacttctgacagtcacctgcatggtcactccatcggctaaggccagcctggacctcaccaataaatcatagccacctctgaatatacctgagagaaaaaagtaaggaaaaccatattaagaacccaaaacaagcactggataatgaaatttatcatgctatccctgcatctcctttctattagtttagtttagcttttccagagacttgtggaaactgaatcctaaacaaacataaattccaaatatatatatttttatattcccatgaaaccaggtacataga

SEQ ID NO: 356765 - DNA, 2468 bp, Homo sapiens
tcaaaatgtcacttctttggccttcacttttattatgtaaaagtactcagatcaggccgaatacaattttattctctttatccaatgccggaggctattgtcgaagccacggcctgccatttcataccctttgcaataggtggcgctgacgcctggcagggagaaggcggcagcacatgctgggctcgggggcgatgggcttgtgcgcggacctggcgacgctctagccccgagccgcgtattcgtggccgggtcctccctgggaacagggtgaaggccgagaacctctggcctcaggaagcgcatgcgcaaccggttctccgaaacatggagtcctgtaggcaaggtcttacctgaatcaggatgagggagtggtgggtccaggtggggctgctggccgtgcccctgcttgctgcgtacctgcacatcccaccccctcagctctcccctgcccttcactcatggaagtcttcaggcaagtttttcacttacaagggactgcgtatcttctaccaagactctgtgggtgtggttggaagtccagagatagttgtgcttttacacggttttccaacatccagctacgactggtacaagatttgggaaggtctgaccttgaggtttcatcgggtgattgcccttgatttcttaggctttggcttcagtgacaaaccgagaccacatcactattccatatttgagcaggccagcatcgtggaagcgcttttgcggcatctggggctccagaaccgcaggatcaaccttctttctcatgactatggagatattgttgctcaggagcttctctacaggtacaagcagaatcgatctggtcggcttaccataaagagtctctgtctgtcaaatggaggtatctttcctgagactcaccgtccactccttctccaaaagctactcaaagatggaggtgtgctgtcacccatcctcacacgactgatgaacttctttgacagtctcttacagtacatcaatcagaggaagaagttcagaaggcgctgggtgggagctcttgcctctgtaactatccccattcattttatctatgggccattggatcctgtaaatccctatccagagtttttggagctgtacaggaaaacgctgccgcggtccacagtgtcgattctggatgaccacattagccactatccacagctagaggatcccatgggcttcttgaatgcatatatgggcttcatcaactccttctgagctggaaagagtagcttccctgtattacctcccctactcccttatctgttgtgtattccacttaggaagaaatgcccaaaagaggtcctggccatcaaacataattctctcacaaagtccactttactcaaattggtgaacagtgtataggaagaagccagcaggagctctgactaaggttgacataatagtccacctcccattactttgatatctgatcaaatgtatagacttggctttgttttttgtgctattaggaaattctgatgagcattactattcactgatgcagaaagacgttcttttgcataaaagactttttttaacactttggacttctctgaaatatttagaagtgctaatttctggcccacccccaacaggaattctatagtaaggaggaggagaaggggggctccttccctctcctcgaatgacgttatgggcacatgccttttaaaagttctttaagcaacacagagctgagtcctctttgtcatacctttggatttagtgtttcatcagctgtttttagttataaacattttgttaaaatagatattggtttaaatgatacagtattttaggtatgatttaagactatgatttacctatacattatatatattttataaagatactaaaccagcatacccttactctgccagagtagtgaagctaattaaacacgtttggtttctgaataaattgaactaaatccaaactatttcctaaaatcacaggacattaaggaccaatagcatctgtgccagagatgtactgttattagctgggaagaccaattctaacagcaaataacagtctgagactcctcatacctcagtggttagaagcatgtctctcttgagctacagtagaggggaagggattgttgtgtagtcaagtcaccatgctgaatgtacactgattcctttatgatgactgcttaactccccactgcctgtcccagagaggctttccaatgtagctcagtaattcctgttactttacagacaggaaagttccagaaactttaagaacaaactctgaaagacctatgagcaaatggtgctgaatactttttttttaaagccacatttcattgtcttagtcaaagcaggattattaagtgattatttaaaattcgtttttttaaattagcaacttcaagtataacaactttgaaactggaataagtgtttattttctattaataaaaatgaattgtgacaaaa

SEQ ID NO: 356766 - DNA, 2330 bp, Homo sapiens
gccgcggcaaccagcacaccccggcacctcctctgcggcagctgcgcctcgcaagcgcagtgccgcagcgcacgccggagtggctgtagctgcccggcgcggcgccgccctgcgcgggctgtgggctgcgggctgcgcccccgctgctggccagctctgcacggctgcgggctctgcggcgcccggtgctctgcaacgctgcggcgggcggcatgggataacgcggccatggtgcgccgagatcgcctccgcaggatgagggagtggtgggtccaggtggggctgctggccgtgcccctgcttgctgcgtacctgcacatcccaccccctcagctctcccctgcccttcactcatggaagtcttcaggcaagtttttcacttacaagggactgcgtatcttctaccaagactctgtgggtgtggttggaagtccagagatagttgtgcttttacacggttttccaacatccagctacgactggtacaagatttgggaaggtctgaccttgaggtttcatcgggtgattgcccttgatttcttaggctttggcttcagtgacaaaccggccagcatcgtggaagcgcttttgcggcatctggggctccagaaccgcaggatcaaccttctttctcatgactatggagatattgttgctcaggagcttctctacaggtacaagcagaatcgatctggtcggcttaccataaagagtctctgtctgtcaaatggaggtatctttcctgagactcaccgtccactccttctccaaaagctactcaaagatggaggtgtgctgtcacccatcctcacacgactgatgaacttctttgacagtctcttacagtacatcaatcagaggaagaagttcagaaggcgctgggtgggagctcttgcctctgtaactatccccattcattttatctatgggccattggatcctgtaaatccctatccagagtttttggagctgtacaggaaaacgctgccgcggtccacagtgtcgattctggatgaccacattagccactatccacagctagaggatcccatgggcttcttgaatgcatatatgggcttcatcaactccttctgagctggaaagagtagcttccctgtattacctcccctactcccttatctgttgtgtattccacttaggaagaaatgcccaaaagaggtcctggccatcaaacataattctctcacaaagtccactttactcaaattggtgaacagtgtataggaagaagccagcaggagctctgactaaggttgacataatagtccacctcccattactttgatatctgatcaaatgtatagacttggctttgttttttgtgctattaggaaattctgatgagcattactattcactgatgcagaaagacgttcttttgcataaaagactttttttaacactttggacttctctgaaatatttagaagtgctaatttctggcccacccccaacaggaattctatagtaaggaggaggagaaggggggctccttccctctcctcgaatgacgttatgggcacatgccttttaaaagttctttaagcaacacagagctgagtcctctttgtcatacctttggatttagtgtttcatcagctgtttttagttataaacattttgttaaaatagatattggtttaaatgatacagtattttaggtatgatttaagactatgatttacctatacattatatatattttataaagatactaaaccagcatacccttactctgccagagtagtgaagctaattaaacacgtttggtttctgaataaattgaactaaatccaaactatttcctaaaatcacaggacattaaggaccaatagcatctgtgccagagatgtactgttattagctgggaagaccaattctaacagcaaataacagtctgagactcctcatacctcagtggttagaagcatgtctctcttgagctacagtagaggggaagggattgttgtgtagtcaagtcaccatgctgaatgtacactgattcctttatgatgactgcttaactccccactgcctgtcccagagaggctttccaatgtagctcagtaattcctgttactttacagacaggaaagttccagaaactttaagaacaaactctgaaagacctatgagcaaatggtgctgaatactttttttttaaagccacatttcattgtcttagtcaaagcaggattattaagtgattatttaaaattcgtttttttaaattagcaacttcaagtataacaactttgaaactggaataagtgtttattttctattaataaaaatgaattgtgacaaaa

SEQ ID NO: 356767 - DNA, 1500 bp, Homo sapiens
gccgcggcaaccagcacaccccggcacctcctctgcggcagctgcgcctcgcaagcgcagtgccgcagcgcacgccggagtggctgtagctgcccggcgcggcgccgccctgcgcgggctgtgggctgcgggctgcgcccccgctgctggccagctctgcacggctgcgggctctgcggcgcccggtgctctgcaacgctgcggcgggcggcatgggataacgcggccatggtgcgccgagatcgcctccgcaggatgagggagtggtgggtccaggtggggctgctggccgtgcccctgcttgctgcgtacctgcacatcccaccccctcagctctcccctgcccttcactcatggaagtcttcaggcaagtttttcacttacaagggactgcgtatcttctaccaagactctgtgggtgtggttggaagtccagagatagttgtgcttttacacggttttccaacatccagctacgactggtacaagatttgggaaggtctgaccttgaggtttcatcgggtgattgcccttgatttcttaggctttggcttcagtgacaaaccgagaccacatcactattccatatttgagcaggccagcatcgtggaagcgcttttgcggcatctggggctccagaaccgcaggatcaaccttctttctcatgactatggagatattgttgctcaggagcttctctacaggtacaagcagaatcgatctggtcggcttaccataaagagtctctgtctgtcaaatggaggtaattgccttggcggtaggtagaaagtgggtgtaatctagaagggccatctttagatacagcggcacctaaatggtaatctgataatatttcaagtagacataattaaactatgggatctctacctcttctgtgccatcaactcctttggtggtctgacaagatttatggaccctttctcagaatgttttaaaataaagaaacaaacagcattacaaaggatagtgactttacttacatagtcaataaaaagctgcattatagtcacatgtgctttttcaatgcattagatagcaagttctagtggaggacctagtaacagctatatcagaaggagtgaggagtgtaaagactgtttgccatatctgaaacaactgcaataggttatgagagtgtaggattgaagatacagaaaaaagccacaagtgtttctaatactactatgatgttagtgtagaaaatccttacttaatgtcatcaatgggttcttggaaactgtgactttaaatgaaacgttataatggaaccaattttttttctcatcaatgttttaaagaaaggatgttattcaaggacctgctgtacctcattctgcttaaagccgaagtttccaagaacctatcctgatgttaagtgaggacttaactgtatgagattccccaactcctaactgatggcagtgccaagtttcagttagaaaataccgaacccctgattagactttctgggtagccagc

SEQ ID NO: 356768 - DNA, 8349 bp, Homo sapiens
cgttcgggcagcggcctcttgttacccggggcccgcttgcctcagcttcttgctgccgccagcacgctaagctccagtcggcgccgaaggagagcttcccgaccctcgtgtccagtagccgcaatcccaggctgggagggtgaggcgccgcgctctgccgcccccccgcccctcgctccctgtgtcctggcggatttgcacgtaatctatccgaaagcccagtcccacccgccacccgactctggagctcccattcttcaggaccctgctgaagtatcgcttctcagccgccttctccaggcgcagctgcattcgcttctcggtttttgcactcgctgtgcaccgagttactttcccggcccctcgttgacaccgttcacaggtggctgttggtctttagtaagggtgctgtcttccctgtctgatccttagcaaaagtaggaaggtagagttgttggcagaaatcctgggataagagaatagtttcctggaagatctgtgcctccaaccagcagagagggattgagcttcattgaactcaacagagccaacatttcatagcaccatgttcaagaggaggttgaagtggcatggcaatggttagagaccctgctgggcgtgaacaccctctggctacctagggacctgtgggcctaccacctggtgccctcatggagacaagaagccctgggttgaacaacatgaagccccagtcactgcagctggtactggaagagcaggtgctggcactacagcagcagatggcagagaatcaggcagcctcctggcggaagctgaagaactcccaggaggcccagcagagacaagcaacccttgtgaggaagctgcaggccaaggtgctgcagtaccgaagctggtgccaagagctggagaagcggctagaagccactggaggaccaatcccccagaggtgggaaaatgtggaggagccaaacctggatgagctgctggtccgattggaggaggagcaacagaggtgtgagagtctagcagaggtgaacacccagcttcgactgcacatggaaaaagctgacgtggtgaataaagcccttagggaagatgtggaaaaactgacagtggactggagccgggcccgggatgagctaatgaggaaggagagccagtggcagatggagcaggagttcttcaagggctacctgaaaggggagcacggtcgccttctcagtctatggcgggaggttgtgacattccgacgccacttcctggaaatgaagtcagctactgacagagatctgatggagctaaaagctgagcatgtgaggctttcagggtctctgttgacctgttgtctgcgcttgactgtgggagcacagtctcgggaacccaacggatctggaagaatggatgggcgggagccggcccagctgctgctgctactagccaagacccaggagctggagaaggaagcccatgaaaggagccaggagttaatacagctgaagagtcaaggggatctggagaaggctgaacttcaggaccgggtgaccgagctctctgctctgttgacccagtctcagaagcaaaatgaagattatgaaaagatgataaaggctctgagagagacagtggagatcctggagacaaatcacacagaattaatggaacatgaagcatctcttagtaggaatgcgcaagaggagaagttgtctttacagcaggtgatcaaggatataacccaggtcatggtggaagaaggggacaatatagcccaaggctctggtcatgagaactctttggaattggactctagtatcttctcccagtttgattaccaggatgcagacaaggctcttactctggtgcgttcagtgctgactcggagacgccaggctgtgcaggacctaaggcagcagcttgcaggctgtcaagaggctgtgaacttgttgcaacagcagcatgatcagtgggaggaagagggcaaagccttgagacagcggctgcagaagctcactggggagcgggacactctggcagggcagactgtggacctccagggagaggtggactctctcagcaaggagcgagagctgctgcagaaggccagggaagagctgcggcagcagctggaggtgctagagcaggaggcatggcgcctgcgaagggtaaatgtggagcttcagctgcagggggactctgcccagggccagaaggaggaacagcaggaggagctgcacctggctgtccgggagagggagcgtcttcaggagatgctgatgggcctggaagccaaacagtcagaatcactcagtgaactgatcactcttcgggaagccctggagtcaagtcacctggaaggggagttactgaggcaagagcaaacggaagtgaccgcagcgctggctagggcagagcagtcaattgcagagctgtcgagttctgaaaacaccctgaagacagaagtagctgatcttcgggctgcagctgtcaagctcagtgccttaaatgaggctttggcgttagataaagttgggctgaaccagcagcttctccagttagaggaggagaaccagtctgtgtgcagcagaatggaggccgcagagcaggcgagaaatgctttgcaggtcgacctggcggaggcagagaagaggagggaagccctgtgggaaaagaacactcacctggaggctcagctgcagaaagctgaggaggctggggctgagctgcaggcagatctcagggacatccaagaagagaaggaagaaattcaaaagaaactaagtgagtcacgtcaccagcaggaggcagccacgactcagctggagcagctacatcaggaggcaaagcgacaggaagaagtgcttgccagggcagtccaggagaaggaggccctagtacgagagaaagcggctctagaggtgcggctgcaggccgtggagcgtgaccggcaggacctcgctgaacaactacaggggctcagctcagccaaggagctactggagagcagtctgtttgaagcccaacaacaaaattctgtgatagaggtcaccaaggggcagctggaggtccagattcaaactgtcactcaagccaaggaagtaatccaaggggaagtgaggtgcctgaagctggaactggacactgaacggagtcaggcagagcaggagcgggatgctgcagccagacagctggcccaggctgagcaagaagggaagactgccttggagcagcagaaggcagcccatgagaaagaggtgaaccagctccgggagaaatgggagaaggagcgctcctggcaccagcaggagctggcaaaggctctggagagcttagaaagggaaaaaatggagctggaaatgaggctaaaggagcagcagacagaaatggaggccatccaggcccagagggaagaagaacggacccaggcagagagtgccctatgccagatgcagctggaaacagagaaggagagagtatccctcctggagacactgctgcagacgcagaaggagctagcagatgccagccaacaactggaacgactgaggcaggacatgaaagtccagaaattaaaggagcaggagaccactgggatactacagacccagctccaggaggctcaacgggagctgaaggaggcagcccggcagcacagagatgaccttgctgccctccaagaagagagcagctccctgctgcaggataagatggacctgcagaagcaggtggaggacttgaagtctcagctggtggcccaggatgactcccagaggctggtggagcaggaggttcaggagaagctgagagagacccaggagtataaccgaattcagaaggagctggagagagagaaagccagcctgactctgtcactgatggaaaaggaacagagactccttgttttacaagaagctgactctattcgacaacaagagctgagtgccctgcgccaggacatgcaggaggcccagggagaacagaaagagctcagtgctcagatggaattactaaggcaagaggtgaaggaaaaggaggctgactttctggcccaggaagcacagctgctggaggagctggaggcgtctcatatcacggagcagcagctgcgagcctccttgtgggcccaggaagccaaggcagcccaactacagctgcgactgcgcagcacagagagccagctagaagcgctggccgcagagcagcagcccgggaaccaggcccaggcccaggcccagctggccagcctctactctgccctgcagcaggccctggggtctgtttgtgagagcaggcctgagctgagtggtgggggagactctgctccttccgtctggggccttgagccagaccagaatggagctaggagcctctttaagagagggcccctgctgactgctctctccgctgaggcagtagcatctgccctccacaagcttcatcaagacctgtggaagactcaacagacccgggatgttctgagggatcaggtccagaaactggaagagcgtctaactgatactgaggctgagaagagccaggtccacacagagttgcaggatctgcagagacagctctcccagaatcaggaagagaaatccaagtgggaaggaaagcagaactccctagaatctgagctgatggaactacatgaaactatggcatccttacagagtcgcctgcggagagcagagctacagcgaatggaagcccagggtgagcgagagttacttcaggcagccaaggagaacctgacagcccaggtggaacacctgcaagcagctgtcgtagaagccagggctcaggcaagtgctgctggcatcctggaagaagacctgagaacggctcgctcagcactgaagctgaaaaatgaggaagtagagagtgagcgtgagagagcccaggctctgcaagagcagggcgaactgaaggtggcccaagggaaggctctgcaagagaatttggccctcctgacccagaccctagctgaaagagaagaggaggtggagactctgcggggacaaatccaggaactggagaagcaacgggaaatgcagaaggctgctttggaattgctgtctctggacctgaagaagaggaaccaagaggtagatctgcagcaagaacagattcaggagctagagaagtgtaggtctgttttagagcatctgcccatggccgtccaggagcgagagcagaagctgactgtgcagagggagcagatcagagagctcgagaaggatcgggagactcagaggaacgtcttggagcatcagcttctagaacttgagaagaaagaccaaatgattgagtcccagagaggacaggttcaggacctgaaaaagcagttggttactctggaatgcctggccctggaactggaggaaaaccatcacaagatggagtgccagcaaaaactgatcaaggagctggagggccagagggaaacccagagagtggctttgacccaccttacgctggacctagaagaaaggagccaggagctgcaggcacaaagcagccagatccatgacctggagagccacagcaccgttctggcaagagagctgcaggagagggaccaggaggtgaagtctcagcgagaacagatcgaggagctgcagaggcagaaagagcatctgactcaggatctcgagaggagagaccaggagctgatgctgcagaaggagaggattcaggttctcgaggatcagaggacccggcagaccaagatcctggaggaggacctggaacagatcaagctgtccttgagagagcgaggccgggagctgaccactcagaggcagctgatgcaggaacgggcagaggaagggaagggcccaagtaaagcacagcgcgggagcctagagcacatgaagctgatcctgcgtgataaggagaaggaggtggaatgtcagcaggagcatatccatgaactccaggagctcaaagaccagctggagcagcagctccagggcctgcacaggaaggtaggtgagaccagcctcctcctgtcccagcgagagcaggaaatagtggtcctgcagcagcaactgcaggaagccagggaacaaggggagctgaaggagcagtcacttcagagtcaactggatgaggcccagagagccctagcccagagggaccaggaactggaggctctgcagcaagaacagcagcaggcccagggacaggaggagagggtgaaggaaaaggcagacgccctccagggagctctggagcaagcccatatgacactgaaggagcgtcatggagagcttcaggaccacaaggaacaggcacgaaggctggaggaagagctggcagtggagggacggcgggtccaggccctggaggaggtgctgggagacctaagggctgagtctcgggaacaggagaaagctctgttggccctccagcagcagtgtgctgagcaggcacaggagcatgaggtggagaccagggccctgcaggacagctggctgcaggcccaggcagtgctcaaggaacgggaccaggagctggaagctctgcgggcagaaagtcagtcctcccggcatcaggaggaggctgcccgggcccgggctgaggctctgcaggaggcccttggcaaggctcatgctgccctgcaggggaaagagcagcatctcctcgagcaggcagaattgagccgcagtctggaggccagcactgcaaccctgcaagcctccctggatgcctgccaggcacacagtcggcagctggaggaggctctgaggatacaagaaggtgagatccaggaccaggatctccgataccaggaggatgtgcagcagctgcagcaggcacttgcccagagggatgaagagctgagacatcagcaggaacgggagcagctgctggagaagtctctggcccagagggtccaagagaatatgatccaagagaagcagaatctggggcaagagagagaagaggaggagataaggggccttcatcagagtgtaagggagctacagctgactctagcccaaaaggaacaggagattctggagctgagggagacccagcaaaggaacaacctggaagccttaccccacagccacaaaacctccccaatggaggaacaatctctaaaacttgattctttagagcccaggctgcagcgggagctggagcggctacaggcagccctgagacagacagaagccagggagattgagtggagggagaaggcccaggacttggcactctccctagcgcagaccaaggccagtgtcagcagtctgcaggaggtagccatgttcctacaagcctctgtcctggagcgggactcagaacagcaaaggctgcaggatgaactggagctcaccagacgggctctggagaaggagcggctacacagcccaggtgcaaccagcacagcagaactggggtccagaggggagcagggtgtgcagctgggagaggtctcaggagtggaggctgagcctagtcctgatggaatggagaagcagtcatggagacaaaggcttgaacacctgcagcaagcagtggcccggctggagattgacaggagcaggctgcagcgccacaatgtccagctgcggagtaccttggagcaggtggagcgagaacggaggaagctgaagagggaggccatgcgtgcggcccaggcagggtccctagagatcagcaaggccacggcttcttcacccacacagcaggatgggagaggacagaagaactcagatgccaagtgtgtggctgaactgcagaaagaggtggtcctgctgcaagctcagctgactttggagcggaagcagaagcaggactacatcacccgctcagcacagaccagccgtgagctagcaggcctgcaccacagcctctcacactcacttcttgccgtggcccaggcccctgaggccactgtcctggaggcagagacccgcaggctggatgagtccctgactcaaagtctgacatccccagggccagtcctgctacaccccagccccagcactacccaagccgcctccaggtagcagccacagccaggagcacacagacagaagactgtgtcatgggtcatggcccctccgcacacctacaggtttgccaaaggaaaagcctggctctgttaggcacccaggagccccaggtcggcgggtgttcccaggaagaggaagtaaatctgcaaccctggggaggaccccaactcacctgggaatgaggcaaattgcatttgcttgctccctatggaatcacccagaggggtgccttgccctggctgagggacatgtactgcctctcatctagaatttattttcctagcacttcaccacctccttcatcttctccttcaacaataaaccctgagatctttgcattcat

SEQ ID NO: 356769 - DNA, 466 bp, Homo sapiens
tggtaaatccctgcatgtgtctgagtggttttttgcttccccacttcaaggctatagcatcatgtggtattcagggagtgcagacgggctgggggtgcctaagggatttgggggaggctgcagttgggagtggttggggttggggctggggctggggtgtgctgcatcgtagctctgtccacatccatgggctgttctggtgacagtgctatgctcttctctttagggtgaccgagctctctgctctgttgacccagtctcagaagcaaaatgaagattatgaaaagatgataaaggctctgagagagacagtggagatcctggtacatgatcctttgctctggaaaggagttgggcgtgggcttgtaggttccttgtgctttatggacagatagtgcaggataccagttacatattccatgatgaaatcctctaaagctaaaaaataaattttggctgaatctga

SEQ ID NO: 356770 - DNA, 199 bp, Homo sapiens
ccctggcttgagggacatgtactgcctctcatctagggcaaggcacccctctgggtgattccatagggagcaagcaaaggggtgccttgccctggctgagggacatgtactgcctctcatctagaatttattttcctagcacttcaccacctccttcatcttctccttcaacaataaaccctgagatctttgcattcat

SEQ ID NO: 356771 - DNA, 8043 bp, Homo sapiens
agcagcggctgccgcagctcaatcgcggagcaactagccgggcgtctgcgggagccgagcgtggtgaggttcacaggtggctgttggtctttagtaagggtgctgtcttccctgtctgatccttagcaaaagtaggaaggtagagttgttggcagaaatcctgggataagagaatagtttcctggaagatctgtgcctccaaccagcagagagggattgagcttcattgaactcaacagagccaacatttcatagcaccatgttcaagaggaggttgaagtggcatggcaatggttagagaccctgctgggcgtgaacaccctctggctacctagggacctgtgggcctaccacctggtgccctcatggagacaagaagccctgggttgaacaacatgaagccccagtcactgcagctggtactggaagagcaggtgctggcactacagcagcagatggcagagaatcaggcagcctcctggcggaagctgaagaactcccaggaggcccagcagagacaagcaacccttgtgaggaagctgcaggccaaggtgctgcagtaccgaagctggtgccaagagctggagaagcggctagaagccactggaggaccaatcccccagaggtgggaaaatgtggaggagccaaacctggatgagctgctggtccgattggaggaggagcaacagaggtgtgagagtctagcagaggtgaacacccagcttcgactgcacatggaaaaagctgacgtggtgaataaagcccttagggaagatgtggaaaaactgacagtggactggagccgggcccgggatgagctaatgaggaaggagagccagtggcagatggagcaggagttcttcaagggctacctgaaaggggagcacggtcgccttctcagtctatggcgggaggttgtgacattccgacgccacttcctggaaatgaagtcagctactgacagagatctgatggagctaaaagctgagcatgtgaggctttcagggtctctgttgacctgttgtctgcgcttgactgtgggagcacagtctcgggaacccaacggatctggaagaatggatgggcgggagccggcccagctgctgctgctactagccaagacccaggagctggagaaggaagcccatgaaaggagccaggagttaatacagctgaagagtcaaggggatctggagaaggctgaacttcaggaccgggtgaccgagctctctgctctgttgacccagtctcagaagcaaaatgaagattatgaaaagatgataaaggctctgagagagacagtggagatcctggagacaaatcacacagaattaatggaacatgaagcatctcttagtaggaatgcgcaagaggagaagttgtctttacagcaggtgatcaaggatataacccaggtcatggtggaagaaggggacaatatagcccaaggctctggtcatgagaactctttggaattggactctagtatcttctcccagtttgattaccaggatgcagacaaggctcttactctggtgcgttcagtgctgactcggagacgccaggctgtgcaggacctaaggcagcagcttgcaggctgtcaagaggctgtgaacttgttgcaacagcagcatgatcagtgggaggaagagggcaaagccttgagacagcggctgcagaagctcactggggagcgggacactctggcagggcagactgtggacctccagggagaggtggactctctcagcaaggagcgagagctgctgcagaaggccagggaagagctgcggcagcagctggaggtgctagagcaggaggcatggcgcctgcgaagggtaaatgtggagcttcagctgcagggggactctgcccagggccagaaggaggaacagcaggaggagctgcacctggctgtccgggagagggagcgtcttcaggagatgctgatgggcctggaagccaaacagtcagaatcactcagtgaactgatcactcttcgggaagccctggagtcaagtcacctggaaggggagttactgaggcaagagcaaacggaagtgaccgcagcgctggctagggcagagcagtcaattgcagagctgtcgagttctgaaaacaccctgaagacagaagtagctgatcttcgggctgcagctgtcaagctcagtgccttaaatgaggctttggcgttagataaagttgggctgaaccagcagcttctccagttagaggaggagaaccagtctgtgtgcagcagaatggaggccgcagagcaggcgagaaatgctttgcaggtcgacctggcggaggcagagaagaggagggaagccctgtgggaaaagaacactcacctggaggctcagctgcagaaagctgaggaggctggggctgagctgcaggcagatctcagggacatccaagaagagaaggaagaaattcaaaagaaactaagtgagtcacgtcaccagcaggaggcagccacgactcagctggagcagctacatcaggaggcaaagcgacaggaagaagtgcttgccagggcagtccaggagaaggaggccctagtacgagagaaagcggctctagaggtgcggctgcaggccgtggagcgtgaccggcaggacctcgctgaacaactacaggggctcagctcagccaaggagctactggagagcagtctgtttgaagcccaacaacaaaattctgtgatagaggtcaccaaggggcagctggaggtccagattcaaactgtcactcaagccaaggaagtaatccaaggggaagtgaggtgcctgaagctggaactggacactgaacggagtcaggcagagcaggagcgggatgctgcagccagacagctggcccaggctgagcaagaagggaagactgccttggagcagcagaaggcagcccatgagaaagaggtgaaccagctccgggagaaatgggagaaggagcgctcctggcaccagcaggagctggcaaaggctctggagagcttagaaagggaaaaaatggagctggaaatgaggctaaaggagcagcagacagaaatggaggccatccaggcccagagggaagaagaacggacccaggcagagagtgccctatgccagatgcagctggaaacagagaaggagagagtatccctcctggagacactgctgcagacgcagaaggagctagcagatgccagccaacaactggaacgactgaggcaggacatgaaagtccagaaattaaaggagcaggagaccactgggatactacagacccagctccaggaggctcaacgggagctgaaggaggcagcccggcagcacagagatgaccttgctgccctccaagaagagagcagctccctgctgcaggataagatggacctgcagaagcaggtggaggacttgaagtctcagctggtggcccaggatgactcccagaggctggtggagcaggaggttcaggagaagctgagagagacccaggagtataaccgaattcagaaggagctggagagagagaaagccagcctgactctgtcactgatggaaaaggaacagagactccttgttttacaagaagctgactctattcgacaacaagagctgagtgccctgcgccaggacatgcaggaggcccagggagaacagaaagagctcagtgctcagatggaattactaaggcaagaggtgaaggaaaaggaggctgactttctggcccaggaagcacagctgctggaggagctggaggcgtctcatatcacggagcagcagctgcgagcctccttgtgggcccaggaagccaaggcagcccaactacagctgcgactgcgcagcacagagagccagctagaagcgctggccgcagagcagcagcccgggaaccaggcccaggcccaggcccagctggccagcctctactctgccctgcagcaggccctggggtctgtttgtgagagcaggcctgagctgagtggtgggggagactctgctccttccgtctggggccttgagccagaccagaatggagctaggagcctctttaagagagggcccctgctgactgctctctccgctgaggcagtagcatctgccctccacaagcttcatcaagacctgtggaagactcaacagacccgggatgttctgagggatcaggtccagaaactggaagagcgtctaactgatactgaggctgagaagagccaggtccacacagagttgcaggatctgcagagacagctctcccagaatcaggaagagaaatccaagtgggaaggaaagcagaactccctagaatctgagctgatggaactacatgaaactatggcatccttacagagtcgcctgcggagagcagagctacagcgaatggaagcccagggtgagcgagagttacttcaggcagccaaggagaacctgacagcccaggtggaacacctgcaagcagctgtcgtagaagccagggctcaggcaagtgctgctggcatcctggaagaagacctgagaacggctcgctcagcactgaagctgaaaaatgaggaagtagagagtgagcgtgagagagcccaggctctgcaagagcagggcgaactgaaggtggcccaagggaaggctctgcaagagaatttggccctcctgacccagaccctagctgaaagagaagaggaggtggagactctgcggggacaaatccaggaactggagaagcaacgggaaatgcagaaggctgctttggaattgctgtctctggacctgaagaagaggaaccaagaggtagatctgcagcaagaacagattcaggagctagagaagtgtaggtctgttttagagcatctgcccatggccgtccaggagcgagagcagaagctgactgtgcagagggagcagatcagagagctcgagaaggatcgggagactcagaggaacgtcttggagcatcagcttctagaacttgagaagaaagaccaaatgattgagtcccagagaggacaggttcaggacctgaaaaagcagttggttactctggaatgcctggccctggaactggaggaaaaccatcacaagatggagtgccagcaaaaactgatcaaggagctggagggccagagggaaacccagagagtggctttgacccaccttacgctggacctagaagaaaggagccaggagctgcaggcacaaagcagccagatccatgacctggagagccacagcaccgttctggcaagagagctgcaggagagggaccaggaggtgaagtctcagcgagaacagatcgaggagctgcagaggcagaaagagcatctgactcaggatctcgagaggagagaccaggagctgatgctgcagaaggagaggattcaggttctcgaggatcagaggacccggcagaccaagatcctggaggaggacctggaacagatcaagctgtccttgagagagcgaggccgggagctgaccactcagaggcagctgatgcaggaacgggcagaggaagggaagggcccaagtaaagcacagcgcgggagcctagagcacatgaagctgatcctgcgtgataaggagaaggaggtggaatgtcagcaggagcatatccatgaactccaggagctcaaagaccagctggagcagcagctccagggcctgcacaggaaggtaggtgagaccagcctcctcctgtcccagcgagagcaggaaatagtggtcctgcagcagcaactgcaggaagccagggaacaaggggagctgaaggagcagtcacttcagagtcaactggatgaggcccagagagccctagcccagagggaccaggaactggaggctctgcagcaagaacagcagcaggcccagggacaggaggagagggtgaaggaaaaggcagacgccctccagggagctctggagcaagcccatatgacactgaaggagcgtcatggagagcttcaggaccacaaggaacaggcacgaaggctggaggaagagctggcagtggagggacggcgggtccaggccctggaggaggtgctgggagacctaagggctgagtctcgggaacaggagaaagctctgttggccctccagcagcagtgtgctgagcaggcacaggagcatgaggtggagaccagggccctgcaggacagctggctgcaggcccaggcagtgctcaaggaacgggaccaggagctggaagctctgcgggcagaaagtcagtcctcccggcatcaggaggaggctgcccgggcccgggctgaggctctgcaggaggcccttggcaaggctcatgctgccctgcaggggaaagagcagcatctcctcgagcaggcagaattgagccgcagtctggaggccagcactgcaaccctgcaagcctccctggatgcctgccaggcacacagtcggcagctggaggaggctctgaggatacaagaaggtgagatccaggaccaggatctccgataccaggaggatgtgcagcagctgcagcaggcacttgcccagagggatgaagagctgagacatcagcaggaacgggagcagctgctggagaagtctctggcccagagggtccaagagaatatgatccaagagaagcagaatctggggcaagagagagaagaggaggagataaggggccttcatcagagtgtaagggagctacagctgactctagcccaaaaggaacaggagattctggagctgagggagacccagcaaaggaacaacctggaagccttaccccacagccacaaaacctccccaatggaggaacaatctctaaaacttgattctttagagcccaggctgcagcgggagctggagcggctacaggcagccctgagacagacagaagccagggagattgagtggagggagaaggcccaggacttggcactctccctagcgcagaccaaggccagtgtcagcagtctgcaggaggtagccatgttcctacaagcctctgtcctggagcgggactcagaacagcaaaggctgcaggatgaactggagctcaccagacgggctctggagaaggagcggctacacagcccaggtgcaaccagcacagcagaactggggtccagaggggagcagggtgtgcagctgggagaggtctcaggagtggaggctgagcctagtcctgatggaatggagaagcagtcatggagacaaaggcttgaacacctgcagcaagcagtggcccggctggagattgacaggagcaggctgcagcgccacaatgtccagctgcggagtaccttggagcaggtggagcgagaacggaggaagctgaagagggaggccatgcgtgcggcccaggcagggtccctagagatcagcaaggccacggcttcttcacccacacagcaggatgggagaggacagaagaactcagatgccaagtgtgtggctgaactgcagaaagaggtggtcctgctgcaagctcagctgactttggagcggaagcagaagcaggactacatcacccgctcagcacagaccagccgtgagctagcaggcctgcaccacagcctctcacactcacttcttgccgtggcccaggcccctgaggccactgtcctggaggcagagacccgcaggctggatgagtccctgactcaaagtctgacatccccagggccagtcctgctacaccccagccccagcactacccaagccgcctccaggtagcagccacagccaggagcacacagacagaagactgtgtcatgggtcatggcccctccgcacacctacaggtttgccaaaggaaaagcctggctctgttaggcacccaggagccccaggtcggcgggtgttcccaggaagaggaagtaaatctgcaaccctggggaggaccccaactcacctgggaatgaggcaaattgcatttgcttgctccctatggaatcacccagaggggtgccttgccctggctgagggacatgtactgcctctcatctagaatttattttcctagcacttcaccacctccttcatcttctccttcaacaataaaccctgagatctttgcattcat

SEQ ID NO: 356772 - DNA, 7053 bp, Homo sapiens
tggtaaatccctgcatgtgtctgagtggttttttgcttccccacttcaaggctatagcatcatgtggtattcagggagtgcagacgggctgggggtgcctaagggatttgggggaggctgcagttgggagtggttggggttggggctggggctggggtgtgctgcatcgtagctctgtccacatccatgggctgttctggtgacagtgctatgctcttctctttagggtgaccgagctctctgctctgttgacccagtctcagaagcaaaatgaagattatgaaaagatgataaaggctctgagagagacagtggagatcctggagacaaatcacacagaattaatggaacatgaagcatctcttagtaggaatgcgcaagaggagaagttgtctttacagcaggtgatcaaggatataacccaggtcatggtggaagaaggggacaatatagcccaaggctctggtcatgagaactctttggaattggactctagtatcttctcccagtttgattaccaggatgcagacaaggctcttactctggtgcgttcagtgctgactcggagacgccaggctgtgcaggacctaaggcagcagcttgcaggctgtcaagaggctgtgaacttgttgcaacagcagcatgatcagtgggaggaagagggcaaagccttgagacagcggctgcagaagctcactggggagcgggacactctggcagggcagactgtggacctccagggagaggtggactctctcagcaaggagcgagagctgctgcagaaggccagggaagagctgcggcagcagctggaggtgctagagcaggaggcatggcgcctgcgaagggtaaatgtggagcttcagctgcagggggactctgcccagggccagaaggaggaacagcaggaggagctgcacctggctgtccgggagagggagcgtcttcaggagatgctgatgggcctggaagccaaacagtcagaatcactcagtgaactgatcactcttcgggaagccctggagtcaagtcacctggaaggggagttactgaggcaagagcaaacggaagtgaccgcagcgctggctagggcagagcagtcaattgcagagctgtcgagttctgaaaacaccctgaagacagaagtagctgatcttcgggctgcagctgtcaagctcagtgccttaaatgaggctttggcgttagataaagttgggctgaaccagcagcttctccagttagaggaggagaaccagtctgtgtgcagcagaatggaggccgcagagcaggcgagaaatgctttgcaggtcgacctggcggaggcagagaagaggagggaagccctgtgggaaaagaacactcacctggaggctcagctgcagaaagctgaggaggctggggctgagctgcaggcagatctcagggacatccaagaagagaaggaagaaattcaaaagaaactaagtgagtcacgtcaccagcaggaggcagccacgactcagctggagcagctacatcaggaggcaaagcgacaggaagaagtgcttgccagggcagtccaggagaaggaggccctagtacgagagaaagcggctctagaggtgcggctgcaggccgtggagcgtgaccggcaggacctcgctgaacaactacaggggctcagctcagccaaggagctactggagagcagtctgtttgaagcccaacaacaaaattctgtgatagaggtcaccaaggggcagctggaggtccagattcaaactgtcactcaagccaaggaagtaatccaaggggaagtgaggtgcctgaagctggaactggacactgaacggagtcaggcagagcaggagcgggatgctgcagccagacagctggcccaggctgagcaagaagggaagactgccttggagcagcagaaggcagcccatgagaaagaggtgaaccagctccgggagaaatgggagaaggagcgctcctggcaccagcaggagctggcaaaggctctggagagcttagaaagggaaaaaatggagctggaaatgaggctaaaggagcagcagacagaaatggaggccatccaggcccagagggaagaagaacggacccaggcagagagtgccctatgccagatgcagctggaaacagagaaggagagagtatccctcctggagacactgctgcagacgcagaaggagctagcagatgccagccaacaactggaacgactgaggcaggacatgaaagtccagaaattaaaggagcaggagaccactgggatactacagacccagctccaggaggctcaacgggagctgaaggaggcagcccggcagcacagagatgaccttgctgccctccaagaagagagcagctccctgctgcaggataagatggacctgcagaagcaggtggaggacttgaagtctcagctggtggcccaggatgactcccagaggctggtggagcaggaggttcaggagaagctgagagagacccaggagtataaccgaattcagaaggagctggagagagagaaagccagcctgactctgtcactgatggaaaaggaacagagactccttgttttacaagaagctgactctattcgacaacaagagctgagtgccctgcgccaggacatgcaggaggcccagggagaacagaaagagctcagtgctcagatggaattactaaggcaagaggtgaaggaaaaggaggctgactttctggcccaggaagcacagctgctggaggagctggaggcgtctcatatcacggagcagcagctgcgagcctccttgtgggcccaggaagccaaggcagcccaactacagctgcgactgcgcagcacagagagccagctagaagcgctggccgcagagcagcagcccgggaaccaggcccaggcccaggcccagctggccagcctctactctgccctgcagcaggccctggggtctgtttgtgagagcaggcctgagctgagtggtgggggagactctgctccttccgtctggggccttgagccagaccagaatggagctaggagcctctttaagagagggcccctgctgactgctctctccgctgaggcagtagcatctgccctccacaagcttcatcaagacctgtggaagactcaacagacccgggatgttctgagggatcaggtccagaaactggaagagcgtctaactgatactgaggctgagaagagccaggtccacacagagttgcaggatctgcagagacagctctcccagaatcaggaagagaaatccaagtgggaaggaaagcagaactccctagaatctgagctgatggaactacatgaaactatggcatccttacagagtcgcctgcggagagcagagctacagcgaatggaagcccagggtgagcgagagttacttcaggcagccaaggagaacctgacagcccaggtggaacacctgcaagcagctgtcgtagaagccagggctcaggcaagtgctgctggcatcctggaagaagacctgagaacggctcgctcagcactgaagctgaaaaatgaggaagtagagagtgagcgtgagagagcccaggctctgcaagagcagggcgaactgaaggtggcccaagggaaggctctgcaagagaatttggccctcctgacccagaccctagctgaaagagaagaggaggtggagactctgcggggacaaatccaggaactggagaagcaacgggaaatgcagaaggctgctttggaattgctgtctctggacctgaagaagaggaaccaagaggtagatctgcagcaagaacagattcaggagctagagaagtgtaggtctgttttagagcatctgcccatggccgtccaggagcgagagcagaagctgactgtgcagagggagcagatcagagagctcgagaaggatcgggagactcagaggaacgtcttggagcatcagcttctagaacttgagaagaaagaccaaatgattgagtcccagagaggacaggttcaggacctgaaaaagcagttggttactctggaatgcctggccctggaactggaggaaaaccatcacaagatggagtgccagcaaaaactgatcaaggagctggagggccagagggaaacccagagagtggctttgacccaccttacgctggacctagaagaaaggagccaggagctgcaggcacaaagcagccagatccatgacctggagagccacagcaccgttctggcaagagagctgcaggagagggaccaggaggtgaagtctcagcgagaacagatcgaggagctgcagaggcagaaagagcatctgactcaggatctcgagaggagagaccaggagctgatgctgcagaaggagaggattcaggttctcgaggatcagaggacccggcagaccaagatcctggaggaggacctggaacagatcaagctgtccttgagagagcgaggccgggagctgaccactcagaggcagctgatgcaggaacgggcagaggaagggaagggcccaagtaaagcacagcgcgggagcctagagcacatgaagctgatcctgcgtgataaggagaaggaggtggaatgtcagcaggagcatatccatgaactccaggagctcaaagaccagctggagcagcagctccagggcctgcacaggaaggtaggtgagaccagcctcctcctgtcccagcgagagcaggaaatagtggtcctgcagcagcaactgcaggaagccagggaacaaggggagctgaaggagcagtcacttcagagtcaactggatgaggcccagagagccctagcccagagggaccaggaactggaggctctgcagcaagaacagcagcaggcccagggacaggaggagagggtgaaggaaaaggcagacgccctccagggagctctggagcaagcccatatgacactgaaggagcgtcatggagagcttcaggaccacaaggaacaggcacgaaggctggaggaagagctggcagtggagggacggcgggtccaggccctggaggaggtgctgggagacctaagggctgagtctcgggaacaggagaaagctctgttggccctccagcagcagtgtgctgagcaggcacaggagcatgaggtggagaccagggccctgcaggacagctggctgcaggcccaggcagtgctcaaggaacgggaccaggagctggaagctctgcgggcagaaagtcagtcctcccggcatcaggaggaggctgcccgggcccgggctgaggctctgcaggaggcccttggcaaggctcatgctgccctgcaggggaaagagcagcatctcctcgagcaggcagaattgagccgcagtctggaggccagcactgcaaccctgcaagcctccctggatgcctgccaggcacacagtcggcagctggaggaggctctgaggatacaagaaggtgagatccaggaccaggatctccgataccaggaggatgtgcagcagctgcagcaggcacttgcccagagggatgaagagctgagacatcagcaggaacgggagcagctgctggagaagtctctggcccagagggtccaagagaatatgatccaagagaagcagaatctggggcaagagagagaagaggaggagataaggggccttcatcagagtgtaagggagctacagctgactctagcccaaaaggaacaggagattctggagctgagggagacccagcaaaggaacaacctggaagccttaccccacagccacaaaacctccccaatggaggaacaatctctaaaacttgattctttagagcccaggctgcagcgggagctggagcggctacaggcagccctgagacagacagaagccagggagattgagtggagggagaaggcccaggacttggcactctccctagcgcagaccaaggccagtgtcagcagtctgcaggaggtagccatgttcctacaagcctctgtcctggagcgggactcagaacagcaaaggctgcaggatgaactggagctcaccagacgggctctggagaaggagcggctacacagcccaggtgcaaccagcacagcagaactggggtccagaggggagcagggtgtgcagctgggagaggtctcaggagtggaggctgagcctagtcctgatggaatggagaagcagtcatggagacaaaggcttgaacacctgcagcaagcagtggcccggctggagattgacaggagcaggctgcagcgccacaatgtccagctgcggagtaccttggagcaggtggagcgagaacggaggaagctgaagagggaggccatgcgtgcggcccaggcagggtccctagagatcagcaaggccacggcttcttcacccacacagcaggatgggagaggacagaagaactcagatgccaagtgtgtggctgaactgcagaaagaggtggtcctgctgcaagctcagctgactttggagcggaagcagaagcaggactacatcacccgctcagcacagaccagccgtgagctagcaggcctgcaccacagcctctcacactcacttcttgccgtggcccaggcccctgaggccactgtcctggaggcagagacccgcaggctggatgagtccctgactcaaagtctgacatccccagggccagtcctgctacaccccagccccagcactacccaagccgcctccaggtagcagccacagccaggagcacacagacagaagactgtgtcatgggtcatggcccctccgcacacctacaggtttgccaaaggaaaagcctggctctgttaggcacccaggagccccaggtcggcgggtgttcccaggaagaggaagtaaatctgcaaccctggggaggaccccaactcacctgggaatgaggcaaattgcatttgcttgctccctatggaatcacccagaggggtgccttgccctggctgagggacatgtactgcctctcatctagaatttattttcctagcacttcaccacctccttcatcttctccttcaacaataaaccctgagatctttgcattcat

SEQ ID NO: 356773 - DNA, 6138 bp, Homo sapiens
tgatggcctgtcttcttgaatagttgcatctcccttctcagctttcttttgttgcaccagcccccgacccccttctccagccccactttcggggttctgacatccctcctttgcccttgttcatcatctggtttctcttgctctctctccacaggacctaaggcagcagcttgcaggctgtcaagaggctgtgaacttgttgcaacagcagcatgatcagtgggaggaagagggcaaagccttgagacagcgctgtcaagctcagtgccttaaatgaggctttggcgttagataaagttgggctgaaccagcagcttctccagttagaggaggagaaccagtctgtgtgcagcagaatggaggccgcagagcaggcgagaaatgctttgcaggtcgacctggcggaggcagagaagaggagggaagccctgtgggaaaagaacactcacctggaggctcagctgcagaaagctgaggaggctggggctgagctgcaggcagatctcagggacatccaagaagagaaggaagaaattcaaaagaaactaagtgagtcacgtcaccagcaggaggcagccacgactcagctggagcagctacatcaggaggcaaagcgacaggaagaagtgcttgccagggcagtccaggagaaggaggccctagtacgagagaaagcggctctagaggtgcggctgcaggccgtggagcgtgaccggcaggacctcgctgaacaactacaggggctcagctcagccaaggagctactggagagcagtctgtttgaagcccaacaacaaaattctgtgatagaggtcaccaaggggcagctggaggtccagattcaaactgtcactcaagccaaggaagtaatccaaggggaagtgaggtgcctgaagctggaactggacactgaacggagtcaggcagagcaggagcgggatgctgcagccagacagctggcccaggctgagcaagaagggaagactgccttggagcagcagaaggcagcccatgagaaagaggtgaaccagctccgggagaaatgggagaaggagcgctcctggcaccagcaggagctggcaaaggctctggagagcttagaaagggaaaaaatggagctggaaatgaggctaaaggagcagcagacagaaatggaggccatccaggcccagagggaagaagaacggacccaggcagagagtgccctatgccagatgcagctggaaacagagaaggagagagtatccctcctggagacactgctgcagacgcagaaggagctagcagatgccagccaacaactggaacgactgaggcaggacatgaaagtccagaaattaaaggagcaggagaccactgggatactacagacccagctccaggaggctcaacgggagctgaaggaggcagcccggcagcacagagatgaccttgctgccctccaagaagagagcagctccctgctgcaggataagatggacctgcagaagcaggtggaggacttgaagtctcagctggtggcccaggatgactcccagaggctggtggagcaggaggttcaggagaagctgagagagacccaggagtataaccgaattcagaaggagctggagagagagaaagccagcctgactctgtcactgatggaaaaggaacagagactccttgttttacaagaagctgactctattcgacaacaagagctgagtgccctgcgccaggacatgcaggaggcccagggagaacagaaagagctcagtgctcagatggaattactaaggcaagaggtgaaggaaaaggaggctgactttctggcccaggaagcacagctgctggaggagctggaggcgtctcatatcacggagcagcagctgcgagcctccttgtgggcccaggaagccaaggcagcccaactacagctgcgactgcgcagcacagagagccagctagaagcgctggccgcagagcagcagcccgggaaccaggcccaggcccaggcccagctggccagcctctactctgccctgcagcaggccctggggtctgtttgtgagagcaggcctgagctgagtggtgggggagactctgctccttccgtctggggccttgagccagaccagaatggagctaggagcctctttaagagagggcccctgctgactgctctctccgctgaggcagtagcatctgccctccacaagcttcatcaagacctgtggaagactcaacagacccgggatgttctgagggatcaggtccagaaactggaagagcgtctaactgatactgaggctgagaagagccaggtccacacagagttgcaggatctgcagagacagctctcccagaatcaggaagagaaatccaagtgggaaggaaagcagaactccctagaatctgagctgatggaactacatgaaactatggcatccttacagagtcgcctgcggagagcagagctacagcgaatggaagcccagggtgagcgagagttacttcaggcagccaaggagaacctgacagcccaggtggaacacctgcaagcagctgtcgtagaagccagggctcaggcaagtgctgctggcatcctggaagaagacctgagaacggctcgctcagcactgaagctgaaaaatgaggaagtagagagtgagcgtgagagagcccaggctctgcaagagcagggcgaactgaaggtggcccaagggaaggctctgcaagagaatttggccctcctgacccagaccctagctgaaagagaagaggaggtggagactctgcggggacaaatccaggaactggagaagcaacgggaaatgcagaaggctgctttggaattgctgtctctggacctgaagaagaggaaccaagaggtagatctgcagcaagaacagattcaggagctagagaagtgtaggtctgttttagagcatctgcccatggccgtccaggagcgagagcagaagctgactgtgcagagggagcagatcagagagctcgagaaggatcgggagactcagaggaacgtcttggagcatcagcttctagaacttgagaagaaagaccaaatgattgagtcccagagaggacaggttcaggacctgaaaaagcagttggttactctggaatgcctggccctggaactggaggaaaaccatcacaagatggagtgccagcaaaaactgatcaaggagctggagggccagagggaaacccagagagtggctttgacccaccttacgctggacctagaagaaaggagccaggagctgcaggcacaaagcagccagatccatgacctggagagccacagcaccgttctggcaagagagctgcaggagagggaccaggaggtgaagtctcagcgagaacagatcgaggagctgcagaggcagaaagagcatctgactcaggatctcgagaggagagaccaggagctgatgctgcagaaggagaggattcaggttctcgaggatcagaggacccggcagaccaagatcctggaggaggacctggaacagatcaagctgtccttgagagagcgaggccgggagctgaccactcagaggcagctgatgcaggaacgggcagaggaagggaagggcccaagtaaagcacagcgcgggagcctagagcacatgaagctgatcctgcgtgataaggagaaggaggtggaatgtcagcaggagcatatccatgaactccaggagctcaaagaccagctggagcagcagctccagggcctgcacaggaaggtaggtgagaccagcctcctcctgtcccagcgagagcaggaaatagtggtcctgcagcagcaactgcaggaagccagggaacaaggggagctgaaggagcagtcacttcagagtcaactggatgaggcccagagagccctagcccagagggaccaggaactggaggctctgcagcaagaacagcagcaggcccagggacaggaggagagggtgaaggaaaaggcagacgccctccagggagctctggagcaagcccatatgacactgaaggagcgtcatggagagcttcaggaccacaaggaacaggcacgaaggctggaggaagagctggcagtggagggacggcgggtccaggccctggaggaggtgctgggagacctaagggctgagtctcgggaacaggagaaagctctgttggccctccagcagcagtgtgctgagcaggcacaggagcatgaggtggagaccagggccctgcaggacagctggctgcaggcccaggcagtgctcaaggaacgggaccaggagctggaagctctgcgggcagaaagtcagtcctcccggcatcaggaggaggctgcccgggcccgggctgaggctctgcaggaggcccttggcaaggctcatgctgccctgcaggggaaagagcagcatctcctcgagcaggcagaattgagccgcagtctggaggccagcactgcaaccctgcaagcctccctggatgcctgccaggcacacagtcggcagctggaggaggctctgaggatacaagaaggtgagatccaggaccaggatctccgataccaggaggatgtgcagcagctgcagcaggcacttgcccagagggatgaagagctgagacatcagcaggaacgggagcagctgctggagaagtctctggcccagagggtccaagagaatatgatccaagagaagcagaatctggggcaagagagagaagaggaggagataaggggccttcatcagagtgtaagggagctacagctgactctagcccaaaaggaacaggagattctggagctgagggagacccagcaaaggaacaacctggaagccttaccccacagccacaaaacctccccaatggaggaacaatctctaaaacttgattctttagagcccaggctgcagcgggagctggagcggctacaggcagccctgagacagacagaagccagggagattgagtggagggagaaggcccaggacttggcactctccctagcgcagaccaaggccagtgtcagcagtctgcaggaggtagccatgttcctacaagcctctgtcctggagcgggactcagaacagcaaaggctgcaggatgaactggagctcaccagacgggctctggagaaggagcggctacacagcccaggtgcaaccagcacagcagaactggggtccagaggggagcagggtgtgcagctgggagaggtctcaggagtggaggctgagcctagtcctgatggaatggagaagcagtcatggagacaaaggcttgaacacctgcagcaagcagtggcccggctggagattgacaggagcaggctgcagcgccacaatgtccagctgcggagtaccttggagcaggtggagcgagaacggaggaagctgaagagggaggccatgcgtgcggcccaggcagggtccctagagatcagcaaggccacggcttcttcacccacacagcaggatgggagaggacagaagaactcagatgccaagtgtgtggctgaactgcagaaagaggtggtcctgctgcaagctcagctgactttggagcggaagcagaagcaggactacatcacccgctcagcacagaccagccgtgagctagcaggcctgcaccacagcctctcacactcacttcttgccgtggcccaggcccctgaggccactgtcctggaggcagagacccgcaggctggatgagtccctgactcaaagtctgacatccccagggccagtcctgctacaccccagccccagcactacccaagccgcctccaggtagcagccacagccaggagcacacagacagaagactgtgtcatgggtcatggcccctccgcacacctacaggtttgccaaaggaaaagcctggctctgttaggcacccaggagccccaggtcggcgggtgttcccaggaagaggaagtaaatctgcaaccctggggaggaccccaactcacctgggaatgaggcaaattgcatttgcttgctccctatggaatcacccagaggggtgccttgccctggctgagggacatgtactgcctctcatctagaatttattttcctagcacttcaccacctccttcatcttctccttcaacaataaaccctgagatctttgcattcat

SEQ ID NO: 356774 - DNA, 4795 bp, Homo sapiens
cagtgtgtaggaattggtagaatcgccagagcattggaaatggccactgactatggtaaacctcgaaggaccctgaagccctaggtgaggagcatcttcccaccggccccctgccctgccatcttggtcttcatgcccttaattttccaggtggaggacttgaagtctcagctggtggcccaggatgactcccagaggctggtggagcaggaggttcaggagaagctgagagagacccaggagtataaccgaattcagaaggagctggagagagagaaagccagcctgactctgtcactgatggaaaaggaacagagactccttgttttacaagaagctgactctattcgacaacaagagctgagtgccctgcgccaggacatgcaggaggcccagggagaacagaaagagctcagtgctcagatggaattactaaggcaagaggtgaaggaaaaggaggctgactttctggcccaggaagcacagctgctggaggagctggaggcgtctcatatcacggagcagcagctgcgagcctccttgtgggcccaggaagccaaggcagcccaactacagctgcgactgcgcagcacagagagccagctagaagcgctggccgcagagcagcagcccgggaaccaggcccaggcccaggcccagctggccagcctctactctgccctgcagcaggccctggggtctgtttgtgagagcaggcctgagctgagtggtgggggagactctgctccttccgtctggggccttgagccagaccagaatggagctaggagcctctttaagagagggcccctgctgactgctctctccgctgaggcagtagcatctgccctccacaagcttcatcaagacctgtggaagactcaacagacccgggatgttctgagggatcaggtccagaaactggaagagcgtctaactgatactgaggctgagaagagccaggtccacacagagttgcaggatctgcagagacagctctcccagaatcaggaagagaaatccaagtgggaaggaaagcagaactccctagaatctgagctgatggaactacatgaaactatggcatccttacagagtcgcctgcggagagcagagctacagcgaatggaagcccagggtgagcgagagttacttcaggcagccaaggagaacctgacagcccaggtggaacacctgcaagcagctgtcgtagaagccagggctcaggcaagtgctgctggcatcctggaagaagacctgagaacggctcgctcagcactgaagctgaaaaatgaggaagtagagagtgagcgtgagagagcccaggctctgcaagagcagggcgaactgaaggtggcccaagggaaggctctgcaagagaatttggccctcctgacccagaccctagctgaaagagaagaggaggtggagactctgcggggacaaatccaggaactggagaagcaacgggaaatgcagaaggctgctttggaattgctgtctctggacctgaagaagaggaaccaagaggtagatctgcagcaagaacagattcaggagctagagaagtgtaggtctgttttagagcatctgcccatggccgtccaggagcgagagcagaagctgactgtgcagagggagcagatcagagagctcgagaaggatcgggagactcagaggaacgtcttggagcatcagcttctagaacttgagaagaaagaccaaatgattgagtcccagagaggacaggttcaggacctgaaaaagcagttggttactctggaatgcctggccctggaactggaggaaaaccatcacaagatggagtgccagcaaaaactgatcaaggagctggagggccagagggaaacccagagagtggctttgacccaccttacgctggacctagaagaaaggagccaggagctgcaggcacaaagcagccagatccatgacctggagagccacagcaccgttctggcaagagagctgcaggagagggaccaggaggtgaagtctcagcgagaacagatcgaggagctgcagaggcagaaagagcatctgactcaggatctcgagaggagagaccaggagctgatgctgcagaaggagaggattcaggttctcgaggatcagaggacccggcagaccaagatcctggaggaggacctggaacagatcaagctgtccttgagagagcgaggccgggagctgaccactcagaggcagctgatgcaggaacgggcagaggaagggaagggcccaagtaaagcacagcgcgggagcctagagcacatgaagctgatcctgcgtgataaggagaaggaggtggaatgtcagcaggagcatatccatgaactccaggagctcaaagaccagctggagcagcagctccagggcctgcacaggaaggtaggtgagaccagcctcctcctgtcccagcgagagcaggaaatagtggtcctgcagcagcaactgcaggaagccagggaacaaggggagctgaaggagcagtcacttcagagtcaactggatgaggcccagagagccctagcccagagggaccaggaactggaggctctgcagcaagaacagcagcaggcccagggacaggaggagagggtgaaggaaaaggcagacgccctccagggagctctggagcaagcccatatgacactgaaggagcgtcatggagagcttcaggaccacaaggaacaggcacgaaggctggaggaagagctggcagtggagggacggcgggtccaggccctggaggaggtgctgggagacctaagggctgagtctcgggaacaggagaaagctctgttggccctccagcagcagtgtgctgagcaggcacaggagcatgaggtggagaccagggccctgcaggacagctggctgcaggcccaggcagtgctcaaggaacgggaccaggagctggaagctctgcgggcagaaagtcagtcctcccggcatcaggaggaggctgcccgggcccgggctgaggctctgcaggaggcccttggcaaggctcatgctgccctgcaggggaaagagcagcatctcctcgagcaggcagaattgagccgcagtctggaggccagcactgcaaccctgcaagcctccctggatgcctgccaggcacacagtcggcagctggaggaggctctgaggatacaagaaggtgagatccaggaccaggatctccgataccaggaggatgtgcagcagctgcagcaggcacttgcccagagggatgaagagctgagacatcagcaggaacgggagcagctgctggagaagtctctggcccagagggtccaagagaatatgatccaagagaagcagaatctggggcaagagagagaagaggaggagataaggggccttcatcagagtgtaagggagctacagctgactctagcccaaaaggaacaggagattctggagctgagggagacccagcaaaggaacaacctggaagccttaccccacagccacaaaacctccccaatggaggaacaatctctaaaacttgattctttagagcccaggctgcagcgggagctggagcggctacaggcagccctgagacagacagaagccagggagattgagtggagggagaaggcccaggacttggcactctccctagcgcagaccaaggccagtgtcagcagtctgcaggaggtagccatgttcctacaagcctctgtcctggagcgggactcagaacagcaaaggctgcaggatgaactggagctcaccagacgggctctggagaaggagcggctacacagcccaggtgcaaccagcacagcagaactggggtccagaggggagcagggtgtgcagctgggagaggtctcaggagtggaggctgagcctagtcctgatggaatggagaagcagtcatggagacaaaggcttgaacacctgcagcaagcagtggcccggctggagattgacaggagcaggctgcagcgccacaatgtccagctgcggagtaccttggagcaggtggagcgagaacggaggaagctgaagagggaggccatgcgtgcggcccaggcagggtccctagagatcagcaaggccacggcttcttcacccacacagcaggatgggagaggacagaagaactcagatgccaagtgtgtggctgaactgcagaaagaggtggtcctgctgcaagctcagctgactttggagcggaagcagaagcaggactacatcacccgctcagcacagaccagccgtgagctagcaggcctgcaccacagcctctcacactcacttcttgccgtggcccaggcccctgaggccactgtcctggaggcagagacccgcaggctggatgagtccctgactcaaagtctgacatccccagggccagtcctgctacaccccagccccagcactacccaagccgcctccaggtagcagccacagccaggagcacacagacagaagactgtgtcatgggtcatggcccctccgcacacctacaggtttgccaaaggaaaagcctggctctgttaggcacccaggagccccaggtcggcgggtgttcccaggaagaggaagtaaatctgcaaccctggggaggaccccaactcacctgggaatgaggcaaattgcatttgcttgctccctatggaatcacccagaggggtgccttgccctggctgagggacatgtactgcctctcatctagaatttattttcctagcacttcaccacctccttcatcttctccttcaacaataaaccctgagatctttgcattcat

SEQ ID NO: 356775 - DNA, 8202 bp, Homo sapiens
agcagcggctgccgcagctcaatcgcggagcaactagccgggcgtctgcgggagccgagcgtggtgaggttcacaggtggctgttggtctttagtaagggtgctgtcttccctgtctgatccttagcaaaagtaggaaggtagagttgttggcagaaatcctgggataagagaatagtttcctggaagatctgtgcctccaaccagcagagagggattgagcttcattgaactcaacagagccaacatttcatagcaccatgttcaagaggaggttgaagtggcatggcaatggttagagaccctgctgggcgtgaacaccctctggctacctagggacctgtgggcctaccacctggtgccctcatggagacaagaagccctgggttgaacaacatgaagccccagtcactgcagctggtactggaagagcaggtgctggcactacagcagcagatggcagagaatcaggcagcctcctggcggaagctgaagaactcccaggaggcccagcagagacaagcaacccttgtgaggaagctgcaggccaaggtgctgcagtaccgaagctggtgccaagagctggagaagcggctagaagccactggaggaccaatcccccagaggtgggaaaatgtggaggagccaaacctggatgagctgctggtccgattggaggaggagcaacagaggtgtgagagtctagcagaggtgaacacccagcttcgactgcacatggaaaaagctgacgtggtgaataaagcccttagggaagatgtggaaaaactgacagtggactggagccgggcccgggatgagctaatgaggaaggagagccagtggcagatggagcaggagttcttcaagggctacctgaaaggggagcacggtcgccttctcagtctatggcgggaggttgtgacattccgacgccacttcctggaaatgaagtcagctactgacagagatctgatggagctaaaagctgagcatgtgaggctttcagggtctctgttgacctgttgtctgcgcttgactgtgggagcacagtctcgggaacccaacggatctggaagaatggatgggcgggagccggcccagctgctgctgctactagccaagacccaggagctggagaaggaagcccatgaaaggagccaggagttaatacagctgaagagtcaaggggatctggagaaggctgaacttcaggaccgggtgaccgagctctctgctctgttgacccagtctcagaagcaaaatgaagattatgaaaagatgataaaggctctgagagagacagtggagatcctggagacaaatcacacagaattaatggaacatgaagcatctcttagtaggaatgcgcaagaggagaagttgtctttacagcaggtgatcaaggatataacccaggtcatggtggaagaaggggacaatatagcccaaggctctggtcatgagaactctttggaattggactctagtatcttctcccagtttgattaccaggatgcagacaaggctcttactctggtgcgttcagtgctgactcggagacgccaggctgtgcaggacctaaggcagcagcttgcaggctgtcaagaggctgtgaacttgttgcaacagcagcatgatcagtgggaggaagagggcaaagccttgagacagcggctgcagaagctcactggggagcgggacactctggcagggcagactgtggacctccagggagaggtggactctctcagcaaggagcgagagctgctgcagaaggccagggaagagctgcggcagcagctggaggtgctagagcaggaggcatggcgcctgcgaagggtaaatgtggagcttcagctgcagggggactctgcccagggccagaaggaggaacagcaggaggagctgcacctggctgtccgggagagggagcgtcttcaggagatgctgatgggcctggaagccaaacagtcagaatcactcagtgaactgatcactcttcgggaagccctggagtcaagtcacctggaaggggagttactgaggcaagagcaaacggaagtgaccgcagcgctggctagggcagagcagtcaattgcagagctgtcgagttctgaaaacaccctgaagacagaagtagctgatcttcgggctgcagctgtcaagctcagtgccttaaatgaggctttggcgttagataaagttgggctgaaccagcagcttctccagttagaggaggagaaccagtctgtgtgcagcagaatggaggccgcagagcaggcgagaaatgctttgcaggtcgacctggcggaggcagagaagaggagggaagccctgtgggaaaagaacactcacctggaggctcagctgcagaaagctgaggaggctggggctgagctgcaggcagatctcagggacatccaagaagagaaggaagaaattcaaaagaaactaagtgagtcacgtcaccagcaggaggcagccacgactcagctggagcagctacatcaggaggcaaagcgacaggaagaagtgcttgccagggcagtccaggagaaggaggccctagtacgagagaaagcggctctagaggtgcggctgcaggccgtggagcgtgaccggcaggacctcgctgaacaactacaggggctcagctcagccaaggagctactggagagcagtctgtttgaagcccaacaacaaaattctgtgatagaggtcaccaaggggcagctggaggtccagattcaaactgtcactcaagccaaggaagtaatccaaggggaagtgaggtgcctgaagctggaactggacactgaacggagtcaggcagagcaggagcgggatgctgcagccagacagctggcccaggctgagcaagaagggaagactgccttggagcagcagaaggcagcccatgagaaagaggtgaaccagctccgggagaaatgggagaaggagcgctcctggcaccagcaggagctggcaaaggctctggagagcttagaaagggaaaaaatggagctggaaatgaggctaaaggagcagcagacagaaatggaggccatccaggcccagagggaagaagaacggacccaggcagagagtgccctatgccagatgcagctggaaacagagaaggagagagtatccctcctggagacactgctgcagacgcagaaggagctagcagatgccagccaacaactggaacgactgaggcaggacatgaaagtccagaaattaaaggagcaggagaccactgggatactacagacccagctccaggaggctcaacgggagctgaaggaggcagcccggcagcacagagatgaccttgctgccctccaagaagagagcagctccctgctgcaggataagatggacctgcagaagcaggtggaggacttgaagtctcagctggtggcccaggatgactcccagaggctggtggagcaggaggttcaggagaagctgagagagacccaggagtataaccgaattcagaaggagctggagagagagaaagccagcctgactctgtcactgatggaaaaggaacagagactccttgttttacaagaagctgactctattcgacaacaagagctgagtgccctgcgccaggacatgcaggaggcccagggagaacagaaagagctcagtgctcagatggaattactaaggcaagaggtgaaggaaaaggaggctgactttctggcccaggaagcacagctgctggaggagctggaggcgtctcatatcacggagcagcagctgcgagcctccttgtgggcccaggaagccaaggcagcccaactacagctgcgactgcgcagcacagagagccagctagaagcgctggccgcagagcagcagcccgggaaccaggcccaggcccaggcccagctggccagcctctactctgccctgcagcaggccctggggtctgtttgtgagagcaggcctgagctgagtggtgggggagactctgctccttccgtctggggccttgagccagaccagaatggagctaggagcctctttaagagagggcccctgctgactgctctctccgctgaggcagtagcatctgccctccacaagcttcatcaagacctgtggaagactcaacagacccgggatgttctgagggatcaggtccagaaactggaagagcgtctaactgatactgaggctgagaagagccaggtccacacagagttgcaggatctgcagagacagctctcccagaatcaggaagagaaatccaagtgggaaggaaagcagaactccctagaatctgagctgatggaactacatgaaactatggcatccttacagagtcgcctgcggagagcagagctacagcgaatggaagcccagggtgagcgagagttacttcaggcagccaaggagaacctgacagcccaggtggaacacctgcaagcagctgtcgtagaagccagggctcaggcaagtgctgctggcatcctggaagaagacctgagaacggctcgctcagcactgaagctgaaaaatgaggaagtagagagtgagcgtgagagagcccaggctctgcaagagcagggcgaactgaaggtggcccaagggaaggctctgcaagagaatttggccctcctgacccagaccctagctgaaagagaagaggaggtggagactctgcggggacaaatccaggaactggagaagcaacgggaaatgcagaaggctgctttggaattgctgtctctggacctgaagaagaggaaccaagaggtagatctgcagcaagaacagattcaggagctagagaagtgtaggtctgttttagagcatctgcccatggccgtccaggagcgagagcagaagctgactgtgcagagggagcagatcagagagctcgagaaggatcgggagactcagaggaacgtcttggagcatcagcttctagaacttgagaagaaagaccaaatgattgagtcccagagaggacaggttcaggacctgaaaaagcagttggttactctggaatgcctggccctggaactggaggaaaaccatcacaagatggagtgccagcaaaaactgatcaaggagctggagggccagagggaaacccagagagtggctttgacccaccttacgctggacctagaagaaaggagccaggagctgcaggcacaaagcagccagatccatgacctggagagccacagcaccgttctggcaagagagctgcaggagagggaccaggaggtgaagtctcagcgagaacagatcgaggagctgcagaggcagaaagagcatctgactcaggatctcgagaggagagaccaggagctgatgctgcagaaggagaggattcaggttctcgaggatcagaggacccggcagaccaagatcctggaggaggacctggaacagatcaagctgtccttgagagagcgaggccgggagctgaccactcagaggcagctgatgcaggaacgggcagaggaagggaagggcccaagtaaagcacagcgcgggagcctagagcacatgaagctgatcctgcgtgataaggagaaggaggtggaatgtcagcaggagcatatccatgaactccaggagctcaaagaccagctggagcagcagctccagggcctgcacaggaaggtaggtgagaccagcctcctcctgtcccagcgagagcaggaaatagtggtcctgcagcagcaactgcaggaagccagggaacaaggggagctgaaggagcagtcacttcagagtcaactggatgaggcccagagagccctagcccagagggaccaggaactggaggctctgcagcaagaacagcagcaggcccagggacaggaggagagggtgaaggaaaaggcagacgccctccagggagctctggagcaagcccatatgacactgaaggagcgtcatggagagcttcaggaccacaaggaacaggcacgaaggctggaggaagagctggcagtggagggacggcgggtccaggccctggaggaggtgctgggagacctaagggctgagtctcgggaacaggagaaagctctgttggccctccagcagcagtgtgctgagcaggcacaggagcatgaggtggagaccagggccctgcaggacagctggctgcaggcccaggcagtgctcaaggaacgggaccaggagctggaagctctgcgggcagaaagtcagtcctcccggcatcaggaggaggctgcccgggcccgggctgaggctctgcaggaggcccttggcaaggctcatgctgccctgcaggggaaagagcagcatctcctcgagcaggcagaattgagccgcagtctggaggccagcactgcaaccctgcaagcctccctggatgcctgccaggcacacagtcggcagctggaggaggctctgaggatacaagaaggtgagatccaggaccaggatctccgataccaggaggatgtgcagcagctgcagcaggcacttgcccagagggatgaagagctgagacatcagcaggaacgggagcagctgctggagaagtctctggcccagagggtccaagagaatatgatccaagagaagcagaatctggggcaagagagagaagaggaggagataaggggccttcatcagagtgtaagggagctacagctgactctagcccaaaaggaacaggagattctggagctgagggagacccagcaaaggaacaacctggaagccttaccccacagccacaaaacctccccaatggaggaacaatctctaaaacttgattctttagagcccaggctgcagcgggagctggagcggctacaggcagccctgagacagacagaagccagggagattgagtggagggagaaggcccaggacttggcactctccctagcgcagaccaaggccagtgtcagcagtctgcaggaggtagccatgttcctacaagcctctgtcctggagcgggactcagaacagcaaaggctgcaggatgaactggagctcaccagacgggctctggagaaggagcggctacacagcccaggtgcaaccagcacagcagaactggggtccagaggggagcagggtgtgcagctgggagaggtctcaggagtggaggctgagcctagtcctgatggaatggagaagcagtcatggagacaaaggcttgaacacctgcagcaagcagtggcccggctggagattgacaggagcaggctgcagcgccacaatgtccagctgcggagtaccttggagcaggtggagcgagaacggaggaagctgaagagggaggccatgcgtgcggcccaggcagggtccctagagatcagcaaggccacggcttcttcacccacacagcaggatgggagaggacagaagaactcagatgccaagtgtgtggctgaactgcagaaagagggcagagcacatggcaagtggcatgctgactcagacaccgggcactgagaaaagtgggaagccatggtcacagactctacattcccctctcctgttggcctccatcccttcctcaaccgtccgcagaacacctccttccagcaccttagctcctgcctccctctggacctattcagtcctcaagggtgccctgctaaaggctgggctgaaagctaagaggagaggtggcattcaatgtgtcctgtgtcctccctggggttgattaaggggtcgatgcccaatagagtccttcatcttggcgttcagcccagggtccagctgccaagggaaggcttggcaatcaagggtgatggagataagaatgaaaaggggcaccaccctgtgccaaagctggcatgttgtatatctgagagaggagctgcctattcacagtgtagggttgtcaagctggaggcagggagagaaaagcaagagctttttggttcctcttgaggatagaatctataggaaaatgtaagagggttaaaaataaatttcccatgcatccaaacttttttctttggtagactttcttgtcatctatttaaaatgaaacaagtgcatgtacgtggttaagacattttagctaggaatgatggtgcgtgcctgtagtcccagctacttgggaggctgaggcaggaggatcgcttgaacctggaaggtcaaggctgcagtgagccgagatcataccactgcactccagcctgagtgataaaagtgagaccctgtctca

SEQ ID NO: 356776 - DNA, 7504 bp, Homo sapiens
agcagcggctgccgcagctcaatcgcggagcaactagccgggcgtctgcgggagccgagcgtggtgaggttcacaggtggctgttggtctttagtaagggtgctgtcttccctgtctgatccttagcaaaagtaggaaggtagagttgttggcagaaatcctgggataagagaatagtttcctggaagatctgtgcctccaaccagcagagagggattgagcttcattgaactcaacagagccaacatttcatagcaccatgttcaagaggaggttgaagtggcatggcaatggttagagaccctgctgggcgtgaacaccctctggctacctagggacctgtgggcctaccacctggtgccctcatggagacaagaagccctgggttgaacaacatgaagccccagtcactgcagctggtactggaagagcaggtgctggcactacagcagcagatggcagagaatcaggcagcctcctggcggaagctgaagaactcccaggaggcccagcagagacaagcaacccttgtgaggaagctgcaggccaaggtgctgcagtaccgaagctggtgccaagagctggagaagcggctagaagccactggaggaccaatcccccagaggtgggaaaatgtggaggagccaaacctggatgagctgctggtccgattggaggaggagcaacagaggtgtgagagtctagcagaggtgaacacccagcttcgactgcacatggaaaaagctgacgtggtgaataaagcccttagggaagatgtggaaaaactgacagtggactggagccgggcccgggatgagctaatgaggaaggagagccagtggcagatggagcaggagttcttcaagggctacctgaaaggggagcacggtcgccttctcagtctatggcgggaggttgtgacattccgacgccacttcctggaaatgaagtcagctactgacagagatctgatggagctaaaagctgagcatgtgaggctttcagggtctctgttgacctgttgtctgcgcttgactgtgggagcacagtctcgggaacccaacggatctggaagaatggatgggcgggagccggcccagctgctgctgctactagccaagacccaggagctggagaaggaagcccatgaaaggagccaggagttaatacagctgaagagtcaaggggatctggagaaggctgaacttcaggaccgggtgaccgagctctctgctctgttgacccagtctcagaagcaaaatgaagattatgaaaagatgataaaggctctgagagagacagtggagatcctggagacaaatcacacagaattaatggaacatgaagcatctcttagtaggaatgcgcaagaggagaagttgtctttacagcaggtgatcaaggatataacccaggtcatggtggaagaaggggacaatatagcccaaggctctggtcatgagaactctttggaattggactctagtatcttctcccagtttgattaccaggatgcagacaaggctcttactctggtgcgttcagtgctgactcggagacgccaggctgtgcaggacctaaggcagcagcttgcaggctgtcaagaggctgtgaacttgttgcaacagcagcatgatcagtgggaggaagagggcaaagccttgagacagcggctgcagaagctcactggggagcgggacactctggcagggcagactgtggacctccagggagaggtggactctctcagcaaggagcgagagctgctgcagaaggccagggaagagctgcggcagcagctggaggtgctagagcaggaggcatggcgcctgcgaagggtaaatgtggagcttcagctgcagggggactctgcccagggccagaaggaggaacagcaggaggagctgcacctggctgtccgggagagggagcgtcttcaggagatgctgatgggcctggaagccaaacagtcagaatcactcagtgaactgatcactcttcgggaagccctggagtcaagtcacctggaaggggagttactgaggcaagagcaaacggaagtgaccgcagcgctggctagggcagagcagtcaattgcagagctgtcgagttctgaaaacaccctgaagacagaagtagctgatcttcgggctgcagctgtcaagctcagtgccttaaatgaggctttggcgttagataaagttgggctgaaccagcagcttctccagttagaggaggagaaccagtctgtgtgcagcagaatggaggccgcagagcaggcgagaaatgctttgcaggtcgacctggcggaggcagagaagaggagggaagccctgtgggaaaagaacactcacctggaggctcagctgcagaaagctgaggaggctggggctgagctgcaggcagatctcagggacatccaagaagagaaggaagaaattcaaaagaaactaagtgagtcacgtcaccagcaggaggcagccacgactcagctggagcagctacatcaggaggcaaagcgacaggaagaagtgcttgccagggcagtccaggagaaggaggccctagtacgagagaaagcggctctagaggtgcggctgcaggccgtggagcgtgaccggcaggacctcgctgaacaactacaggggctcagctcagccaaggagctactggagagcagtctgtttgaagcccaacaacaaaattctgtgatagaggtcaccaaggggcagctggaggtccagattcaaactgtcactcaagccaaggaagtaatccaaggggaagtgaggtgcctgaagctggaactggacactgaacggagtcaggcagagcaggagcgggatgctgcagccagacagctggcccaggctgagcaagaagggaagactgccttggagcagcagaaggcagcccatgagaaagaggtgaaccagctccgggagaaatgggagaaggagcgctcctggcaccagcaggagctggcaaaggctctggagagcttagaaagggaaaaaatggagctggaaatgaggctaaaggagcagcagacagaaatggaggccatccaggcccagagggaagaagaacggacccaggcagagagtgccctatgccagatgcagctggaaacagagaaggagagagtatccctcctggagacactgctgcagacgcagaaggagctagcagatgccagccaacaactggaacgactgaggcaggacatgaaagtccagaaattaaaggagcaggagaccactgggatactacagacccagctccaggaggctcaacgggagctgaaggaggcagcccggcagcacagagatgaccttgctgccctccaagaagagagcagctccctgctgcaggataagatggacctgcagaagcaggtggaggacttgaagtctcagctggtggcccaggatgactcccagaggctggtggagcaggaggttcaggagaagctgagagagacccaggagtataaccgaattcagaaggagctggagagagagaaagccagcctgactctgtcactgatggaaaaggaacagagactccttgttttacaagaagctgactctattcgacaacaagagctgagtgccctgcgccaggacatgcaggaggcccagggagaacagaaagagctcagtgctcagatggaattactaaggcaagaggtgaaggaaaaggaggctgactttctggcccaggaagcacagctgctggaggagctggaggcgtctcatatcacggagcagcagctgcgagcctccttgtgggcccaggaagccaaggcagcccaactacagctgcgactgcgcagcacagagagccagctagaagcgctggccgcagagcagcagcccgggaaccaggcccaggcccaggcccagctggccagcctctactctgccctgcagcaggccctggggtctgtttgtgagagcaggcctgagctgagtggtgggggagactctgctccttccgtctggggccttgagccagaccagaatggagctaggagcctctttaagagagggcccctgctgactgctctctccgctgaggcagtagcatctgccctccacaagcttcatcaagacctgtggaagactcaacagacccgggatgttctgagggatcaggtccagaaactggaagagcgtctaactgatactgaggctgagaagagccaggtccacacagagttgcaggatctgcagagacagctctcccagaatcaggaagagaaatccaagtgggaaggaaagcagaactccctagaatctgagctgatggaactacatgaaactatggcatccttacagagtcgcctgcggagagcagagctacagcgaatggaagcccagggtgagcgagagttacttcaggcagccaaggagaacctgacagcccaggtggaacacctgcaagcagctgtcgtagaagccagggctcaggcaagtgctgctggcatcctggaagaagacctgagaacggctcgctcagcactgaagctgaaaaatgaggaagtagagagtgagcgtgagagagcccaggctctgcaagagcagggcgaactgaaggtggcccaagggaaggctctgcaagagaatttggccctcctgacccagaccctagctgaaagagaagaggaggtggagactctgcggggacaaatccaggaactggagaagcaacgggaaatgcagaaggctgctttggaattgctgtctctggacctgaagaagaggaaccaagaggtagatctgcagcaagaacagattcaggagctagagaagtgtaggtctgttttagagcatctgcccatggccgtccaggagcgagagcagaagctgactgtgcagagggagcagatcagagagctcgagaaggatcgggagactcagaggaacgtcttggagcatcagcttctagaacttgagaagaaagaccaaatgattgagtcccagagaggacaggttcaggacctgaaaaagcagttggttactctggaatgcctggccctggaactggaggaaaaccatcacaagatggagtgccagcaaaaactgatcaaggagctggagggccagagggaaacccagagagtggctttgacccaccttacgctggacctagaagaaaggagccaggagctgcaggcacaaagcagccagatccatgacctggagagccacagcaccgttctggcaagagagctgcaggagagggaccaggaggtgaagtctcagcgagaacagatcgaggagctgcagaggcagaaagagcatctgactcaggatctcgagaggagagaccaggagctgatgctgcagaaggagaggattcaggttctcgaggatcagaggacccggcagaccaagatcctggaggaggacctggaacagatcaagctgtccttgagagagcgaggccgggagctgaccactcagaggcagctgatgcaggaacgggcagaggaagggaagggcccaagtaaagcacagcgcgggagcctagagcacatgaagctgatcctgcgtgataaggagaaggaggtggaatgtcagcaggagcatatccatgaactccaggagctcaaagaccagctggagcagcagctccagggcctgcacaggaaggtaggtgagaccagcctcctcctgtcccagcgagagcaggaaatagtggtcctgcagcagcaactgcaggaagccagggaacaaggggagctgaaggagcagtcacttcagagtcaactggatgaggcccagagagccctagcccagagggaccaggaactggaggctctgcagcaagaacagcagcaggcccagggacaggaggagagggtgaaggaaaaggcagacgccctccagggagctctggagcaagcccatatgacactgaaggagcgtcatggagagcttcaggaccacaaggaacaggcacgaaggctggaggaagagctggcagtggagggacggcgggtccaggccctggaggaggtgctgggagacctaagggctgagtctcgggaacaggagaaagctctgttggccctccagcagcagtgtgctgagcaggcacaggagcatgaggtggagaccagggccctgcaggacagctggctgcaggcccaggcagtgctcaaggaacgggaccaggagctggaagctctgcgggcagaaagtcagtcctcccggcatcaggaggaggctgcccgggcccgggctgaggctctgcaggaggcccttggcaaggctcatgctgccctgcaggggaaagagcagcatctcctcgagcaggcagaattgagccgcagtctggaggccagcactgcaaccctgcaagcctccctggatgcctgccaggcacacagtcggcagctggaggaggctctgaggatacaagaaggtgagatccaggaccaggatctccgataccaggaggatgtgcagcagctgcagcaggcacttgcccagagggatgaagagctgagacatcagcaggaacgggagcagctgctggagaagtctctggcccagagggtccaagagaatatgatccaagagaagcagaatctggggcaagagagagaagaggaggagataaggggccttcatcagagtgtaagggagctacagctgactctagcccaaaaggaacaggagattctggagctgagggagacccagcaaaggaacaacctggaagccttaccccacagccacaaaacctccccaatggaggaacaatctctaaaacttgattctttagagcccaggctgcagcgggagctggagcggctacaggcagccctgagacagacagaagccagggagattgagtggagggagaaggcccaggacttggcactctccctagcgcagaccaaggccagtgtcagcagtctgcaggaggtagccatgttcctacaagcctctgtcctggagcgggactcagaacagcaaaggctgcaggatgaactggagctcaccagacgggctctggagaaggagcggctacacagcccaggtgcaaccagcacagcagaactggggtccagaggggagcagggtgtgcagctgggagaggtctcaggagtggaggctgagcctagtcctgatggaatggagaagcaagccaggagcacacagacagaagactgtgtcatgggtcatggcccctccgcacacctacaggtttgccaaaggaaaagcctggctctgttaggcacccaggagccccaggtcggcgggtgttcccaggaagaggaagtaaatctgcaaccctggggaggaccccaactcacctgggaatgaggcaaattgcatttgcttgctccctatggaatcacccagaggggtgccttgccctggctgagggacatgtactgcctctcatctagaatttattttcctagcacttcaccacctccttcatcttctccttcaacaataaaccctgagatctttgcattcat

SEQ ID NO: 356777 - DNA, 1343 bp, Homo sapiens
agcagcggctgccgcagctcaatcgcggagcaactagccgggcgtctgcgggagccgagcgtggtgaggttcacaggtggctgttggtctttagtaagggtgctgtcttccctgtctgatccttagcaaaagtaggaaggtagagttgttggcagaaatcctgggataagagaatagtttcctggaagatctgtgcctccaaccagcagagagggattgagcttcattgaactcaacagagccaacatttcatagcaccatgttcaagaggaggttgaagtggcatggcaatggttagagaccctgctgggcgtgaacaccctctggctacctagggacctgtgggcctaccacctggtgccctcatggagacaagaagccctgggttgaacaacatgaagccccagtcactgcagctggtactggaagagcaggtgctggcactacagcagcagatggcagagaatcaggcagcctcctggcggaagctgaagaactcccaggaggcccagcagagacaagcaacccttgtgaggaagctgcaggccaaggtgctgcagtaccgaagctggtgccaagagctggagaagcggctagaagccactggaggaccaatcccccagaggtgggaaaatgtggaggagccaaacctggatgagctgctggtccgattggaggaggagcaacagaggtgtgagagtctagcagaggtgaacacccagcttcgactgcacatggaaaaagctgacgtggtgaataaagcccttagggaagatgtggaaaaactgacagtggactggagccgggcccgggatgagctaatgaggaaggagagccagtggcagatggagcaggagttcttcaagggctacctgaaaggggagcacggtcgccttctcagtctatggcgggaggttgtgacattccgacgccacttcctggaaatgaagtcagctactgacagagatctgatggagctaaaagctgagcatgtgaggctttcagggtctctgttgacctgttgtctgcgcttgactgtgggagcacagtctcgggaacccaacggatctggaagaatggatgggcgggagccggcccagctgctgctgctactagccaagacccaggagctggagaaggaagcccatgaaaggagccaggagttaatacagctgaagagtcaaggggatctggagaaggctgaacttcaggaccgggtgaccgagctctctgctctgttgacccagtctcagaagcaaaatgaagattatgaaaagatgataaaggctctgagagagacagtggagatcctgaagaaattgagaagtatgttgctgaaattg

SEQ ID NO: 356778 - DNA, 1595 bp, Homo sapiens
agcagcggctgccgcagctcaatcgcggagcaactagccgggcgtctgcgggagccgagcgtggtgaggttcacaggtggctgttggtctttagtaagggtgctgtcttccctgtctgatccttagcaaaagtaggaaggtagagttgttggcagaaatcctgggataagagaatagtttcctggaagatctgtgcctccaaccagcagagagggattgagcttcattgaactcaacagagccaacatttcatagcaccatgttcaagaggaggttgaagtggcatggcaatggttagagaccctgctgggcgtgaacaccctctggctacctagggacctgtgggcctaccacctggtgccctcatggagacaagaagccctgggttgaacaacatgaagccccagtcactgcagctggtactggaagagcaggtgctggcactacagcagcagatggcagagaatcaggcagcctcctggcggaagctgaagaactcccaggaggcccagcagagacaagcaacccttgtgaggaagctgcaggccaaggtgctgcagtaccgaagctggtgccaagagctggagaagcggctagaagccactggaggaccaatcccccagaggtgggaaaatgtggaggagccaaacctggatgagctgctggtccgattggaggaggagcaacagaggtgtgagagtctagcagaggtgaacacccagcttcgactgcacatggaaaaagctgacgtggtgaataaagcccttagggaagatgtggaaaaactgacagtggactggagccgggcccgggatgagctaatgaggaaggagagccagtggcagatggagcaggagttcttcaagggctacctgaaaggggagcacggtcgccttctcagtctatggcgggaggttgtgacattccgacgccacttcctggaaatgaagtcagctactgacagagatctgatggagctaaaagctgagcatgtgaggctttcagggtctctgttgacctgttgtctgcgcttgactgtgggagcacagtctcgggaacccaacggatctggaagaatggatgggcgggagccggcccagctgctgctgctactagccaagacccaggagctggagaaggaagcccatgaaaggagccaggagttaatacagctgaagagtcaaggggatctggagaaggctgaacttcaggaccggtgagatggcctggggtcccaggaagggttcgctgagagagagctgactcctttagagggttagggacaggcagggggaggtgccaggaacattcctaccatggagggggagaagatgtgcccaaggaaatctactttgaaacctgatgccacagttggggcttgtactgacctctgccctcagcctgtcttttagcccagtttctttcctgttgatttatggagctagctatgactccatcctccatcaacaccaaagtgcttgccattcccagaacagccaagctcttccccctccctgtctttgtacctgctgaatttagtctggaatgcctccctcccttctctctctgccttatcctctaagacatagttcaaa

SEQ ID NO: 356779 - DNA, 309 bp, Homo sapiens
agtggactggagccgggcccgggatgagctaatgaggaaggagagccagtggcagatggagcaggaggtaggaagaacggggactggaactgtgagaggaagcctgtgtattctggatgctgccctggtcagtactggaaggagttaacttcaggacttggatgaaaactgagctgttgctgttaaagtccctgaccatccttacctgcgcatgctggcagcctcagccttcttgggccttcagcttagacctgccactacccgcctagtctaggttctgctgggaggtagcatgacactcagagcaac

SEQ ID NO: 356780 - DNA, 1065 bp, Homo sapiens
gatgaaagtttgcagaatgacccagttgtgcagaagagacccactggctgctctcagtgaggccagggagagtcaaacagagcatcttggacaaagagagggcttgaaggccctttcaaagtgtcaagccagttggatgcacgggttgtgtggagtccaggggtacatccagaagcaatggcaggtgttatccattcattcaggttagacctctgagcagacggcagaaacgtcagccacaggtgagcataagctcaaacccccccattgaaggctacattcttgtcccacagggcagagcacatggcaagtggcatgctgactcagacaccgggcactgagaaaagtgggaagccatggtcacagactctacattcccctctcctgttggcctccatcccttcctcaaccgtccgcagaacacctccttccagcaccttagctcctgcctccctctggacctattcagtcctcaagggtgccctgctaaaggctgggctgaaagctaagaggagaggtggcattcaatgtgtcctgtgtcctccctggggttgattaaggggtcgatgcccaatagagtccttcatcttggcgttcagcccagggtccagctgccaagggaaggcttggcaatcaagggtgatggagataagaatgaaaaggggcaccaccctgtgccaaagctggcatgttgtatatctgagagaggagctgcctattcacagtgtagggttgtcaagctggaggcagggagagaaaagcaagagctttttggttcctcttgaggatagaatctataggaaaatgtaagagggttaaaaataaatttcccatgcatccaaacttttttctttggtagactttcttgtcatctatttaaaatgaaacaagtgcatgtacgtggttaagacattttagctaggaatgatggtgcgtgcctgtagtcccagctacttgggaggctgaggcaggaggatcgcttgaacctggaaggtcaaggctgcagtgagccgagatcataccactgcactccagcctgagtgataaaagtgagaccctgtctca

SEQ ID NO: 356781 - DNA, 7895 bp, Homo sapiens
agcagcggctgccgcagctcaatcgcggagcaactagccgggcgtctgcgggagccgagcgtggtgaggttcacaggtggctgttggtctttagtaagggtgctgtcttccctgtctgatccttagcaaaagtaggaaggtagagttgttggcagaaatcctgggataagagaatagtttcctggaagatctgtgcctccaaccagcagagagggattgagcttcattgaactcaacagagccaacatttcatagcaccatgttcaagaggaggttgaagtggcatggcaatggttagagaccctgctgggcgtgaacaccctctggctacctagggacctgtgggcctaccacctggtgccctcatggagacaagaagccctgggttgaacaacatgaagccccagtcactgcagctggtactggaagagcaggtgctggcactacagcagcagatggcagagaatcaggcagcctcctggcggaagctgaagaactcccaggaggcccagcagagacaagcaacccttgtgaggaagctgcaggccaaggtgctgcagtaccgaagctggtgccaagagctggagaagcggctagaagccactggaggaccaatcccccagaggtgggaaaatgtggaggagccaaacctggatgagctgctggtccgattggaggaggagcaacagaggtgtgagagtctagcagaggtgaacacccagcttcgactgcacatggaaaaagctgacgtggtgaataaagcccttagggaagatgtggaaaaactgacagtggactggagccgggcccgggatgagctaatgaggaaggagagccagtggcagatggagcaggagttcttcaagggctacctgaaaggggagcacggtcgccttctcagtctatggcgggaggttgtgacattccgacgccacttcctggaaatgaagtcagctactgacagagatctgatggagctaaaagctgagcatgtgaggctttcagggtctctgttgacctgttgtctgcgcttgactgtgggagcacagtctcgggaacccaacggatctggaagaatggatgggcgggagccggcccagctgctgctgctactagccaagacccaggagctggagaaggaagcccatgaaaggagccaggagttaatacagctgaagagtcaaggggatctggagaaggctgaacttcaggaccgggtgaccgagctctctgctctgttgacccagtctcagaagcaaaatgaagattatgaaaagatgataaaggctctgagagagacagtggagatcctggagacaaatcacacagaattaatggaacatgaagcatctcttagtaggaatgcgcaagaggagaagttgtctttacagcaggtgatcaaggatataacccaggtcatggtggaagaaggggacaatatagcccaaggctctggtcatgagaactctttggaattggactctagtatcttctcccagtttgattaccaggatgcagacaaggctcttactctggtgcgttcagtgctgactcggagacgccaggctgtgcaggacctaaggcagcagcttgcaggctgtcaagaggctgtgaacttgttgcaacagcagcatgatcagtgggaggaagagggcaaagccttgagacagcggctgcagaagctcactggggagcgggacactctggcagggcagactgtggacctccagggagaggtggactctctcagcaaggagcgagagctgctgcagaaggccagggaagagctgcggcagcagctggaggtgctagagcaggaggcatggcgcctgcgaagggtaaatgtggagcttcagctgcagggggactctgcccagggccagaaggaggaacagcaggaggagctgcacctggctgtccgggagagggagcgtcttcaggagatgctgatgggcctggaagccaaacagtcagaatcactcagtgaactgatcactcttcgggaagccctggagtcaagtcacctggaaggggagttactgaggcaagagcaaacggaagtgaccgcagcgctggctagggcagagcagtcaattgcagagctgtcgagttctgaaaacaccctgaagacagaagtagctgatcttcgggctgcagctgtcaagctcagtgccttaaatgaggctttggcgttagataaagttgggctgaaccagcagcttctccagttagaggaggagaaccagtctgtgtgcagcagaatggaggccgcagagcaggcgagaaatgctttgcaggtcgacctggcggaggcagagaagaggagggaagccctgtgggaaaagaacactcacctggaggctcagctgcagaaagctgaggaggctggggctgagctgcaggcagatctcagggacatccaagaagagaaggaagaaattcaaaagaaactaagtgagtcacgtcaccagcaggaggcagccacgactcagctggagcagctacatcaggaggcaaagcgacaggaagaagtgcttgccagggcagtccaggagaaggaggccctagtacgagagaaagcggctctagaggtgcggctgcaggccgtggagcgtgaccggcaggacctcgctgaacaactacaggggctcagctcagccaaggagctactggagagcagtctgtttgaagcccaacaacaaaattctgtgatagaggtcaccaaggggcagctggaggtccagattcaaactgtcactcaagccaaggaagtaatccaaggggaagtgaggtgcctgaagctggaactggacactgaacggagtcaggcagagcaggagcgggatgctgcagccagacagctggcccaggctgagcaagaagggaagactgccttggagcagcagaaggcagcccatgagaaagaggtgaaccagctccgggagaaatgggagaaggagcgctcctggcaccagcaggagctggcaaaggctctggagagcttagaaagggaaaaaatggagctggaaatgaggctaaaggagcagcagacagaaatggaggccatccaggcccagagggaagaagaacggacccaggcagagagtgccctatgccagatgcagctggaaacagagaaggagagagtatccctcctggagacactgctgcagacgcagaaggagctagcagatgccagccaacaactggaacgactgaggcaggacatgaaagtccagaaattaaaggagcaggagaccactgggatactacagacccagctccaggaggctcaacgggagctgaaggaggcagcccggcagcacagagatgaccttgctgccctccaagaagagagcagctccctgctgcaggataagatggacctgcagaagcaggtggaggacttgaagtctcagctggtggcccaggatgactcccagaggctggtggagcaggaggttcaggagaagctgagagagacccaggagtataaccgaattcagaaggagctggagagagagaaagccagcctgactctgtcactgatggaaaaggaacagagactccttgttttacaagaagctgactctattcgacaacaagagctgagtgccctgcgccaggacatgcaggaggcccagggagaacagaaagagctcagtgctcagatggaattactaaggcaagaggtgaaggaaaaggaggctgactttctggcccaggaagcacagctgctggaggagctggaggcgtctcatatcacggagcagcagctgcgagcctccttgtgggcccaggaagccaaggcagcccaactacagctgcgactgcgcagcacagagagccagctagaagcgctggccgcagagcagcagcccgggaaccaggcccaggcccaggcccagctggccagcctctactctgccctgcagcaggccctggggtctgtttgtgagagcaggcctgagctgagtggtgggggagactctgctccttccgtctggggccttgagccagaccagaatggagctaggagcctctttaagagagggcccctgctgactgctctctccgctgaggcagtagcatctgccctccacaagcttcatcaagacctgtggaagactcaacagacccgggatgttctgagggatcaggtccagaaactggaagagcgtctaactgatactgaggctgagaagagccaggtccacacagagttgcaggatctgcagagacagctctcccagaatcaggaagagaaatccaagtgggaaggaaagcagaactccctagaatctgagctgatggaactacatgaaactatggcatccttacagagtcgcctgcggagagcagagctacagcgaatggaagcccagggtgagcgagagttacttcaggcagccaaggagaacctgacagcccaggtggaacacctgcaagcagctgtcgtagaagccagggctcaggcaagtgctgctggcatcctggaagaagacctgagaacggctcgctcagcactgaagctgaaaaatgaggaagtagagagtgagcgtgagagagcccaggctctgcaagagcagggcgaactgaaggtggcccaagggaaggctctgcaagagaatttggccctcctgacccagaccctagctgaaagagaagaggaggtggagactctgcggggacaaatccaggaactggagaagcaacgggaaatgcagaaggctgctttggaattgctgtctctggacctgaagaagaggaaccaagaggtagatctgcagcaagaacagattcaggagctagagaagtgtaggtctgttttagagcatctgcccatggccgtccaggagcgagagcagaagctgactgtgcagagggagcagatcagagagctcgagaaggatcgggagactcagaggaacgtcttggagcatcagcttctagaacttgagaagaaagaccaaatgattgagtcccagagaggacaggttcaggacctgaaaaagcagttggttactctggaatgcctggccctggaactggaggaaaaccatcacaagatggagtgccagcaaaaactgatcaaggagctggagggccagagggaaacccagagagtggctttgacccaccttacgctggacctagaagaaaggagccaggagctgcaggcacaaagcagccagatccatgacctggagagccacagcaccgttctggcaagagagctgcaggagagggaccaggaggtgaagtctcagcgagaacagatcgaggagctgcagaggcagaaagagcatctgactcaggatctcgagaggagagaccaggagctgatgctgcagaaggagaggattcaggttctcgaggatcagaggacccggcagaccaagatcctggaggaggacctggaacagatcaagctgtccttgagagagcgaggccgggagctgaccactcagaggcagctgatgcaggaacgggcagaggaagggaagggcccaagtaaagcacagcgcgggagcctagagcacatgaagctgatcctgcgtgataaggagaaggaggtggaatgtcagcaggagcatatccatgaactccaggagctcaaagaccagctggagcagcagctccagggcctgcacaggaaggtaggtgagaccagcctcctcctgtcccagcgagagcaggaaatagtggtcctgcagcagcaactgcaggaagccagggaacaaggggagctgaaggagcagtcacttcagagtcaactggatgaggcccagagagccctagcccagagggaccaggaactggaggctctgcagcaagaacagcagcaggcccagggacaggaggagagggtgaaggaaaaggcagacgccctccagggagctctggagcaagcccatatgacactgaaggagcgtcatggagagcttcaggaccacaaggaacaggcacgaaggctggaggaagagctggcagtggagggacggcgggtccaggccctggaggaggtgctgggagacctaagggctgagtctcgggaacaggagaaagctctgttggccctccagcagcagtgtgctgagcaggcacaggagcatgaggtggagaccagggccctgcaggacagctggctgcaggcccaggcagtgctcaaggaacgggaccaggagctggaagctctgcgggcagaaagtcagtcctcccggcatcaggaggaggctgcccgggcccgggctgaggctctgcaggaggcccttggcaaggctcatgctgccctgcaggggaaagagcagcatctcctcgagcaggcagaattgagccgcagtctggaggccagcactgcaaccctgcaagcctccctggatgcctgccaggcacacagtcggcagctggaggaggctctgaggatacaagaaggtgagatccaggaccaggatctccgataccaggaggatgtgcagcagctgcagcaggcacttgcccagagggatgaagagctgagacatcagcaggaacgggagcagctgctggagaagtctctggcccagagggtccaagagaatatgatccaagagaagcagaatctggggcaagagagagaagaggaggagataaggggccttcatcagagtagcccaggctgcagcgggagctggagcggctacaggcagccctgagacagacagaagccagggagattgagtggagggagaaggcccaggacttggcactctccctagcgcagaccaaggccagtgtcagcagtctgcaggaggtagccatgttcctacaagcctctgtcctggagcgggactcagaacagcaaaggctgcaggatgaactggagctcaccagacgggctctggagaaggagcggctacacagcccaggtgcaaccagcacagcagaactggggtccagaggggagcagggtgtgcagctgggagaggtctcaggagtggaggctgagcctagtcctgatggaatggagaagcagtcatggagacaaaggcttgaacacctgcagcaagcagtggcccggctggagattgacaggagcaggctgcagcgccacaatgtccagctgcggagtaccttggagcaggtggagcgagaacggaggaagctgaagagggaggccatgcgtgcggcccaggcagggtccctagagatcagcaaggccacggcttcttcacccacacagcaggatgggagaggacagaagaactcagatgccaagtgtgtggctgaactgcagaaagaggtggtcctgctgcaagctcagctgactttggagcggaagcagaagcaggactacatcacccgctcagcacagaccagccgtgagctagcaggcctgcaccacagcctctcacactcacttcttgccgtggcccaggcccctgaggccactgtcctggaggcagagacccgcaggctggatgagtccctgactcaaagtctgacatccccagggccagtcctgctacaccccagccccagcactacccaagccgcctccaggtagcagccacagccaggagcacacagacagaagactgtgtcatgggtcatggcccctccgcacacctacaggtttgccaaaggaaaagcctggctctgttaggcacccaggagccccaggtcggcgggtgttcccaggaagaggaagtaaatctgcaaccctggggaggaccccaactcacctgggaatgaggcaaattgcatttgcttgctccctatggaatcacccagaggggtgccttgccctggctgagggacatgtactgcctctcatctagaatttattttcctagcacttcaccacctccttcatcttctccttcaacaataaaccctgagatctttgcattcat

SEQ ID NO: 356782 - DNA, 7529 bp, Homo sapiens
agcagcggctgccgcagctcaatcgcggagcaactagccgggcgtctgcgggagccgagcgtggtgaggttcacaggtggctgttggtctttagtaagggtgctgtcttccctgtctgatccttagcaaaagtaggaaggtagagttgttggcagaaatcctgggataagagaatagtttcctggaagatctgtgcctccaaccagcagagagggattgagcttcattgaactcaacagagccaacatttcatagcaccatgttcaagaggaggttgaagtggcatggcaatggttagagaccctgctgggcgtgaacaccctctggctacctagggacctgtgggcctaccacctggtgccctcatggagacaagaagccctgggttgaacaacatgaagccccagtcactgcagctggtactggaagagcaggtgctggcactacagcagcagatggcagagaatcaggcagcctcctggcggaagctgaagaactcccaggaggcccagcagagacaagcaacccttgtgaggaagctgcaggccaaggtgctgcagtaccgaagctggtgccaagagctggagaagcggctagaagccactggaggaccaatcccccagaggtgggaaaatgtggaggagccaaacctggatgagctgctggtccgattggaggaggagcaacagaggtgtgagagtctagcagaggtgaacacccagcttcgactgcacatggaaaaagctgacgtggtgaataaagcccttagggaagatgtggaaaaactgacagtggactggagccgggcccgggatgagctaatgaggaaggagagccagtggcagatggagcaggagttcttcaagggctacctgaaaggggagcacggtcgccttctcagtctatggcgggaggttgtgacattccgacgccacttcctggaaatgaagtcagctactgacagagatctgatggagctaaaagctgagcatgtgaggctttcagggtctctgttgacctgttgtctgcgcttgactgtgggagcacagtctcgggaacccaacggatctggaagaatggatgggcgggagccggcccagctgctgctgctactagccaagacccaggagctggagaaggaagcccatgaaaggagccaggagttaatacagctgaagagtcaaggggatctggagaaggctgaacttcaggaccgggtgaccgagctctctgctctgttgacccagtctcagaagcaaaatgaagattatgaaaagatgataaaggctctgagagagacagtggagatcctggagacaaatcacacagaattaatggaacatgaagcatctcttagtaggaatgcgcaagaggagaagttgtctttacagcaggtgatcaaggatataacccaggtcatggtggaagaaggggacaatatagcccaaggctctggtcatgagaactctttggaattggactctagtatcttctcccagtttgattaccaggatgcagacaaggctcttactctggtgcgttcagtgctgactcggagacgccaggctgtgcaggacctaaggcagcagcttgcaggctgtcaagaggctgtgaacttgttgcaacagcagcatgatcagtgggaggaagagggcaaagccttgagacagcggctgcagaagctcactggggagcgggacactctggcagggcagactgtggacctccagggagaggtggactctctcagcaaggagcgagagctgctgcagaaggccagggaagagctgcggcagcagctggaggtgctagagcaggaggcatggcgcctgcgaagggtaaatgtggagcttcagctgcagggggactctgcccagggccagaaggaggaacagcaggaggagctgcacctggctgtccgggagagggagcgtcttcaggagatgctgatgggcctggaagccaaacagtcagaatcactcagtgaactgatcactcttcgggaagccctggagtcaagtcacctggaaggggagttactgaggcaagagcaaacggaagtgaccgcagcgctggctagggcagagcagtcaattgcagagctgtcgagttctgaaaacaccctgaagacagaagtagctgatcttcgggctgcagctgtcaagctcagtgccttaaatgaggctttggcgttagataaagttgggctgaaccagcagcttctccagttagaggaggagaaccagtctgtgtgcagcagaatggaggccgcagagcaggcgagaaatgctttgcaggtcgacctggcggaggcagagaagaggagggaagccctgtgggaaaagaacactcacctggaggctcagctgcagaaagctgaggaggctggggctgagctgcaggcagatctcagggacatccaagaagagaaggaagaaattcaaaagaaactaagtgagtcacgtcaccagcaggaggcagccacgactcagctggagcagctacatcaggaggcaaagcgacaggaagaagtgcttgccagggcagtccaggagaaggaggccctagtacgagagaaagcggctctagaggtgcggctgcaggccgtggagcgtgaccggcaggacctcgctgaacaactacaggggctcagctcagccaaggagctactggagagcagtctgtttgaagcccaacaacaaaattctgtgatagaggtcaccaaggggcagctggaggtccagattcaaactgtcactcaagccaaggaagtaatccaaggggaagtgaggtgcctgaagctggaactggacactgaacggagtcaggcagagcaggagcgggatgctgcagccagacagctggcccaggctgagcaagaagggaagactgccttggagcagcagaaggcagcccatgagaaagaggtgaaccagctccgggagaaatgggagaaggagcgctcctggcaccagcaggagctggcaaaggctctggagagcttagaaagggaaaaaatggagctggaaatgaggctaaaggagcagcagacagaaatggaggccatccaggcccagagggaagaagaacggacccaggcagagagtgccctatgccagatgcagctggaaacagagaaggagagagtatccctcctggagacactgctgcagacgcagaaggagctagcagatgccagccaacaactggaacgactgaggcaggacatgaaagtccagaaattaaaggagcaggagaccactgggatactacagacccagctccaggaggctcaacgggagctgaaggaggcagcccggcagcacagagatgaccttgctgccctccaagaagagagcagctccctgctgcaggataagatggacctgcagaagcaggtggaggacttgaagtctcagctggtggcccaggatgactcccagaggctggtggagcaggaggttcaggagaagctgagagagacccaggagtataaccgaattcagaaggagctggagagagagaaagccagcctgactctgtcactgatggaaaaggaacagagactccttgttttacaagaagctgactctattcgacaacaagagctgagtgccctgcgccaggacatgcaggaggcccagggagaacagaaagagctcagtgctcagatggaattactaaggcaagaggtgaaggaaaaggaggctgactttctggcccaggaagcacagctgctggaggagctggaggcgtctcatatcacggagcagcagctgcgagcctccttgtgggcccaggaagccaaggcagcccaactacagctgcgactgcgcagcacagagagccagctagaagcgctggccgcagagcagcagcccgggaaccaggcccaggcccaggcccagctggccagcctctactctgccctgcagcaggccctggggtctgtttgtgagagcaggcctgagctgagtggtgggggagactctgctccttccgtctggggccttgagccagaccagaatggagctaggagcctctttaagagagggcccctgctgactgctctctccgctgaggcagtagcatctgccctccacaagcttcatcaagacctgtggaagactcaacagacccgggatgttctgagggatcaggtccagaaactggaagagcgtctaactgatactgaggctgagaagagccaggtccacacagagttgcaggatctgcagagacagctctcccagaatcaggaagagaaatccaagtgggaaggaaagcagaactccctagaatctgagctgatggaactacatgaaactatggcatccttacagagtcgcctgcggagagcagagctacagcgaatggaagcccagggtgagcgagagttacttcaggcagccaaggagaacctgacagcccaggtggaacacctgcaagcagctgtcgtagaagccagggctcaggcaagtgctgctggcatcctggaagaagacctgagaacggctcgctcagcactgaagctgaaaaatgaggaagtagagagtgagcgtgagagagcccaggctctgcaagagcagggcgaactgaaggtggcccaagggaaggctctgcaagagaatttggccctcctgacccagaccctagctgaaagagaagaggaggtggagactctgcggggacaaatccaggaactggagaagcaacgggaaatgcagaaggctgctttggaattgctgtctctggacctgaagaagaggaaccaagaggtagatctgcagcaagaacagattcaggagctagagaagtgtaggtctgttttagagcatctgcccatggccgtccaggagcgagagcagaagctgactgtgcagagggagcagatcagagagctcgagaaggatcgggagactcagaggaacgtcttggagcatcagcttctagaacttgagaagaaagaccaaatgattgagtcccagagaggacaggttcaggacctgaaaaagcagttggttactctggaatgcctggccctggaactggaggaaaaccatcacaagatggagtgccagcaaaaactgatcaaggagctggagggccagagggaaacccagagagtggctttgacccaccttacgctggacctagaagaaaggagccaggagctgcaggcacaaagcagccagatccatgacctggagagccacagcaccgttctggcaagagagctgcaggagagggaccaggaggtgaagtctcagcgagaacagatcgaggagctgcagaggcagaaagagcatctgactcaggatctcgagaggagagaccaggagctgatgctgcagaaggagaggattcaggttctcgaggatcagaggacccggcagaccaagatcctggaggaggacctggaacagatcaagctgtccttgagagagcgaggccgggagctgaccactcagaggcagctgatgcaggaacgggcagaggaagggaagggcccaagtaaagcacagcgcgggagcctagagcacatgaagctgatcctgcgtgataaggagaaggaggtggaatgtcagcaggagcatatccatgaactccaggagctcaaagaccagctggagcagcagctccagggcctgcacaggaaggtaggtgagaccagcctcctcctgtcccagcgagagcaggaaatagtggtcctgcagcagcaactgcaggaagccagggaacaaggggagctgaaggagcagtcacttcagagtcaactggatgaggcccagagagccctagcccagagggaccaggaactggaggctctgcagcaagaacagcagcaggcccagggacaggaggagagggtgaaggaaaaggcagacgccctccagggagctctggagcaagcccatatgacactgaaggagcgtcatggagagcttcaggaccacaaggaacaggcacgaaggctggaggaagagctggcagtggagggacggcgggtccaggccctggaggaggtgctgggagacctaagggctgagtctcgggaacaggagaaagctctgttggccctccagcagcagtgtgctgagcaggcacaggagcatgaggtggagaccagggccctgcaggacagctggctgcaggcccaggcagtgctcaaggaacgggaccaggagctggaagctctgcgggcagaaagtcagtcctcccggcatcaggaggaggctgcccgggcccgggctgaggctctgcaggaggcccttggcaaggctcatgctgccctgcaggggaaagagcagcatctcctcgagcaggcagaattgagccgcagtctggaggccagcactgcaaccctgcaagcctccctggatgcctgccaggcacacagtcggcagctggaggaggctctgaggatacaagaaggtgagatccaggaccaggatctccgataccaggaggatgtgcagcagctgcagcaggcacttgcccagagggatgaagagctgagacatcagcaggaacgggagcagctgctggagaagtctctggcccagagggtccaagagaatatgatccaagagaagcagaatctggggcaagagagagaagaggaggagataaggggccttcatcagagtgtaagggagctacagctgactctagcccaaaaggaacaggagattctggagctgagggagacccagcaaaggaacaacctggaagccttaccccacagccacaaaacctccccaatggaggaacaatctctaaaacttgattctttagagcccaggctgcagcgggagctggagcggctacaggcagccctgagacagacagaagccagggagattgagtggagggagaaggcccaggacttggcactctccctagcgcagaccaaggccagtgtcagcagtctgcaggaggtagccatgttcctacaagcctctgtcctggagcgggactcagaacagcaaaggctgcaggatgaactggagctcaccagacgggctctggagaaggagcggctacacagcccaggtgcaaccagcacagcagaactggggtccagaggggagcagggtgtgcagctgggagaggtctcaggagtggaggctgagcctagtcctgatggaatggagaagcagtcatggagacaaaggcttgaacacctgcagcaagcagtggcccggctggagattgacaggagcaggctgcagcgccacaatgtccagctgcggagtaccttggagcaggtggagcgagaacggaggaagctgaagagggaggccatgcgtgcggcccaggcagggtccctagagatcagcaaggccacggcttcttcacccacacagcaggatgggagaggacagaagaactcagatgccaagtgtgtggctgaactgcagaaagaggagtgttcttgaggaccctaattttttttggggggggaaaaaaaagatatattttttccttttttaaaaaaaaaccggggggtaaggggtgggccaaaa

SEQ ID NO: 356783 - DNA, 5908 bp, Homo sapiens
agcagcggctgccgcagctcaatcgcggagcaactagccgggcgtctgcgggagccgagcgtggtgaggttcacaggtggctgttggtctttagtaagggtgctgtcttccctgtctgatccttagcaaaagtaggaaggtagagttgttggcagaaatcctgggataagagaatagtttcctggaagatctgtgcctccaaccagcagagagggattgagcttcattgaactcaacagagccaacatttcatagcaccatgttcaagaggaggttgaagtggcatggcaatggttagagaccctgctgggcgtgaacaccctctggctacctagggacctgtgggcctaccacctggtgccctcatggagacaagaagccctgggttgaacaacatgaagccccagtcactgcagctggtactggaagagcaggtgctggcactacagcagcagatggcagagaatcaggcagcctcctggcggaagctgaagaactcccaggaggcccagcagagacaagcaacccttgtgaggaagctgcaggccaaggtgctgcagtaccgaagctggtgccaagagctggagaagcggctagaagccactggaggaccaatcccccagaggtgggaaaatgtggaggagccaaacctggatgagctgctggtccgattggaggaggagcaacagaggtgtgagagtctagcagaggtgaacacccagcttcgactgcacatggaaaaagctgacgtggtgaataaagcccttagggaagatgtggaaaaactgacagtggactggagccgggcccgggatgagctaatgaggaaggagagccagtggcagatggagcaggagttcttcaagggctacctgaaaggggagcacggtcgccttctcagtctatggcgggaggttgtgacattccgacgccacttcctggaaatgaagtcagctactgacagagatctgatggagctaaaagctgagcatgtgaggctttcagggtctctgttgacctgttgtctgcgcttgactgtgggagcacagtctcgggaacccaacggatctggaagaatggatgggcgggagccggcccagctgctgctgctactagccaagacccaggagctggagaaggaagcccatgaaaggagccaggagttaatacagctgaagagtcaaggggatctggagaaggctgaacttcaggaccgggtgaccgagctctctgctctgttgacccagtctcagaagcaaaatgaagattatgaaaagatgataaaggctctgagagagacagtggagatcctggagacaaatcacacagaattaatggaacatgaagcatctcttagtaggaatgcgcaagaggagaagttgtctttacagcaggtgatcaaggatataacccaggtcatggtggaagaaggggacaatatagcccaaggctctggtcatgagaactctttggaattggactctagtatcttctcccagtttgattaccaggatgcagacaaggctcttactctggtgcgttcagtgctgactcggagacgccaggctgtgcaggacctaaggcagcagcttgcaggctgtcaagaggctgtgaacttgttgcaacagcagcatgatcagtgggaggaagagggcaaagccttgagacagcggctgcagaagctcactggggagcgggacactctggcagggcagactgtggacctccagggagaggtggactctctcagcaaggagcgagagctgctgcagaaggccagggaagagctgcggcagcagctggaggtgctagagcaggaggcatggcgcctgcgaagggtaaatgtggagcttcagctgcagggggactctgcccagggccagaaggaggaacagcaggaggagctgcacctggctgtccgggagagggagcgtcttcaggagatgctgatgggcctggaagccaaacagtcagaatcactcagtgaactgatcactcttcgggaagccctggagtcaagtcacctggaaggggagttactgaggcaagagcaaacggaagtgaccgcagcgctggctagggcagagcagtcaattgcagagctgtcgagttctgaaaacaccctgaagacagaagtagctgatcttcgggctgcagctgtcaagctcagtgccttaaatgaggctttggcgttagataaagttgggctgaaccagcagcttctccagttagaggaggagaaccagtctgtgtgcagcagaatggaggccgcagagcaggcgagaaatgctttgcaggtcgacctggcggaggcagagaagaggagggaagccctgtgggaaaagaacactcacctggaggctcagctgcagaaagctgaggaggctggggctgagctgcaggcagatctcagggacatccaagaagagaaggaagaaattcaaaagaaactaagtgagtcacgtcaccagcaggaggcagccacgactcagctggagcagctacatcaggaggcaaagcgacaggaagaagtgcttgccagggcagtccaggagaaggaggccctagtacgagagaaagcggctctagaggtgcggctgcaggccgtggagcgtgaccggcaggacctcgctgaacaactacaggggctcagctcagccaaggagctactggagagcagtctgtttgaagcccaacaacaaaattctgtgatagaggtcaccaaggggcagctggaggtccagattcaaactgtcactcaagccaaggaagtaatccaaggggaagtgaggtgcctgaagctggaactggacactgaacggagtcaggcagagcaggagcgggatgctgcagccagacagctggcccaggctgagcaagaagggaagactgccttggagcagcagaaggcagcccatgagaaagaggtgaaccagctccgggagaaatgggagaaggagcgctcctggcaccagcaggagctggcaaaggctctggagagcttagaaagggaaaaaatggagctggaaatgaggctaaaggagcagcagacagaaatggaggccatccaggcccagagggaagaagaacggacccaggcagagagtgccctatgccagatgcagctggaaacagagaaggagagagtatccctcctggagacactgctgcagacgcagaaggagctagcagatgccagccaacaactggaacgactgaggcaggacatgaaagtccagaaattaaaggagcaggagaccactgggatactacagacccagctccaggaggctcaacgggagctgaaggaggcagcccggcagcacagagatgaccttgctgccctccaagaagagagcagctccctgctgcaggataagatggacctgcagaagcaggtggaggacttgaagtctcagctggtggcccaggatgactcccagaggctggtggagcaggaggttcaggagaagctgagagagacccaggagtataaccgaattcagaaggagctggagagagagaaagccagcctgactctgtcactgatggaaaaggaacagagactccttgttttacaagaagctgactctattcgacaacaagagctgagtgccctgcgccaggacatgcaggaggcccagggagaacagaaagagctcagtgctcagatggaattactaaggcaagaggtgaaggaaaaggaggctgactttctggcccaggaagcacagctgctggaggagctggaggcgtctcatatcacggagcagcagctgcgagcctccttgtgggcccaggaagccaaggcagcccaactacagctgcgactgcgcagcacagagagccagctagaagcgctggccgcagagcagcagcccgggaaccaggcccaggcccaggcccagctggccagcctctactctgccctgcagcaggccctggggtctgtttgtgagagcaggcctgagctgagtggtgggggagactctgctccttccgtctggggccttgagccagaccagaatggagctaggagcctctttaagagagggcccctgctgactgctctctccgctgaggcagtagcatctgccctccacaagcttcatcaagacctgtggaagactcaacagacccgggatgttctgagggatcaggtccagaaactggaagagcgtctaactgatactgaggctgagaagagccaggtccacacagagttgcaggatctgcagagacagctctcccagaatcaggaagagaaatccaagtgggaaggaaagcagaactccctagaatctgagctgatggaactacatgaaactatggcatccttacagagtcgcctgcggagagcagagctacagcgaatggaagcccagggtgagcgagagttacttcaggcagccaaggagaacctgacagcccaggtggaacacctgcaagcagctgtcgtagaagccagggctcaggcaagtgctgctggcatcctggaagaagacctgagaacggctcgctcagcactgaagctgaaaaatgaggaagtagagagtgagcgtgagagagcccaggctctgcaagagcagggcgaactgaaggtggcccaagggaaggctctgcaagagaatttggccctcctgacccagaccctagctgaaagagaagaggaggtggagactctgcggggacaaatccaggaactggagaagcaacgggaaatgcagaaggctgctttggaattgctgtctctggacctgaagaagaggaaccaagaggtagatctgcagcaagaacagattcaggagctagagaagtgtaggtctgttttagagcatctgcccatggccgtccaggagcgagagcagaagctgactgtgcagagggagcagatcagagagctcgagaaggatcgggagactcagaggaacgtcttggagcatcagcttctagaacttgagaagaaagaccaaatgattgagtcccagagaggacaggttcaggacctgaaaaagcagttggttactctggaatgcctggccctggaactggaggaaaaccatcacaagatggagtgccagcaaaaactgatcaaggagctggagggccagagggaaacccagagagtggctttgacccaccttacgctggacctagaagaaaggagccaggagctgcaggcacaaagcagccagatccatgacctggagagccacagcaccgttctggcaagagagctgcaggagagggaccaggaggtgaagtctcagcgagaacagatcgaggagctgcctccctctggacctattcagtcctcaagggtgccctgctaaaggctgggctgaaagctaagaggagaggtggcattcaatgtgtcctgtgtcctccctggggttgattaaggggtcgatgcccaatagagtccttcatcttggcgttcagcccagggtccagctgccaagggaaggcttggcaatcaagggtgatggagataagaatgaaaaggggcaccaccctgtgccaaagctggcatgttgtatatctgagagaggagctgcctattcacagtgtagggttgtcaagctggaggcagggagagaaaagcaagagctttttggttcctcttgaggatagaatctataggaaaatgtaagagggttaaaaataaatttcccatgcatccaaacttttttctttggtagactttcttgtcatctatttaaaatgaaacaagtgcatgtacgtggttaagacattttagctaggaatgatggtgcgtgcctgtagtcccagctacttgggaggctgaggcaggaggatcgcttgaacctggaaggtcaaggctgcagtgagccgagatcataccactgcactccagcctgagtgataaaagtgagaccctgtctca

SEQ ID NO: 356784 - DNA, 5065 bp, Homo sapiens
agcagcggctgccgcagctcaatcgcggagcaactagccgggcgtctgcgggagccgagcgtggtgaggttcacaggtggctgttggtctttagtaagggtgctgtcttccctgtctgatccttagcaaaagtaggaaggtagagttgttggcagaaatcctgggataagagaatagtttcctggaagatctgtgcctccaaccagcagagagggattgagcttcattgaactcaacagagccaacatttcatagcaccatgttcaagaggaggttgaagtggcatggcaatggttagagaccctgctgggcgtgaacaccctctggctacctagggacctgtgggcctaccacctggtgccctcatggagacaagaagccctgggttgaacaacatgaagccccagtcactgcagctggtactggaagagcaggtgctggcactacagcagcagatggcagagaatcaggcagcctcctggcggaagctgaagaactcccaggaggcccagcagagacaagcaacccttgtgaggaagctgcaggccaaggtgctgcagtaccgaagctggtgccaagagctggagaagcggctagaagccactggaggaccaatcccccagaggtgggaaaatgtggaggagccaaacctggatgagctgctggtccgattggaggaggagcaacagaggtgtgagagtctagcagaggtgaacacccagcttcgactgcacatggaaaaagctgacgtggtgaataaagcccttagggaagatgtggaaaaactgacagtggactggagccgggcccgggatgagctaatgaggaaggagagccagtggcagatggagcaggagttcttcaagggctacctgaaaggggagcacggtcgccttctcagtctatggcgggaggttgtgacattccgacgccacttcctggaaatgaagtcagctactgacagagatctgatggagctaaaagctgagcatgtgaggctttcagggtctctgttgacctgttgtctgcgcttgactgtgggagcacagtctcgggaacccaacggatctggaagaatggatgggcgggagccggcccagctgctgctgctactagccaagacccaggagctggagaaggaagcccatgaaaggagccaggagttaatacagctgaagagtcaaggggatctggagaaggctgaacttcaggaccgggtgaccgagctctctgctctgttgacccagtctcagaagcaaaatgaagattatgaaaagatgataaaggctctgagagagacagtggagatcctggagacaaatcacacagaattaatggaacatgaagcatctcttagtaggaatgcgcaagaggagaagttgtctttacagcaggtgatcaaggatataacccaggtcatggtggaagaaggggacaatatagcccaaggctctggtcatgagaactctttggaattggactctagtatcttctcccagtttgattaccaggatgcagacaaggctcttactctggtgcgttcagtgctgactcggagacgccaggctgtgcaggacctaaggcagcagcttgcaggctgtcaagaggctgtgaacttgttgcaacagcagcatgatcagtgggaggaagagggcaaagccttgagacagcggctgcagaagctcactggggagcgggacactctggcagggcagactgtggacctccagggagaggtggactctctcagcaaggagcgagagctgctgcagaaggccagggaagagctgcggcagcagctggaggtgctagagcaggaggcatggcgcctgcgaagggtaaatgtggagcttcagctgcagggggactctgcccagggccagaaggaggaacagcaggaggagctgcacctggctgtccgggagagggagcgtcttcaggagatgctgatgggcctggaagccaaacagtcagaatcactcagtgaactgatcactcttcgggaagccctggagtcaagtcacctggaaggggagttactgaggcaagagcaaacggaagtgaccgcagcgctggctagggcagagcagtcaattgcagagctgtcgagttctgaaaacaccctgaagacagaagtagctgatcttcgggctgcagctgtcaagctcagtgccttaaatgaggctttggcgttagataaagttgggctgaaccagcagcttctccagttagaggaggagaaccagtctgtgtgcagcagaatggaggccgcagagcaggcgagaaatgctttgcaggtcgacctggcggaggcagagaagaggagggaagccctgtgggaaaagaacactcacctggaggctcagctgcagaaagctgaggaggctggggctgagctgcaggcagatctcagggacatccaagaagagaaggaagaaattcaaaagaaactaagtgagtcacgtcaccagcaggaggcagccacgactcagctggagcagctacatcaggaggcaaagcgacaggaagaagtgcttgccagggcagtccaggagaaggaggccctagtacgagagaaagcggctctagaggtgcggctgcaggccgtggagcgtgaccggcaggacctcgctgaacaactacaggggctcagctcagccaaggagctactggagagcagtctgtttgaagcccaacaacaaaattctgtgatagaggtcaccaaggggcagctggaggtccagattcaaactgtcactcaagccaaggaagtaatccaaggggaagtgaggtgcctgaagctggaactggacactgaacggagtcaggcagagcaggagcgggatgctgcagccagacagctggcccaggctgagcaagaagggaagactgccttggagcagcagaaggcagcccatgagaaagaggtgaaccagctccgggagaaatgggagaaggagcgctcctggcaccagcaggagctggcaaaggctctggagagcttagaaagggaaaaaatggagctggaaatgaggctaaaggagcagcagacagaaatggaggccatccaggcccagagggaagaagaacggacccaggcagagagtgccctatgccagatgcagctggaaacagagaaggagagagtatccctcctggagacactgctgcagacgcagaaggagctagcagatgccagccaacaactggaacgactgaggcaggacatgaaagtccagaaattaaaggagcaggagaccactgggatactacagacccagctccaggaggctcaacgggagctgaaggaggcagcccggcagcacagagatgaccttgctgccctccaagaagagagcagctccctgctgcaggataagatggacctgcagaagcaggtggaggacttgaagtctcagctggtggcccaggatgactcccagaggctggtggagcaggaggttcaggagaagctgagagagacccaggagtataaccgaattcagaaggagctggagagagagaaagccagcctgactctgtcactgatggaaaaggaacagagactccttgttttacaagaagctgactctattcgacaacaagagctgagtgccctgcgccaggacatgcaggaggcccagggagaacagaaagagctcagtgctcagatggaattactaaggcaagaggtgaaggaaaaggaggctgactttctggcccaggaagcacagctgctggaggagctggaggcgtctcatatcacggagcagcagctgcgagcctccttgtgggcccaggaagccaaggcagcccaactacagctgcgactgcgcagcacagagagccagctagaagcgctggccgcagagcagcagcccgggaaccaggcccaggcccaggcccagctggccagcctctactctgccctgcagcaggccctggggtctgtttgtgagagcaggcctgagctgagtggtgggggagactctgctccttccgtctggggccttgagccagaccagaatggagctaggagcctctttaagagagggcccctgctgactgctctctccgctgaggcagtagcatctgccctccacaagcttcatcaagacctgtggaagactcaacagacccgggatgttctgagggatcaggtccagaaactggaagagcgtctaactgatactgaggctgagaagagccaggtccacacagagttgcaggatctgcagagacagctctcccagaatcaggaagagaaatccaagtgggaaggaaagcagaactccctagaatctgagctgatggaactacatgaaactatggcatccttacagagtcgcctgcggagagcagagctacagcgaatggaagcccagggtgagcgagagttacttcaggcagccaaggagaacctgacagcccaggtggaacacctgcaagcagctgtcgtagaagccagggctcaggcaagtgctgctggcatcctggaagaagacctgagaacggctcgctcagcactgaagctgaaaaatgaggaagtagagagtgagcgtgagagagcccaggctctgcaagagcagggcgaactgaaggtggcccaagggaaggctctgcaagagaatttggccctcctgacccagaccctagctgaaagagaagaggaggtggagactctgcggggacaaatccaggaactggagaagcaacgggaaatgcagaaggctgctttggaattgctgtctctggacctgaagaagaggaaccaagaggtagatctgcagcaagaacagattcaggagctagagaagtgtaggtctgttttagagcatctgcccatggccgtccaggagcgagagcagaagctgactgtgcagagggagcagatcagagagctcgagaaggatcgggagactcagaggaacgtcttggagcatcagcttctagaacttgaggaagctaggagacctgagcaagccaggagacctgagcaagccaggagacctgagcaagccaggagacctgagcaagccaggagacctgagcaagcggaactgag

SEQ ID NO: 356785 - DNA, 1456 bp, Homo sapiens
agcagcggctgccgcagctcaatcgcggagcaactagccgggcgtctgcgggagccgagcgtggtgaggttcacaggtggctgttggtctttagtaagggtgctgtcttccctgtctgatccttagcaaaagtaggaaggtagagttgttggcagaaatcctgggataagagaatagtttcctggaagatctgtgcctccaaccagcagagagggattgagcttcattgaactcaacagagccaacatttcatagcaccatgttcaagaggaggttgaagtggcatggcaatggttagagaccctgctgggcgtgaacaccctctggctacctagggacctgtgggcctaccacctggtgccctcatggagacaagaagccctgggttgaacaacatgaagccccagtcactgcagctggtactggaagagcaggtgctggcactacagcagcagatggcagagaatcaggcagcctcctggcggaagctgaagaactcccaggaggcccagcagagacaagcaacccttgtgaggaagctgcaggccaaggtgctgcagtaccgaagctggtgccaagagctggagaagcggctagaagccactggaggaccaatcccccagaggtgggaaaatgtggaggagccaaacctggatgagctgctggtccgattggaggaggagcaacagaggtgtgagagtctagcagaggtgaacacccagcttcgactgcacatggaaaaagctgacgtggtgaataaagcccttagggaagatgtggaaaaactgacagtggactggagccgggcccgggatgagctaatgaggaaggagagccagtggcagatggagcaggagttcttcaagggctacctgaaaggggagcacggtcgccttctcagtctatggcgggaggttgtgacattccgacgccacttcctggaaatgaagtcagctactgacagagatctgatggagctaaaagctgagcatgtgaggctttcagggtctctgttgacctgttgtctgcgcttgactgtgggagcacagtctcgggaacccaacggatctggaagaatggatgggcgggagccggcccagctgctgctgctactagccaagacccaggagctggagaaggaagcccatgaaaggagccaggagttaatacagctgaagagtcaaggggatctggagaaggctgaacttcaggaccgggtgaccgagctctctgctctgttgacccagtctcagaagcaaaatgaagattatgaaaagatgataaaggctctgagagagacagtggagatcctggtacatgatcctttgctctggaaaggagttgggcgtgggcttgtaggttccttgtgctttatggacagatagtgcaggataccagttacatattccatgatgaaatcctctaaagctaaaaaataaattttggctgaatctga

SEQ ID NO: 356786 - DNA, 452 bp, Homo sapiens
gacgaaatctggaagccacctggctttccctcttccatttcctgcctgactctatggtcttaactacaaatccatgaatacgtaaaagaactgcggaataggaggaagcctttgcagttacttcccttgcccttcatttccagctgaggaacatgaagcctacagagaggtgactccccaagctgctgtcacccaatgccagttctgtcaccactacactgtggcttcttcagctctaacagtgatagcattggtaatatctttttggaaagacaattcaaagaatatgggaggaaaaaaatgatggtgagtatgagagtttacagaaagagaagttttggactagaagattaagcagtggcttcttagaagagaaagaacttgagtagggccagaagtgttctgcctttgaagaggaatacggttcaacttttcatcaaagcccatgagat

SEQ ID NO: 356787 - DNA, 340 bp, Homo sapiens
gccacaataagggacatgaattttactccaacataatactcaacagcaagaattgacacattatttttctaaatcaagttatatccaactccaagatttcacttaccagttggcaaggaattaaatcttagttattagtgaggctgtctccctaagctacaagattggtcaaaggtcccaggggtcttatgcaatatggaacgcttggggaggccccgctaaaccaccctggctgatgctaagatgtcaacaaccgtggactagatgggcctctgaaacccagtgaccctgttgcttccatttcaaaattggacacaaaacaataaaaatgataatgata

SEQ ID NO: 356788 - DNA, 290 bp, Homo sapiens
ttgagggaccgtggggggtggcaccagagcccagggcacctgagggcctctctggatgcagctgctagcggtcataggacagcaaacactattcattggattctgacttaggcaggcaccctgccgagtgccttaaaggtgtaatctccgttactcttcacagtacattaaaaaaatagttggccgggtgcagtggctcatgcctgtaatcccagcactttgggaggcaaaggcaggcagatcacgaggtcagtagatcgagaccatcctggccaacatggtgaaatccc

SEQ ID NO: 356789 - DNA, 563 bp, Homo sapiens
gtttcctgctggctgagcgattcctgccaagagcttcaaagaagagggattattttatgcagttatggggtcacttctcccattgctgtctttgggaggcctggtaggttaaggaacagaagacattttgagagacgcttggtgccaatgaagtggctgaagaaatgtctggatacaggttttccaatttaccatttgtgtctggggatagtgggaggcagtcccatctatggcttggggaggctgtagccattcctcctctttcccttctaagagtgagaaacccatccatggccttctctagtcaatacagtggcctggtatgaattagacaaaggaatcccctttgggaggatacagccctatgccaggatgtatggcatggtgagcagaatgcaggctttcacttgcttctttggctaggtgtctttgtgcagcccccaaacacacaatgaacagtgactctgaatctgtcactttattttatatatatacatttttaaattttttatttgatttaatttattttttttgacagagtgagactttgtctcaaaaaaaaa

SEQ ID NO: 356790 - DNA, 721 bp, Homo sapiens
  misc_feature (721)..(721): n is a, c, g, or t
tgatctaaggccaccctctcggggagggagttggggaagctgggttggctgggttggtagctcctacctactgtgtggcaagaaggtatgggtcatgaacagaaccaaggagctgcgctgctacagatgttaccacttctgtggctgctaccccactcctgggccgtccctgaagctcctactccaatgtggccagatgacctgcaaaaccacacattcctgcacacagtgtactgccaggatgggagtcccagtgtgggactctctgaggcctacgacgaggaccagctttcctttttgccctttttcccgaacctatttcccagaaacaactttccgggggggttagccttcgcactgggccccggaaaatttttgtgggccctttggggaacctttgggggggcttccaaggggagaaccaaagggggaaacggaaatggctttccccatgggcaccattttgattttgaacaagagagttactggcgaagtgggattgaatccatgcaagatagggagggcagaacagaactgtgaacttcgggggacaacacaacttcgcctccggaggcttgtgttccgcccaaatggggaaaaaaggcgagggggagtttatttatacccccactttaaattttccggggactttggaacacaggtgtggtttatgccaaaccgcgggcccttggggaaaaaaggggcacccacccaccttttn

SEQ ID NO: 356791 - DNA, 1752 bp, Homo sapiens
tgatctaaggccaccctctcggggagggagttggggaagctgggttggctgggttggtagctcctacctactgtgtggcaagaaggtatgggtcatgaacagaaccaaggagctgcgctgctacagatgttaccacttctgtggctgctaccccactcctgggccgtccctgaagctcctactccaatgtggccagatgacctgcaaaaccacacattcctgcacacagtgtactgccaggatgggagtcccagtgtgggactctctgaggcctacgacgaggaccagcttttcttcttcgacttttcccagaacactcgggtgcctcgcctgcccgaatttgctgactgggctcaggaacagggagatgctcctgccattttatttgacaaagagttctgcgagtggatgatccagcaaatagggccaaaacttgatgggaaaatcccggtgtccagaggtcaggagttttctggggagtgaagggaggagggctgcattaacctcattgatctgtacactgaataattccccttgataccagctccccatctcaaatactttctggttctcttcatcaccttaatttttccaccagccttggtctgcaccctgtgttcttttggtgggccgaagtacctagcatgtagtaggcattcagaactatgtattgaatgtgatgaattcaacaggtaccaactgatacctactgaatattaacacttgtgctactatgcccagcaagatggatgggaagagtggaaatatctgatgacgtgactatgtcttagtgagaagacagtgcatggttagacatcaatgtgagctctagacaggaagtgctgaaggaagtcatggtggaggggtccagagtagcctggatctggctctgcttctacgtctagctgcagtccttgcctggaagaagacctcccttcagagcccagctcctcgctcatctctgtctcccaaagcctgacccactgtgttcttctctgccctcccctccatatgccatggcccctccaaacacagagataccatctaaactagtctctttttccccctacacttcaatccccccaccaggtttcctatcgctgaagtgttcacgctgaagcccctggagtttggcaagcccaacactttggtctgtttgtcagtaatctcttcccacccatgctgacagtgaactggcagcatcattccgtccctgtggaaggatttgggcctacttttgtctcagctgtcgatggactcagcttccaggccttttcttacttaaacttcacaccagaaccttctgacattttctcctgcattgtgactcacgaaattgaccgctacacagcaattgcctattgggtaccccggaacgcactgccctcagatctgctggagaatgtgctgtgtggcgtggcctttggcctgggtgtgctgggcatcatcgtgggcattgttctcatcatctacttccggaagccttgctcaggtgactgattcttccagaccagagtttgatgccagcagcttcggccatccaaacagaggatgctcagatttctcacatcctgcccaggatctcctcttagggtagaagaagtctctgggacatccctggggtgtgtgtgtagatttcccacctggggactctgctgtccctgggcttgcatcccagggatcccagagtggcctgcctatcacaaccacatcccttccccccacaaggcaataaatctcatttctttatat

SEQ ID NO: 356792 - DNA, 1391 bp, Homo sapiens
  misc_feature (1233)..(1233): n is a, c, g, or t
tgatctaaggccaccctctcggggagggagttggggaagctgggttggctgggttggtagctcctacctactgtgtggcaagaaggtatgggtcatgaacagaaccaaggagctgcgctgctacagatgttaccacttctgtggctgctaccccactcctgggccgtccctgaagctcctactccaatgtggccagatgacctgcaaaaccacacattcctgcacacagtgtactgccaggatgggagtcccagtgtgggactctctgaggcctacgacgaggaccagcttttcttcttcgacttttcccagaacactcgggtgcctcgcctgcccgaatttgctgactgggctcaggaacagggagatgctcctgccattttatttgacaaagagttctgcgagtggatgatccagcaaatagggccaaaacttgatgggaaaatcccggtgtccagagggtttcctatcgctgaagtgttcacgctgaagcccctggagtttggcaagcccaacactttggtctgtttgtcagtaatctcttcccacccatgctgacagtgaactggcagcatcattccgtccctgtggaaggatttgggcctacttttgtctcagctgtcgatggactcagcttccaggccttttcttacttaaacttcacaccagaaccttctgacattttctcctgcattgtgactcacgaaattgaccgctacacagcaattgcctattgggtaccccggaacgcactgccctcagatctgctggagaatgtgctgtgtggcgtggcctttggcctgggtgtgctgggcatcatcgtgggcattgttctcatcatctacttccggaagccttgctcaggtgactgattcttccagaccagagtttgatgccagcagcttcggccatccaaacagaggatgctcagatttctcacatcctgcccaggatctcctcttagggtagaagaagtctctgggacatccctggggtgtgtgtgtagatttcccacctggggactctgctgtccctgggcttgcatcccagggatcccagagtggcctgcctatcacaaccacatcccttccccccacaaggcaataaatctcatttctttatataagaaataaccaagatggccaacaggctttttctttcttacttcttcttagcaataacagtcaataaacggctggcaaaaaagttactaatttaaatttgcacggtgtncaaagaacctcatccctctaagaagctcccgaatatgccaatagatccggccactacggacaggagggcagagtaccaaggactctatttatataagagactacaagggaagtggaagtaatatgtgggtggtaaaatcccggtgcaggtggtgagcg

SEQ ID NO: 356793 - DNA, 1280 bp, Homo sapiens
tgatctaaggccaccctctcggggagggagttggggaagctgggttggctgggttggtagctcctacctactgtgtggcaagaaggtatgggtcatgaacagaaccaaggagctgcgctgctacagatgttaccacttctgtggctgctaccccactcctgggccgtccctgaagctcctactccaatgtggccagatgacctgcaaaaccacacattcctgcacacagtgtactgccaggatgggagtcccagtgtgggactctctgaggcctacgacgaggaccagcttttcttcttcgacttttcccagaacactcgggtgcctcgcctgcccgaatttgctgactgggctcaggaacagggagatgctcctgccattttatttgacaaagagttctgcgagtggatgatccagcaaatagggccaaaacttgatgggaaaatcccggtgtccagaggtcaggagttttctggggagtgaagggaggagggctgcattaacctcattgatctgtacactgaataattcccctccatatgccatggcccctccaaacacagagataccatctaaactagtctctttttccccctacacttcaatccccccaccaggtttcctatcgctgaagtgttcacgctgaagcccctggagtttggcaagcccaacactttggtctgtttgtcagtaatctcttcccacccatgctgacagtgaactggcagcatcattccgtccctgtggaaggatttgggcctacttttgtctcagctgtcgatggactcagcttccaggccttttcttacttaaacttcacaccagaaccttctgacattttctcctgcattgtgactcacgaaattgaccgctacacagcaattgcctattgggtaccccggaacgcactgccctcagatctgctggagaatgtgctgtgtggcgtggcctttggcctgggtgtgctgggcatcatcgtgggcattgttctcatcatctacttccggaagccttgctcaggtgactgattcttccagaccagagtttgatgccagcagcttcggccatccaaacagaggatgctcagatttctcacatcctgcccaggatctcctcttagggtagaagaagtctctgggacatccctggggtgtgtgtgtagatttcccacctggggactctgctgtccctgggcttgcatcccagggatcccagagtggcctgcctatcacaaccacatcccttccccccacaaggcaataaatctcatttctttatat

SEQ ID NO: 356794 - DNA, 1665 bp, Homo sapiens
agccactgcgcctagccccaccttgctgttttttaagttggaggagaaggctcccacctccctgaacctcaccctgtgtcctttgcagctcctactccaatgtggccagatgacctgcaaaaccacacattcctgcacacagtgtactgccaggatgggagtcccagtgtgggactctctgaggcctacgacgaggaccagcttttcttcttcgacttttcccagaacactcgggtgcctcgcctgcccgaatttgctgactgggctcaggaacagggagatgctcctgccattttatttgacaaagagttctgcgagtggatgatccagcaaatagggccaaaacttgatgggaaaatcccggtgtccagaggtcaggagttttctggggagtgaagggaggagggctgcattaacctcattgatctgtacactgaataattccccttgataccagctccccatctcaaatactttctggttctcttcatcaccttaatttttccaccagccttggtctgcaccctgtgttcttttggtgggccgaagtacctagcatgtagtaggcattcagaactatgtattgaatgtgatgaattcaacaggtaccaactgatacctactgaatattaacacttgtgctactatgcccagcaagatggatgggaagagtggaaatatctgatgacgtgactatgtcttagtgagaagacagtgcatggttagacatcaatgtgagctctagacaggaagtgctgaaggaagtcatggtggaggggtccagagtagcctggatctggctctgcttctacgtctagctgcagtccttgcctggaagaagacctcccttcagagcccagctcctcgctcatctctgtctcccaaagcctgacccactgtgttcttctctgccctcccctccatatgccatggcccctccaaacacagagataccatctaaactagtctctttttccccctacacttcaatccccccaccaggtttcctatcgctgaagtgttcacgctgaagcccctggagtttggcaagcccaacactttggtctgtttgtcagtaatctcttcccacccatgctgacagtgaactggcagcatcattccgtccctgtggaaggatttgggcctacttttgtctcagctgtcgatggactcagcttccaggccttttcttacttaaacttcacaccagaaccttctgacattttctcctgcattgtgactcacgaaattgaccgctacacagcaattgcctattgggtaccccggaacgcactgccctcagatctgctggagaatgtgctgtgtggcgtggcctttggcctgggtgtgctgggcatcatcgtgggcattgttctcatcatctacttccggaagccttgctcaggtgactgattcttccagaccagagtttgatgccagcagcttcggccatccaaacagaggatgctcagatttctcacatcctgcccaggatctcctcttagggtagaagaagtctctgggacatccctggggtgtgtgtgtagatttcccacctggggactctgctgtccctgggcttgcatcccagggatcccagagtggcctgcctatcacaaccacatcccttccccccacaaggcaataaatctcatttctttatat

SEQ ID NO: 356795 - DNA, 1070 bp, Homo sapiens
tgatctaaggccaccctctcggggagggagttggggaagctgggttggctgggttggtagctcctacctactgtgtggcaagaaggtatgggtcatgaacagaaccaaggagctgcgctgctacagatgttaccacttctgtggctgctaccccactcctgggccgtccctgaagctcctactccaatgtggccagatgacctgcaaaaccacacattcctgcacacagtgtactgccaggatgggagtcccagtgtgggactctctgaggcctacgacgaggaccagcttttcttcttcgacttttcccagaacactcgggtgcctcgcctgcccgaatttgctgactgggctcaggaacagggagatgctcctgccattttatttgacaaagagttctgcgagtggatgatccagcaaatagggccaaaacttgatgggctggagtttggcaagcccaacactttggtctgtttgtcagtaatctcttcccacccatgctgacagtgaactggcagcatcattccgtccctgtggaaggatttgggcctacttttgtctcagctgtcgatggactcagcttccaggccttttcttacttaaacttcacaccagaaccttctgacattttctcctgcattgtgactcacgaaattgaccgctacacagcaattgcctattgggtaccccggaacgcactgccctcagatctgctggagaatgtgctgtgtggcgtggcctttggcctgggtgtgctgggcatcatcgtgggcattgttctcatcatctacttccggaagccttgctcaggtgactgattcttccagaccagagtttgatgccagcagcttcggccatccaaacagaggatgctcagatttctcacatcctgcccaggatctcctcttagggtagaagaagtctctgggacatccctggggtgtgtgtgtagatttcccacctggggactctgctgtccctgggcttgcatcccagggatcccagagtggcctgcctatcacaaccacatcccttccccccacaaggcaataaatctcatttctttatat

SEQ ID NO: 356796 - DNA, 1128 bp, Homo sapiens
  misc_feature (92)..(92): n is a, c, g, or t
agagacttatctaggtactcgattcgtattggtcgcgcgggagtcgcagtagaggtaaagtggaagcatgggtcagtatgctcgattggccntacgagatgacttccgtggtcagttgactacgatgctctggattctcaccagtaaaacaatcagcccgagaggtaaaccagaagtcgtattctgacacaaatttccacgattgcggatggttctagagggtgctattactggagtctagtcaatcaggagtccgaagcgtagtctcgatatctaaattagcggccccgaggctttcttcttcgacttttcccagaacactcgggtgcctcgcctgcccgaatttgctgactgggctcaggaacagggagatgctcctgccattttatttgacaaagagttctgcgagtggatgatccagcaaatagggccaaaacttgatgggaaaatcccggtgtccagagggtttcctatcgctgaagtgttcacgctgaagcccctggagtttggcaagcccaacactttggtctgtttgtcagtaatctcttcccacccatgctgacagtgaactggcagcatcattccgtccctgtggaaggatttgggcctacttttgtctcagctgtcgatggactcagcttccaggccttttcttacttaaacttcacaccagaaccttctgacattttctcctgcattgtgactcacgaaattgaccgctacacagcaattgcctattgggtaccccggaacgcactgccctcagatctgctggagaatgtgctgtgtggcgtggcctttggcctgggtgtgctgggcatcatcgtgggcattgttctcatcatctacttccggaagccttgctcaggtgactgattcttccagaccagagtttgatgccagcagcttcggccatccaaacagaggatgctcagatttctcacatcctgcccaggatctcctcttagggtagaagaagtctctgggacatccctggggtgtgtgtgtagatttcccacctggggactctgctgtccctgggcttgcatcccagggatcccagagtggcctgcctatcacaaccacatcccttccccccacaaggcaataaatctcatttctttatat

SEQ ID NO: 356797 - DNA, 960 bp, Homo sapiens
cgcgccgggtgctgacctcctgcctcagcgccccctcccccactacccgcggctagcggggtagcctcgggtggccaggcttgtttcctcctcggtgggtgtaaggtgcggcttcgctggtcctggcctgaatccagcggaagcgcacgctgctgagctgtcagcggaggaaaatggggcctggacctggagatatgagggtctggagagaggggccccttccctggtgtcgtgtggtgcgaccactggagagggagtttctcgccctcgtcgcgcctgccgcgcggagagataagggtttcctatcgctgaagtgttcacgctgaagcccctggagtttggcaagcccaacactttggtctgtttgtcagtaatctcttcccacccatgctgacagtgaactggcagcatcattccgtccctgtggaaggatttgggcctacttttgtctcagctgtcgatggactcagcttccaggccttttcttacttaaacttcacaccagaaccttctgacattttctcctgcattgtgactcacgaaattgaccgctacacagcaattgcctattgggtaccccggaacgcactgccctcagatctgctggagaatgtgctgtgtggcgtggcctttggcctgggtgtgctgggcatcatcgtgggcattgttctcatcatctacttccggaagccttgctcaggtgactgattcttccagaccagagtttgatgccagcagcttcggccatccaaacagaggatgctcagatttctcacatcctgcccaggatctcctcttagggtagaagaagtctctgggacatccctggggtgtgtgtgtagatttcccacctggggactctgctgtccctgggcttgcatcccagggatcccagagtggcctgcctatcacaaccacatcccttccccccacaaggcaataaatctcatttctttatat

SEQ ID NO: 356798 - DNA, 793 bp, Homo sapiens
tgatctaaggccaccctctcggggagggagttggggaagctgggttggctgggttggtagctcctacctactgtgtggcaagaaggtatgggtcatgaacagaaccaaggagctgcgctgctacagatgttaccacttctgtggctgctaccccactcctgggccgtccctgaagctcctactccaatgtggccagatgacctgcaaaaccacacattcctgcacacagttgaactggcagcatcattccgtccctgtggaaggatttgggcctacttttgtctcagctgtcgatggactcagcttccaggccttttcttacttaaacttcacaccagaaccttctgacattttctcctgcattgtgactcacgaaattgaccgctacacagcaattgcctattgggtaccccggaacgcactgccctcagatctgctggagaatgtgctgtgtggcgtggcctttggcctgggtgtgctgggcatcatcgtgggcattgttctcatcatctacttccggaagccttgctcaggtgactgattcttccagaccagagtttgatgccagcagcttcggccatccaaacagaggatgctcagatttctcacatcctgcccaggatctcctcttagggtagaagaagtctctgggacatccctggggtgtgtgtgtagatttcccacctggggactctgctgtccctgggcttgcatcccagggatcccagagtggcctgcctatcacaaccacatcccttccccccacaaggcaataaatctcatttctttatat

SEQ ID NO: 356799 - DNA, 815 bp, Homo sapiens
tgatctaaggccaccctctcggggagggagttggggaagctgggttggctgggttggtagctcctacctactgtgtggcaagaaggtatgggtcatgaacagaaccaaggagctgcgctgctacagatgttaccacttctgtggctgctaccccactcctgggccgtccctgaagctcctactccaatgtggccagatgacctgcaaaaccacacattcctgcacacagtgtactgccaggatgggagtcccagtgtgggactctctgaggcctacgacgaggaccagcttttcttcttcgacttttcccagaacactcgggtgcctcgcctgcccgaatttgctgactgggctcaggaacagggagatgctcctgccattttatttgacaaagagttctgcgagtggatgatccagcaaatagggccaaaacttgatgggaaaatcccggtgtccagagggtttcctatcgctgaagtgttcacgctgaagcccctggagtttggcaagcccaacactttggtctgtttgtcagtaatctcttcccacccatgctgacagtgaactggcagcatcattccgtccctgtggaaggatttgggcctacttttgtctcagctgtcgatggactcagcttccaggccttttcttacttaaacttcacaccagaaccttctgacattttctcctgcattgtgactcacgaaattgaccgctacacagcaattgcctattgggtaaccccggaacgcaccggccctcattccggtttattcaaatgggggttacccgaagctcgaattccgtatccatgg

SEQ ID NO: 356800 - DNA, 467 bp, Homo sapiens
  misc_feature (18)..(18): n is a, c, g, or t
ttagtgtgaggtgcctanaggatccgatcacgtgcattgtgactcacgaaattgaccgctacacagcaattgcctattgggtaccccggaacgcactgccctcagatctgctggagaatgtgctgtgtggcgtggcctttggcctgggtgtgctgggcatcatcgtgggcattgttctcatcatctacttccggaagccttgctcaggtgactgattcttccagaccagagtttgatgccagcagcttcggccatccaaacagaggatgctcagatttctcacatcctgcccaggatctcctcttagggtagaagaagtctctgggacatccctggggtgtgtgtgtagatttcccacctggggactctgctgtccctgggcttgcatcccagggatcccagagtggcctgcctatcacaaccacatcccttccccccacaaggcaataaatctcatttctttatat

SEQ ID NO: 356801 - DNA, 259 bp, Homo sapiens
tgatctaaggccaccctctcggggagggagttggggaagctgggttggctgggttggtagctcctacctactgtgtggcaagaaggtatgggtcatgaacagaaccaaggagctgcgctgctacagatgttaccacttctgtggctgctaccccactcctgggccgtccctgaagctcctactccaatgtggccagatgacctgcaaaaccacacattcctgcacacagtgcgaaggggatcctcatagagtcggccag

SEQ ID NO: 356802 - DNA, 1124 bp, Homo sapiens
tgatctaaggccaccctctcggggagggagttggggaagctgggttggctgggttggtagctcctacctactgtgtggcaagaaggtatgggtcatgaacagaaccaaggagctgcgctgctacagatgttaccacttctgtggctgctaccccactcctgggccgtccctgaagctcctactccaatgtggccagatgacctgcaaaaccacacattcctgcacacagtgtactgccaggatgggagtcccagtgtgggactctctgaggcctacgacgaggaccagcttttcttcttcgacttttcccagaacactcgggtgcctcgcctgcccgaatttgctgactgggctcaggaacagggagatgctcctgccattttatttgacaaagagttctgcgagtggatgatccagcaaatagggccaaaacttgatgggaaaatcccggtgtccagagggtttcctatcgctgaagtgttcacgctgaagcccctggagtttggcaagcccaacactttggtctgtttgtcagtaatctcttcccacccatgctgacagtgaactggcagcatcattccgtccctgtggaaggatttgggcctacttttgtctcagctgtcgatggactcagcttccaggccttttcttacttaaacttcacaccagaaccttctgacattttctcctgcattgtgactcacgaaattgaccgctacacagcaattgcctattgggtaccccggaacgcactgccctcagatctgctggagaatgtgctgtgtggcgtggcctttggcctgggtgtgctgggcatcatcgtgggcattgttctcatcatctacttccggaagccttgctcaggtgactgattcttccagaccagagtttgatgccagcagcttcggccatccaaacagaggatgctcagatttctcacatcctgcccaggatctcctcttagggtagaagaagtctctgggacatccctggggtgtgtgtgtagatttcccacctggggactctgctgtccctgggcttgcatcccagggatcccagagtggcctgcctatcacaaccacatcccttccccccacaaggcaataaatctcatttctttatat

SEQ ID NO: 356803 - DNA, 1699 bp, Homo sapiens
tgatctaaggccaccctctcggggagggagttggggaagctgggttggctgggttggtagctcctacctactgtgtggcaagaaggtatgggtcatgaacagaaccaaggagctgcgctgctacagatgttaccacttctgtggctgctaccccactcctgggccgtccctgaagctcctactccaatgtggccagatgactgtgggactctctgaggcctacgacgaggaccagcttttcttcttcgacttttcccagaacactcgggtgcctcgcctgcccgaatttgctgactgggctcaggaacagggagatgctcctgccattttatttgacaaagagttctgcgagtggatgatccagcaaatagggccaaaacttgatgggaaaatcccggtgtccagaggtcaggagttttctggggagtgaagggaggagggctgcattaacctcattgatctgtacactgaataattccccttgataccagctccccatctcaaatactttctggttctcttcatcaccttaatttttccaccagccttggtctgcaccctgtgttcttttggtgggccgaagtacctagcatgtagtaggcattcagaactatgtattgaatgtgatgaattcaacaggtaccaactgatacctactgaatattaacacttgtgctactatgcccagcaagatggatgggaagagtggaaatatctgatgacgtgactatgtcttagtgagaagacagtgcatggttagacatcaatgtgagctctagacaggaagtgctgaaggaagtcatggtggaggggtccagagtagcctggatctggctctgcttctacgtctagctgcagtccttgcctggaagaagacctcccttcagagcccagctcctcgctcatctctgtctcccaaagcctgacccactgtgttcttctctgccctcccctccatatgccatggcccctccaaacacagagataccatctaaactagtctctttttccccctacacttcaatccccccaccaggtttcctatcgctgaagtgttcacgctgaagcccctggagtttggcaagcccaacactttggtctgtttgtcagtaatctcttcccacccatgctgacagtgaactggcagcatcattccgtccctgtggaaggatttgggcctacttttgtctcagctgtcgatggactcagcttccaggccttttcttacttaaacttcacaccagaaccttctgacattttctcctgcattgtgactcacgaaattgaccgctacacagcaattgcctattgggtaccccggaacgcactgccctcagatctgctggagaatgtgctgtgtggcgtggcctttggcctgggtgtgctgggcatcatcgtgggcattgttctcatcatctacttccggaagccttgctcaggtgactgattcttccagaccagagtttgatgccagcagcttcggccatccaaacagaggatgctcagatttctcacatcctgcccaggatctcctcttagggtagaagaagtctctgggacatccctggggtgtgtgtgtagatttcccacctggggactctgctgtccctgggcttgcatcccagggatcccagagtggcctgcctatcacaaccacatcccttccccccacaaggcaataaatctcatttctttatat

SEQ ID NO: 356804 - DNA, 1127 bp, Homo sapiens
gtttcctgctggctgagcgattcctgccaagagcttcaaagaagagggattattttatgcagttatggggtcacttctcccattgctgtctttgggaggcctggtaggttaaggaacagaagacattttgagagacgcttggtgccaatgaagtggctgaagaaatgtctggatacagctcctactccaatgtggccagatgacctgcaaaaccacacattcctgcacacagtgtactgccaggatgggagtcccagtgtgggactctctgaggcctacgacgaggaccagcttttcttcttcgacttttcccagaacactcgggtgcctcgcctgcccgaatttgctgactgggctcaggaacagggagatgctcctgccattttatttgacaaagagttctgcgagtggatgatccagcaaatagggccaaaacttgatgggaaaatcccggtgtccagagggtttcctatcgctgaagtgttcacgctgaagcccctggagtttggcaagcccaacactttggtctgtttgtcagtaatctcttcccacccatgctgacagtgaactggcagcatcattccgtccctgtggaaggatttgggcctacttttgtctcagctgtcgatggactcagcttccaggccttttcttacttaaacttcacaccagaaccttctgacattttctcctgcattgtgactcacgaaattgaccgctacacagcaattgcctattgggtaccccggaacgcactgccctcagatctgctggagaatgtgctgtgtggcgtggcctttggcctgggtgtgctgggcatcatcgtgggcattgttctcatcatctacttccggaagccttgctcaggtgactgattcttccagaccagagtttgatgccagcagcttcggccatccaaacagaggatgctcagatttctcacatcctgcccaggatctcctcttagggtagaagaagtctctgggacatccctggggtgtgtgtgtagatttcccacctggggactctgctgtccctgggcttgcatcccagggatcccagagtggcctgcctatcacaaccacatcccttccccccacaaggcaataaatctcatttctttatat

SEQ ID NO: 356805 - DNA, 1042 bp, Homo sapiens
ttgactgacatctccgccccacaagggccccttctcacctggatcctaaagccttccagggggcctccaaagttgccctcggcttggtacgggctcctactccaatgtggccagatgacctgcaaaaccacacattcctgcacacagtgtactgccaggatgggagtcccagtgtgggactctctgaggcctacgacgaggaccagcttttcttcttcgacttttcccagaacactcgggtgcctcgcctgcccgaatttgctgactgggctcaggaacagggagatgctcctgccattttatttgacaaagagttctgcgagtggatgatccagcaaatagggccaaaacttgatgggaaaatcccggtgtccagagggtttcctatcgctgaagtgttcacgctgaagcccctggagtttggcaagcccaacactttggtctgtttgtcagtaatctcttcccacccatgctgacagtgaactggcagcatcattccgtccctgtggaaggatttgggcctacttttgtctcagctgtcgatggactcagcttccaggccttttcttacttaaacttcacaccagaaccttctgacattttctcctgcattgtgactcacgaaattgaccgctacacagcaattgcctattgggtaccccggaacgcactgccctcagatctgctggagaatgtgctgtgtggcgtggcctttggcctgggtgtgctgggcatcatcgtgggcattgttctcatcatctacttccggaagccttgctcaggtgactgattcttccagaccagagtttgatgccagcagcttcggccatccaaacagaggatgctcagatttctcacatcctgcccaggatctcctcttagggtagaagaagtctctgggacatccctggggtgtgtgtgtagatttcccacctggggactctgctgtccctgggcttgcatcccagggatcccagagtggcctgcctatcacaaccacatcccttccccccacaaggcaataaatctcatttctttatat

SEQ ID NO: 356806 - DNA, 987 bp, Homo sapiens
tgatctaaggccaccctctcggggagggagttggggaagctgggttggctgggttggtagctcctacctactgtgtggcaagaaggtatgggtcatgaacagaaccaaggagctgcgctgctacagatgttaccacttctgtggctgctaccccactcctgggccgtccctgaagaacactcgggtgcctcgcctgcccgaatttgctgactgggctcaggaacagggagatgctcctgccattttatttgacaaagagttctgcgagtggatgatccagcaaatagggccaaaacttgatgggaaaatcccggtgtccagagggtttcctatcgctgaagtgttcacgctgaagcccctggagtttggcaagcccaacactttggtctgtttgtcagtaatctcttcccacccatgctgacagtgaactggcagcatcattccgtccctgtggaaggatttgggcctacttttgtctcagctgtcgatggactcagcttccaggccttttcttacttaaacttcacaccagaaccttctgacattttctcctgcattgtgactcacgaaattgaccgctacacagcaattgcctattgggtaccccggaacgcactgccctcagatctgctggagaatgtgctgtgtggcgtggcctttggcctgggtgtgctgggcatcatcgtgggcattgttctcatcatctacttccggaagccttgctcaggtgactgattcttccagaccagagtttgatgccagcagcttcggccatccaaacagaggatgctcagatttctcacatcctgcccaggatctcctcttagggtagaagaagtctctgggacatccctggggtgtgtgtgtagatttcccacctggggactctgctgtccctgggcttgcatcccagggatcccagagtggcctgcctatcacaaccacatcccttccccccacaaggcaataaatctcatttctttatat

SEQ ID NO: 356807 - DNA, 1023 bp, Homo sapiens
tgatctaaggccaccctctcggggagggagttggggaagctgggttggctgggttggtagctcctacctactgtgtggcaagaaggtatgggtcatgaacagaaccaaggagctgcgctgctacagatgttaccacttctgtggctgctaccccactcctgggccgtccctgaagctcctactccaatgtggccagatgacctgcaaaaccacacattcctgcacacagtgtactgccaggatgggagtcccagtgtgggactctctgaggcctacgacgaggaccagcttttcttcttcgacttttcccagaacactcgggtgcctcgcctgcccgaatttgctgactgggctcaggaacagggagatgctcctgccattttatttgacaaagagttctgcgagtggatgatccagcaaatagggccaaaacttgatgggaaaatcccggtgtccagagtgaactggcagcatcattccgtccctgtggaaggatttgggcctacttttgtctcagctgtcgatggactcagcttccaggccttttcttacttaaacttcacaccagaaccttctgacattttctcctgcattgtgactcacgaaattgaccgctacacagcaattgcctattgggtaccccggaacgcactgccctcagatctgctggagaatgtgctgtgtggcgtggcctttggcctgggtgtgctgggcatcatcgtgggcattgttctcatcatctacttccggaagccttgctcaggtgactgattcttccagaccagagtttgatgccagcagcttcggccatccaaacagaggatgctcagatttctcacatcctgcccaggatctcctcttagggtagaagaagtctctgggacatccctggggtgtgtgtgtagatttcccacctggggactctgctgtccctgggcttgcatcccagggatcccagagtggcctgcctatcacaaccacatcccttccccccacaaggcaataaatctcatttctttatat

SEQ ID NO: 356808 - DNA, 839 bp, Homo sapiens
tgatctaaggccaccctctcggggagggagttggggaagctgggttggctgggttggtagctcctacctactgtgtggcaagaaggtatgggtcatgaacagaaccaaggagctgcgctgctacagatgttaccacttctgtggctgctaccccactcctgggccgtccctgaagggtttcctatcgctgaagtgttcacgctgaagcccctggagtttggcaagcccaacactttggtctgtttgtcagtaatctcttcccacccatgctgacagtgaactggcagcatcattccgtccctgtggaaggatttgggcctacttttgtctcagctgtcgatggactcagcttccaggccttttcttacttaaacttcacaccagaaccttctgacattttctcctgcattgtgactcacgaaattgaccgctacacagcaattgcctattgggtaccccggaacgcactgccctcagatctgctggagaatgtgctgtgtggcgtggcctttggcctgggtgtgctgggcatcatcgtgggcattgttctcatcatctacttccggaagccttgctcaggtgactgattcttccagaccagagtttgatgccagcagcttcggccatccaaacagaggatgctcagatttctcacatcctgcccaggatctcctcttagggtagaagaagtctctgggacatccctggggtgtgtgtgtagatttcccacctggggactctgctgtccctgggcttgcatcccagggatcccagagtggcctgcctatcacaaccacatcccttccccccacaaggcaataaatctcatttctttatat

SEQ ID NO: 356809 - DNA, 757 bp, Homo sapiens
catcttgctcccatcaggactactgttttttaaccaacaagaggtcaattatagaatccgctgatgggagcaagatggcgcatcttctcccatggtttcctatcgctgaagtgttcacgctgaagcccctggagtttggcaagcccaacactttggtctgtttgtcagtaatctcttcccacccatgctgacagtgaactggcagcatcattccgtccctgtggaaggatttgggcctacttttgtctcagctgtcgatggactcagcttccaggccttttcttacttaaacttcacaccagaaccttctgacattttctcctgcattgtgactcacgaaattgaccgctacacagcaattgcctattgggtaccccggaacgcactgccctcagatctgctggagaatgtgctgtgtggcgtggcctttggcctgggtgtgctgggcatcatcgtgggcattgttctcatcatctacttccggaagccttgctcaggtgactgattcttccagaccagagtttgatgccagcagcttcggccatccaaacagaggatgctcagatttctcacatcctgcccaggatctcctcttagggtagaagaagtctctgggacatccctggggtgtgtgtgtagatttcccacctggggactctgctgtccctgggcttgcatcccagggatcccagagtggcctgcctatcacaaccacatcccttccccccacaaggcaataaatctcatttctttatat

SEQ ID NO: 356810 - DNA, 1963 bp, Homo sapiens
tgatctaaggccaccctctcggggagggagttggggaagctgggttggctgggttggtagctcctacctactgtgtggcaagaaggtatgggtcatgaacagaaccaaggagctgcgctgctacagatgttaccacttctgtggctgctaccccactcctgggccgtccctgaagctcctactccaatgtggccagatgacctgcaaaaccacacattcctgcacacagtgtactgccaggatgggagtcccagtgtgggactctctgaggcctacgacgaggaccagcttttcttcttcgacttttcccagaacactcgggtgcctcgcctgcccgaatttgctgactgggctcaggaacagggagatgctcctgccattttatttgacaaagagttctgcgagtggatgatccagcaaatagggccaaaacttgatgggaaaatcccggtgtccagaggtcaggagttttctggggagtgaagggaggagggctgcattaacctcattgatctgtacactgaataattccccttgataccagctccccatctcaaatactttctggttctcttcatcaccttaatttttccaccagccttggtctgcaccctgtgttcttttggtgggccgaagtacctagcatgtagtaggcattcagaactatgtattgaatgtgatgaattcaacaggtaccaactgatacctactgaatattaacacttgtgctactatgcccagcaagatggatgggaagagtggaaatatctgatgacgtgactatgtcttagtgagaagacagtgcatggttagacatcaatgtgagctctagacaggaagtgctgaaggaagtcatggtggaggggtccagagtagcctggatctggctctgcttctacgtctagctgcagtccttgcctggaagaagacctcccttcagagcccagctcctcgctcatctctgtctcccaaagcctgacccactgtgttcttctctgccctcccctccatatgccatggcccctccaaacacagagataccatctaaactagtctctttttccccctacacttcaatccccccaccaggtttcctatcgctgaagtgttcacgctgaagcccctggagtttggcaagcccaacactttggtctgtttgtcagtaatctcttcccacccatgctgacagtgaactggcagcatcattccgtccctgtggaaggatttgggcctacttttgtctcagctgtcgatggactcagcttccaggccttttcttacttaaacttcacaccagaaccttctgacattttctcctgcattgtgactcacgaaattgaccgctacacagcaattgcctattggggtgaggctttctccctggaattctggtccttttgggggcaaaaagggatagatccatgggaggaggcttctttctccactggtaccttgtttagtccattcctaccctaagcccatcccagtctcccatgtcatcccagacacccacgtcatttccctgggtgggaggctccctaactaggtccccaggctgagccactcatttcctccagtaccccggaacgcactgccctcagatctgctggagaatgtgctgtgtggcgtggcctttggcctgggtgtgctgggcatcatcgtgggcattgttctcatcatctacttccggaagccttgctcaggtgactgattcttccagaccagagtttgatgccagcagcttcggccatccaaacagaggatgctcagatttctcacatcctgcccaggatctcctcttagggtagaagaagtctctgggacatccctggggtgtgtgtgtagatttcccacctggggactctgctgtccctgggcttgcatcccagggatcccagagtggcctgcctatcacaaccacatcccttccccccacaaggcaataaatctcatttctttatat

SEQ ID NO: 356811 - DNA, 769 bp, Homo sapiens
tgatctaaggccaccctctcggggagggagttggggaagctgggttggctgggttggtagctcctacctactgtgtggcaagaaggtatgggtcatgaacagaaccaaggagctgcgctgctacagatgttaccacttctgtggctgctaccccactcctgggccgtccctgaagctcctactccaatgtggccagatgacctgcaaaaccacacattcctgcacacagtgtactgccaggatgggagtcccagtgtgggactctctgaggcctacgacgaggaccagcttttcttcttcgacttttcccagaacactcgggtgcctcgcctgcccgaatttgctgactgggctcaggaacagggagatgctcctgccattttatttgacaaagagttctgcgagtggatgatccagcaaatagggccaaaacttgatgggaaaatcccggtgtccagagggtttcctatcgctgaagtgttcacgctgaagcccctggagtttggcaagcccaacactttggtctgtttgtcagtaatctcttcccacccatgctgacagtgaactggcagcatcattccgtccctgtggaaggatttgggcctacttttgtctcagctgtcgatggactcagcttccaggccttttcttacctttgaccggtcacaaggaatgccttatggtaccccggacgcactgtccttagaatcggtggagtgtgctctgtggcgggggctttggcccgggtgagcctggcatcattggggct

SEQ ID NO: 356812 - DNA, 1089 bp, Homo sapiens
tgtggtacttggtattttcatctggcagaatctagcacttaataaatcaaaaaatggatgaatgaaacaagtaaagtttctataagttacaaactgcaccatcatccacttaatatcatacctattatacttacaacattcaattaaccacacattacatactgtaacctttatctccgtgaacagcatgttcactcattcatttattaaataaaacaattcacacaaagcatccataagagtgtccagcacacagtgagtactcactaaatgtcaccttttattgggatgctgttgccattgttagtcattcgttcttgttcctggtttggttcgtctcagagaatgtttacaagggattcacaaattagttctaataccaaattaattgaaacatatttagaaatataaattgctagccaaaaaataaaaagcctgtaatatacttcaaagtcagaattaaaggtgacatttgggttttccattagttcggatcatctataaatgtattatttataggtaatccatgccaaccagtattaaacgttccttagaattgtgtatctttagtctctaaatctttctaaactcagagacccactccctgttacaggctcctgtttctacctctaccccacagcatcttgtaccattagactaagatcttatccttaagccgtggggtaaactaattctttagggaaaaacttggaaaattaacatggtatgaagtttatatgctactaacaccataaatgccagctggcatatgtacagcccttgcagttcaaaaaactgataagtgttattttatataaccctcaaaacaaagcaaaaaaagctaaacatcattcttattctataaatttatgcccaaagaattatttgaaaaagagaaaatcattgcttttctgccactatatctactgacctgctatatctttgcttgtgccttgccagaatgaattatccatgcaaacctttgaatttatgtactgtatccatctcctcttacctatttgaagacatggttctagccttttttttttttagacggaatctcgctctgtcacccaggctggagtgcag

SEQ ID NO: 356813 - DNA, 394 bp, Homo sapiens
ggagtgcagtggtgcaatcgtggctcactgcaagctctgcctcccaggttcaagtgatcctcctgcctcagtctcctgagtagctgggactataggcgcatgccaccacacctggctaatttttgtatttttagtagagacgggtttcaccatattggtcaggctggtgttgagctcctgaccttgtgatccacccacctctgcctcccaaagtgctgggattacaagagtgagccactgcacctggcctacactgcatttttgacatcctcttaattaaaagctcagtgactaatgtggtatttctaaaattatgcaacttgccatctctaaccactgctttttggggctgtatctatgttcattgagtagactagttttggcttgaatattt

SEQ ID NO: 356814 - DNA, 1335 bp, Homo sapiens
gcgggaggaggcggaggcggcggagtggcgagaggcgagaggcggcggaggcggcggagctggggggggtgggaggggggggagagtgagtgagtggcagagtgagtttacccctatgagactgtgagaggcccggggcctacctcaaaggagcggggtcgcgaagctagctagcagcggcccccctccaggtccccgggcccggcggcgcggcggcggcttggttgtgaagaggcggggaagcgggtgtccggtccccgccatggagggcatggacgtagacctggacccggagctgatgcagaagttcagctgcctgggcaccaccgacaaggacgtgctcatctccgagttccagaggctgctcggcttccagctcaatcctgccggttgcgccttcttcctggacatgaccaactggaacctacaagcagcaattggcgcctattatgactttgagagcccaaacatcagtgtgccctctatgtcctttgttgaagatgtcaccataggagaaggggagtcaatacctccggatactcagtttgtaaaaacatggcggatccagaattctggggcagaggcctggcctccaggggtttgtcttaaatatgtcgggggagaccaatttggacatgtgaacatggtgatggtgagatcgctagagccccaagagattgcagatgtcagcgtccagatgtgcagccccagcagagcaggaatgtatcagggacagtggcggatgtgcactgctacaggactctactatggagatgtcatctgggtgattctcagtgtggaggtgggtggacttttaggagtaacgcagcagctgtcatcttttgaaacggagttcaacacacagccgcatcgtaaggtagaaggaaacttcaacccttttgcctctccccaaaagaaccgacaatcagatgaaaacaacttaaaagaccctgggggctccgagttcgactcgatcagcaaaaacacatgggctcctgctcctgacacatgggctcctgctcctgaccaaactgagcaagaccagaatagactgtcacagaactctgtaaatctgtctcccagcagtcacgcaaacaacttatcagtagtgacttacagtaaggggctccatgggccttaccccttcggccagtcttaaacgggtgtcagcaagaagaaaaattaacaaaagacagaaggcctgactttggggggttagggcaaggggttcctctggattgcagaccacatcgcacagacccctggctctgaccccctctcatcccggaagaagaggaagaagcagaacagactagttttgagtaaactcagtat

SEQ ID NO: 356815 - DNA, 1137 bp, Homo sapiens
gcgggaggaggcggaggcggcggagtggcgagaggcgagaggcggcggaggcggcggagctggggggggtgggaggggggggagagtgagtgagtggcagagtgagtttacccctatgagactgtgagaggcccggggcctacctcaaaggagcggggtcgcgaagctagctagcagcggcccccctccaggtccccgggcccggcggcgcggcggcggcttggttgtgaagaggcggggaagcgggtgtccggtccccgccatggagggcatggacgtagacctggacccggagctgatgcagaagttcagctgcctgggcaccaccgacaaggacgtgctcatctccgagttccagaggctgctcggcttccagctcaatcctgccggttgcgccttcttcctggacatgaccaactggaacctacaagcagcaattggcgcctattatgactttgagagcccaaacatcagtgtgccctctatgtcctttgttgaagatgtcaccataggagaaggggagtcaatacctccggatactcagtttgtaaaaacatggcggatccagaattctgatgtcatctgggtgattctcagtgtggaggtgggtggacttttaggagtaacgcagcagctgtcatcttttgaaacggagttcaacacacagccgcatcgtaaggtagaaggaaacttcaacccttttgcctctccccaaaagaaccgacaatcagatgaaaacaacttaaaagaccctgggggctccgagttcgactcgatcagcaaaaacacatgggctcctgctcctgacacatgggctcctgctcctgaccaaactgagcaagaccagaatagactgtcacagaactctgtaaatctgtctcccagcagtcacgcaaacaacttatcagtagtgacttacagtaaggggctccatgggccttaccccttcggccagtcttaaacgggtgtcagcaagaagaaaaattaacaaaagacagaaggcctgactttggggggttagggcaaggggttcctctggattgcagaccacatcgcacagacccctggctctgaccccctctcatcccggaagaagaggaagaagcagaacagactagttttgagtaaactcagtat

SEQ ID NO: 356816 - DNA, 1304 bp, Homo sapiens
aagtatggctaggtacgaggcctgggtggtggtgagtttacccctatgagactgtgagaggcccggggcctacctcaaaggagcggggtcgcgaagctagctagcagcggcccccctccaggtccccgggcccggcggcgcggcggcggcttggttgtgaagaggcggggaagcgggtgtccggtccccgccatggagggcatggacgtagacctggacccggagctgatgcagaagttcagctgcctgggcaccaccgacaaggacgtgctcatctccgagttccagaggctgctcggcttccagctcaatcctgccggttgcgccttcttcctggacatgaccaactggaacctacaagcagcaattggcgcctattatgactttgagagcccaaacatcagtgtgccctctatgtcctttgttgaagatgtcaccataggagaaggggagtcaatacctccggatactcagtttgtaaaaacatggcggatccagaattctggggcagaggcctggcctccaggggtttgtcttaaatatgtcgggggagaccaatttggacatgtgaacatggtgatggtgagatcgctagagccccaagagattgcagatgtcagcgtccagatgtgcagccccagcagagcaggaatgtatcagggacagtggcggatgtgcactgctacaggactctactatggagatgtcatctgggtgattctcagtgtggaggtgggtggacttttaggagtaacgcagcagctgtcatcttttgaaacggagttcaacacacagccgcatcgtaaggtagaaggaaacttcaacccttttgcctctccccaaaagaaccgacaatcagatgaaaacaacttaaaagaccctgggggctccgagttcgactcgatcagcaaaaacacatgggctcctgctcctgacacatgggctcctgctcctgaccaaactgagcaagaccagaatagactgtcacagaactctgtaaatctgtctcccagcagtcacgcaaacaacttatcagtagtgacttacagtaagtgtacataagtgatacaaaaggagcactaggcggaagaagcactgaccaggactgacccaggaaatgaggaagaggagggtcctcatggtgttatccgataatgccatcagtatacaccaagagagcatattatttctcagccatacaacaaacttgcttgtctttttattaacctgtgtgaaccttcttatttatttaaatcaaatcacaaataaaagcaaaataaagacaggtatgtgaaaatcctgtg

SEQ ID NO: 356817 - DNA, 1440 bp, Homo sapiens
aagtatggctaggtacgaggcctgggtggtggtgagtttacccctatgagactgtgagaggcccggggcctacctcaaaggagcggggtcgcgaagctagctagcagcggcccccctccaggtccccgggcccggcggcgcggcggcggcttggttgtgaagaggcggggaagcgggtgtccggtccccgccatggagggcatggacgtagacctggacccggagctgatgcagaagttcagctgcctgggcaccaccgacaaggacgtgctcatctccgagttccagaggctgctcggcttccagctcaatcctgccggttgcgccttcttcctggacatgaccaactggaacctacaagcagcaattggcgcctattatgactttgagagcccaaacatcagtgtgccctctatgtcctttgttgaagatgtcaccataggagaaggggagtcaatacctccggatactcagtttgtaaaaacatggcggatccagaattctggggcagaggcctggcctccaggggtttgtcttaaatatgtcgggggagaccaatttggacatgtgaacatggtgatggtgagatcgctagagccccaagagattgcagatgtcagcgtccagatgtgcagccccagcagagcaggaatgtatcagggacagtggcggatgtgcactgctacaggactctactatggagatgtcatctgggtgattctcagtgtggaggtgggtggacttttaggagtaacgcagcagctgtcatcttttgaaacggagttcaacacacagccgcatcgtaaggtagaaggaaacttcaacccttttgcctctccccaaaagaaccgacaatcagatgaaaacaacttaaaagaccctgggggctccgagttcgactcgatcagcaaaaacacatgggctcctgctcctgacacatgggctcctgctcctgaccaaactgagcaagaccagaatagactgtcacagaactctgtaaatctgtctcccagcagtcacgcaaacaacttatcagtagtgacttacagtaagtcatcctgtagagcattttgtatctggagctagcaggagtcagtctgcttctgttacatcagaaatcagctctttttctcacctgctgctatctatgttgactaaggcatagaagagttcttttctctccatccagtgtacataagtgatacaaaaggagcactaggcggaagaagcactgaccaggactgacccaggaaatgaggaagaggagggtcctcatggtgttatccgataatgccatcagtatacaccaagagagcatattatttctcagccatacaacaaacttgcttgtctttttattaacctgtgtgaaccttcttatttatttaaatcaaatcacaaataaaagcaaaataaagacaggtatgtgaaaatcctgtg

SEQ ID NO: 356818 - DNA, 750 bp, Homo sapiens
  misc_feature (27)..(27): n is a, c, g, or t
gcctcctgaaaccatgagaagcttcancgttgcctcactggcttccccatctgaccccaccaggtaccacactgtcacccagtgtccttgatctcctcttgttcccctttctgcttgtagcagcctcacttggcgaatgtatcagggacagtggcggatgtgcactgctacaggactctactatggagatgtcatctgggtgattctcagtgtggaggtgggtggacttttaggagtaacgcagcagctgtcatcttttgaaacggagttcaacacacagccgcatcgtaaggtagaaggaaacttcaacccttttgcctctccccaaaagaaccgacaatcagatgaaaacaacttaaaagaccctgggggctccgagttcgactcgatcagcaaaaacacatgggctcctgctcctgacacatgggctcctgctcctgaccaaactgagcaagaccagaatagactgtcacagaactctgtaaatctgtctcccagcagtcacgcaaacaacttatcagtagtgacttacagtaaggggctccatgggccttaccccttcggccagtcttaaacgggtgtcagcaagaagaaaaattaacaaaagacagaaggcctgactttggggggttagggcaaggggttcctctggattgcagaccacatcgcacagacccctggctctgaccccctctcatcccggaagaagaggaagaagcagaacagactagttttgagtaaactcagtat

SEQ ID NO: 356819 - DNA, 379 bp, Homo sapiens
aagtatggctaggtacgaggcctgggtggtggtgagtttacccctatgagactgtgagaggcccggggcctacctcaaaggagcggggtcgcgaagctagctagcagcggcccccctccaggtccccgggcccggcggcgcggcggcggcttggttgtgaagaggcggggaagcgggtgtccggtccccgccatggagggcatggacgtagacctggacccggagctgatgcagaagttcagctgcctgggcaccaccgacaaggacgtgctcatctccgagttccagaggctgctcggcttccagctcaatcctgccggttgcgcgtgtgctagatgattttcttgatttgcggattctttttcatctcttccgcgga

SEQ ID NO: 356820 - DNA, 481 bp, Homo sapiens
atattgatacagagtcgtctttattttttgaacttcatagaagtgaatataaagggatgggaaaagaacttgagaaagaacaattatttcccccatttttcttctagtgcattaaaatagttagctttctacctttctcttcagtatgattctagagaagataattttgcttctttcattcaacacattttattatgttccagtcactttattaggtacaagggaggaatggtcacaagattgatgaaggtttctgctttcatggagcttaatatgaaatgcagtgtccacacttataagggttaaaaaggagatcatcattaaggtttgtcttctgtattgctatttggatattccttactgtctccagactatttctataattgtatatacttactaagtcccctgggactgttggacttttgatttttgtgatgcttgctaccatctcaaaattgtaacatgacagggttttttttgt

SEQ ID NO: 356821 - DNA, 1036 bp, Homo sapiens
gtgtaacctctcctgtttttgtacatgtgtttattcctgaactgttttgggctactcattgttaaccaggttgctgctctacttttcccactgctggctaaggaagattcaactttttcaggaacctacaagcagcaattggcgcctattatgactttgagagcccaaacatcagtgtgccctctatgtcctttgttgaagatgtcaccataggagaaggggagtcaatacctccggatactcagtttgtaaaaacatggcggatccagaattctggggcagaggcctggcctccaggggtttgtcttaaatatgtcgggggagaccaatttggacatgtgaacatggtgatggtgagatcgctagagccccaagagattgcagatgtcagcgtccagatgtgcagccccagcagagcaggaatgtatcagggacagtggcggatgtgcactgctacaggactctactatggagatgtcatctgggtgattctcagtgtggaggtgggtggacttttaggagtaacgcagcagctgtcatcttttgaaacggagttcaacacacagccgcatcgtaaggtagaaggaaacttcaacccttttgcctctccccaaaagaaccgacaatcagatgaaaacaacttaaaagaccctgggggctccgagttcgactcgatcagcaaaaacacatgggctcctgctcctgacacatgggctcctgctcctgaccaaactgagcaagaccagaatagactgtcacagaactctgtaaatctgtctcccagcagtcacgcaaacaacttatcagtagtgacttacagtaaggggctccatgggccttaccccttcggccagtcttaaacgggtgtcagcaagaagaaaaattaacaaaagacagaaggcctgactttggggggttagggcaaggggttcctctggattgcagaccacatcgcacagacccctggctctgaccccctctcatcccggaagaagaggaagaagcagaacagactagttttgagtaaactcagtat

SEQ ID NO: 356822 - DNA, 1265 bp, Homo sapiens
aagtatggctaggtacgaggcctgggtggtggtgagtttacccctatgagactgtgagaggcccggggcctacctcaaaggagcggggtcgcgaagctagctagcagcggcccccctccaggtccccgggcccggcggcgcggcggcggcttggttgtgaagaggcggggaagcgggtgtccggtccccgccatggagggcatggacgtagacctggacccggagctgatgcagaagttcagctgcctgggcaccaccgacaaggacgtgctcatctccgagttccagaggctgctcggcttccagctcaatcctgccggttgcgccttcttcctggacatgaccaactggaacctacaagcagcaattggcgcctattatgactttgagagcccaaacatcagtgtgccctctatgtcctttgttgaagatgtcaccataggagaaggggagtcaatacctccggatactcagtttgtaaaaacatggcggatccagaattctggggcagaggcctggcctccaggggtttgtcttaaatatgtcgggggagaccaatttggacatgtgaacatggtgatggtgagatcgctagagccccaagagattgcagatgtcagcgtccagatgtgcagccccagcagagcaggaatgtatcagggacagtggcggatgtgcactgctacaggactctactatggagatgtcatctgggtgattctcagtgtggaggtgggtggacttttaggagtaacgcagcagctgtcatcttttgaaacggagttcaacacacagccgcatcgtaaggtagaaggaaacttcaacccttttgcctctccccaaaagaaccgacaatcagatgaaaacaacttaaaagaccctgggggctccgagttcgactcgatcagcaaaaacacatgggctcctgctcctgacacatgggctcctgctcctgaccaaactgagcaagaccagaatagactgtcacagaactctgtaaatctgtctcccagcagtcacgcaaacaacttatcagtagtgacttacagtaaggggctccatgggccttaccccttcggccagtcttaaacgggtgtcagcaagaagaaaaattaacaaaagacagaaggcctgactttggggggttagggcaaggggttcctctggattgcagaccacatcgcacagacccctggctctgaccccctctcatcccggaagaagaggaagaagcagaacagactagttttgagtaaactcagtat

SEQ ID NO: 356823 - DNA, 1457 bp, Homo sapiens
gcgggaggaggcggaggcggcggagtggcgagaggcgagaggcggcggaggcggcggagctggggggggtgggaggggggggagagtgagtgagtggcagagtgagtttacccctatgagactgtgagaggcccggggcctacctcaaaggagcggggtcgcgaagctagctagcagcggcccccctccaggtccccgggcccggcggcgcggcggcggcttggttgtgaagaggcggggaagcgggtgtccggtccccgccatggagggcatggacgtagacctggacccggagctgatgcagaagttcagctgcctgggcaccaccgacaaggacgtgctcatctccgagttccagaggctgctcggcttccagctcaatcctgccggttgcgccttcttcctggacatgaccaactggaacctacaagcagcaattggcgcctattatgactttgagagcccaaacatcagtgtgccctctatgtcctttgttgaagatgtcaccataggagaaggggagtcaatacctccggatactcagtttgtaaaaacatggcggatccagaattctgtcactttattaggtacaagggaggaatggtcacaagattgatgaaggtttctgctttcatggagcttaatatgaaatgcagtgtccacacttataagggttaaaaaggagatcatcattaaggggcagaggcctggcctccaggggtttgtcttaaatatgtcgggggagaccaatttggacatgtgaacatggtgatggtgagatcgctagagccccaagagattgcagatgtcagcgtccagatgtgcagccccagcagagcaggaatgtatcagggacagtggcggatgtgcactgctacaggactctactatggagatgtcatctgggtgattctcagtgtggaggtgggtggacttttaggagtaacgcagcagctgtcatcttttgaaacggagttcaacacacagccgcatcgtaaggtagaaggaaacttcaacccttttgcctctccccaaaagaaccgacaatcagatgaaaacaacttaaaagaccctgggggctccgagttcgactcgatcagcaaaaacacatgggctcctgctcctgacacatgggctcctgctcctgaccaaactgagcaagaccagaatagactgtcacagaactctgtaaatctgtctcccagcagtcacgcaaacaacttatcagtagtgacttacagtaaggggctccatgggccttaccccttcggccagtcttaaacgggtgtcagcaagaagaaaaattaacaaaagacagaaggcctgactttggggggttagggcaaggggttcctctggattgcagaccacatcgcacagacccctggctctgaccccctctcatcccggaagaagaggaagaagcagaacagactagttttgagtaaactcagtat

SEQ ID NO: 356824 - DNA, 980 bp, Homo sapiens
gcgggaggaggcggaggcggcggagtggcgagaggcgagaggcggcggaggcggcggagctggggggggtgggaggggggggagagtgagtgagtggcagagtgagtttacccctatgagactgtgagaggcccggggcctacctcaaaggagcggggtcgcgaagctagctagcagcggcccccctccaggtccccgggcccggcggcgcggcggcggcttggttgtgaagaggcggggaagcgggtgtccggtccccgccatggagggcatggacgtagacctggacccggagctgatgcagaagttcagctgcctgggcaccaccgacaaggacgtgctcatctccgagttccagaggctgctcggcttccagctcaatcctgccggttgcgccttcttcctggacatgaccaactggaacctacaagcagcaattggcgcctattatgactttgagagcccaaacatcagtgtgccctctatgtcctttgttgaagatgtcaccataggagaaggggagtcaatacctccggatactcagtttgtaaaaacatggcggatccagaattctgtcactttattaggtacaagggaggaatggtcacaagattgatgaaggtttctgctttcatggagcttaatatgaaatgcagtgtccacacttataagggttaaaaaggagatcatcattaaggggcagaggcctggcctccaggggtttgtcttaaatatgtcgggggagaccaatttggacatgtgaacatggtgatggtgagatcgctagagccccaagagattgcagatgtcagcgtccagatgtgcagccccagcagagcaggaatgtatcagggacagtggcggatgtgcactgctacaggactctactatggaggtgagtatgtccttgtgcagcccagggtaaaggaactaaggtaacatcttataacatccccagtgttgctcacagagcctgtcaa

SEQ ID NO: 356825 - DNA, 1886 bp, Homo sapiens
gcacgaggcaggccgaagtccgcagccccggctcggctcccgctgcttgcacctcccggatggtgctgactgctccctaagcggcggcggcggcgagtcgtgaggacgcgccgcggaggctgttcggggtcgaggcttcccgtcgccggcacttcctcttgcggcgcccgtgcgcggccggcccggcaggcgggatggcggccgcggctccagggaacggccgcgcatcggcgccccggctgcttctgctctttctggttccgctgctgtgggccccggctgcggtccgggccggcccagatgaagaccttagccaccggaacaaagaaccgccggcgccggcccagcagctgcagccgcagcctgtggctgtgcagggccccgagccggcccgggtcgagaaaatatttacaccagcagctccagttcataccaataaagaagatcctgctacccaaactaatttgggatttatccatgcatttgtcgctgccatatcagttattattgtatctgaattgggtgataagacattttttatagcagccatcatggcaatgcgctataaccgcctgaccgtgctggctggtgcaatgcttgccttgggactaatgacatgcttgtcagttttgtttggctatgccaccacagtcatccccagggtctatacatactatgtttcaactgtattatttgccatttttggcattagaatgcttcgggaaggcttaaagatgagccctgatgagggtcaagaggaactggaagaagttcaagctgaattaaagaagaaagatgaagaatttcaacgaaccaaacttttaaatggaccgggagatgttgaaacgggtacaagcataacagtacctcagaaaaagtggttgcattttatttcacccatttttgttcaagctcttacattaacattcttagcagaatggggtgatcgctctcaactaactacaattgtattggcagctagagaggacccctatggtgtagccgtgggtggaactgtggggcactgcctgtgcacgggattggcagtaattggaggaagaatgatagcacagaaaatctctgtcagaactgtgacaatcataggaggcatcgtttttttggcgtttgcattttctgcactatttataagccctgattctggtttttaacaagctgtttgttcatctatatttagtttaaaataggtagtattatctttctgtacatagtgtacattacaactaaaagtgatggaaaaatactgtattttgtagcactgattttgtgagtttgacccattattatgtctgagatataatcattgattctatttgtaacaaggagttttaaaagaaacctgacttctaagtgtgggtttttcttctctccaacataattatgttaatatggtcctcatttttcttttggtgcagaaccgttgtgcagtggggtctaccatgcaattttctttcagcactgacccctttttaaggaatacaaattttctccttcatcacttaggtgttttaagatgtttaccttaaagtttttcttggggaaagaatgaattaatttctatttcttaaaacatttccctgagccagtaaacagtagtttaatcattggtcttttcaaaactaggtgtttaaaaaaagagacatatatgatattgctgttatatcaataacatggcacaacaagaactgtctgccaggtcattcttcctcttttttttttaattgggtaggacacccaatataaaaacagtcaatatttgacaatgtggaattaccaaattaaaagagaatactatgaatgtattcatattttttctatatcaaccaacccttggttcccatatttaattaaaaggagggttgcccagt

SEQ ID NO: 356826 - DNA, 2638 bp, Homo sapiens
  misc_feature (1)..(5): n is a, c, g, or t
  misc_feature (8)..(9): n is a, c, g, or t
  misc_feature (788)..(788): n is a, c, g, or t
  misc_feature (865)..(865): n is a, c, g, or t
nnnnncgnntagctgggaccacttgtgcttgctaggatgcctggctaatttttaatttttttgtagagatgaggtcccactgtgttgcctaggctagtctcaaactgccaggctcaagcaatcctcttgcttcagcctcccaaagtgttgggattacaggcatgagccactgcacctggcctagcggatttctgaagcattaatctgttctgttactttccagctaaaaaccaacaagtgtctgaggacacagtttaaactccaagatgatagggtcctccctcacctgggctcccacctaccctcatgacctccttttgtgaaatgctgaagggctctgcagctggttgtctggtactgctggcctttgctttctatttagcatgttccttctcccacaaaacaaaatcacattctcactatgccctgttcattcttcaggactatcttctgggaaacttttactacatacccctctccccctaatctgagtgtctgctttgctcaggtagcatgtgttcactggataaatccttgattcctggcactgaggcagggtttctgttcccaggaagcagaggcatactattctgtgaaggattgactgagtttctcctaataccaagcagtatctgagggaacagatgtctagcttaaaatcctccctagcacttgtcatagcagtgctacgtattgcctgtgaaggaagtttaataactgctgaaaggctcgattagctttatttcatcaggatttgtttgactttacaaattgatttgggttatttnaacttttaggtctagtcttaagtataactggtacatattccttcaagcagccattacacctttcataaatttattanacacctgcatttttataactattatgctttttaattgttggccaccatttttagtgcttctgaattgttatggttctcaagcagcagttgtcaccttggttttgaattaatgctgtgacgcttgcttccaggacccctatggtgtagccgtgggtggaactgtggggcactgcctgtgcacgggattggcagtaattggaggaagaatgatagcacagaaaatctctgtcagaactggtaagtcttgaaaattacaaatcagataacattttagaatcactgagagattaaagggtgttagctttgattatttaaatttctgctgctgaagtatacttggtttttctaattacctaccatctcttataataagaggtattaatcctggtattgcaaatacggacttttttcacctgtgtagaagttagcaaaatacaaagtcatttttatcgaattcatagtagcttcttgttaacatattatcttagtaaaacaattgtcatttggaagtatgagaagtttttggctctaaaaatgtgtcttacaagactggaatcatgtggagaccatatgtactgattctgctgaatatgtcctgtgaagccacagttaggtctagagatggaagaatcgtctctttgctagtcagaagacctgaacattttcttttataactggattttaagatgagttatagttctactgttgcttgccagcactgtctggatttaatacaatcctgtcatttctcaaaacagtgctggagaaaacctgattcttagtgttcacagtcaagcatgttaagtattgttccttgttatgtaaaaggggttgaagtgattctaatttgttttcaaggttagtttaatagattggaagaataattggccgcctcatcggctcccttttcattttgtacagtatcaaggtataggaattttactgtatttgactttttttctctctcttccagtgacaatcataggaggcatcgtttttttggcgtttgcattttctgcactatttataagccctgattctggtttttaacaagctgtttgttcatctatatttagtttaaaataggtagtattatctttctgtacatagtgtacattacaactaaaagtgatggaaaaatactgtattttgtagcactgattttgtgagtttgacccattattatgtctgagatataatcattgattctatttgtaacaaggagttttaaaagaaacctgacttctaagtgtgggtttttcttctctccaacataattatgttaatatggtcctcatttttcttttggtgcagaaccgttgtgcagtggggtctaccatgcaattttctttcagcactgacccctttttaaggaatacaaattttctccttcatcacttaggtgttttaagatgtttaccttaaagtttttcttggggaaagaatgaattaatttctatttcttaaaacatttccctgagccagtaaacagtagtttaatcattggtcttttcaaaactaggtgtttaaaaaaagagacatatatgatattgctgttatatcaataacatggcacaacaagaactgtctgccaggtcattcttcctcttttttttttaattgggtaggacacccaatataaaaacagtcaatatttgacaatgtggaattaccaaattaaaagagaatactatgaatgtattcatattttttctatattgaataaacaatgtaacatagataacaatataaataaaagtggtatgaccagtg

SEQ ID NO: 356827 - DNA, 261 bp, Homo sapiens
tttgtttctgtttttttgcagggacatcagtttttttcttggtagcaagctgtagattttgtttcaaggaaagcatcttcatcttctctagtttcatcatgtatagatggagattccgatgcaggtatctgtatcaatttcaatacagtcacatttgtgtttatttgaactctagaactagaaaaggaattacttttttctttgattttctttttcttccttctcttgaggatcatgaaagtataaaagaatactttctaa

SEQ ID NO: 356828 - DNA, 1978 bp, Homo sapiens
acggggccgggaggagtcggggctgggccgcgccgaggcagctggctgactccagtttagccgccgccggagaggacgggcgccgagccggggctgcggacttcggcctgcccctcacctcactcccgctgcttgcacctcccggatggtgctgactgctccctaagcggcggcggcggcgagtcgtgaggacgcgccgcggaggctgttcggggtcgaggcttcccgtcgccggcacttcctcttgcggcgcccgtgcgcggccggcccggcaggcgggatggcggccgcggctccagggaacggccgcgcatcggcgccccggctgcttctgctctttctggttccgctgctgtgggccccggctgcggtccgggccggcccagatgaagaccttagccaccggaacaaagaaccgccggcgccggcccagcagctgcagccgcagcctgtggctgtgcagggccccgagccggcccgggtcgagaaaatatttacaccagcagctccagttcataccaataaagaagatcctgctacccaaactaatttgggatttatccatgcatttgtcgctgccatatcagttattattgtatctgaattgggtgataagacattttttatagcagccatcatggcaatgcgctataaccgcctgaccgtgctggctggtgcaatgcttgccttgggactaatgacatgcttgtcagttttgtttggctatgccaccacagtcatccccagggtctatacatactatgtttcaactgtattatttgccatttttggcattagaatgcttcgggaaggcttaaagatgagccctgatgagggtcaagaggaactggaagaagttcaagctgaattaaagaagaaagatgaagaatttcaacgaaccaaacttttaaatggaccgggagatgttgaaacgggtacaagcataacagtacctcagaaaaagtggttgcattttatttcacccatttttgttcaagctcttacattaacattcttagcagaatggggtgatcgctctcaactaactacaattgtattggcagctagagaggacccctatggtgtagccgtgggtggaactgtggggcactgcctgtgcacgggattggcagtaattggaggaagaatgatagcacagaaaatctctgtcagaactgtgacaatcataggaggcatcgtttttttggcgtttgcattttctgcactatttataagccctgattctggtttttaacaagctgtttgttcatctatatttagtttaaaataggtagtattatctttctgtacatagtgtacattacaactaaaagtgatggaaaaatactgtattttgtagcactgattttgtgagtttgacccattattatgtctgagatataatcattgattctatttgtaacaaggagttttaaaagaaacctgacttctaagtgtgggtttttcttctctccaacataattatgttaatatggtcctcatttttcttttggtgcagaaccgttgtgcagtggggtctaccatgcaattttctttcagcactgacccctttttaaggaatacaaattttctccttcatcacttaggtgttttaagatgtttaccttaaagtttttcttggggaaagaatgaattaatttctatttcttaaaacatttccctgagccagtaaacagtagtttaatcattggtcttttcaaaactaggtgtttaaaaaaagagacatatatgatattgctgttatatcaataacatggcacaacaagaactgtctgccaggtcattcttcctcttttttttttaattgggtaggacacccaatataaaaacagtcaatatttgacaatgtggaattaccaaattaaaagagaatactatgaatgtattcatattttttctatattgaataaacaatgtaacatagataacaatataaataaaagtggtatgaccagtg

SEQ ID NO: 356829 - DNA, 2714 bp, Homo sapiens
acggggccgggaggagtcggggctgggccgcgccgaggcagctggctgactccagtttagccgccgccggagaggacgggcgccgagccggggctgcggacttcggcctgcccctcacctcactcccgctgcttgcacctcccggatggtgctgactgctccctaagcggcggcggcggcgagtcgtgaggacgcgccgcggaggctgttcggggtcgaggcttcccgtcgccggcacttcctcttgcggcgcccgtgcgcggccggcccggcaggcgggatggcggccgcggctccagggaacggccgcgcatcggcgccccggctgcttctgctctttctggttccgctgctgtgggccccggctgcggtccgggccggcccagatgaagaccttagccaccggaacaaagaaccgccggcgccggcccagcagctgcagccgcagcctgtggctgtgcagggccccgagccggcccgggtcgagaaaatatttacaccagcagctccagttcataccaataaagaagatcctgctacccaaactaatttgggatttatccatgcatttgtcgctgccatatcagttattattgtatctgaattgggtgataagacattttttatagcagccatcatggcaatgcgctataaccgcctgaccgtgctggctggtgcaatgcttgccttgggactaatgacatgcttgtcagttttgtttggctatgccaccacagtcatccccagggtctatacatactatgtttcaactgtattatttgccatttttggcattagaatgcttcgggaaggcttaaagatgagccctgatgagggtcaagaggaactggaagaagttcaagctgaattaaagaagaaagatgaagaatttcaacgaaccaaacttttaaatggaccgggagatgttgaaacgggtacaagcataacagtacctcagaaaaagtggttgcattttatttcacccatttttgttcaagctcttacattaacattcttagcagaatggggtgatcgctctcaactaactacaattgtattggcagctagagaggacccctatggtgtagccgtgggtggaactgtggggcactgcctgtgcacgggattggcagtaattggaggaagaatgatagcacagaaaatctctgtcagaactggtaagtcttgaaaattacaaatcagataacattttagaatcactgagagattaaagggtgttagctttgattatttaaatttctgctgctgaagtatacttggtttttctaattacctaccatctcttataataagaggtattaatcctggtattgcaaatacggacttttttcacctgtgtagaagttagcaaaatacaaagtcatttttatcgaattcatagtagcttcttgttaacatattatcttagtaaaacaattgtcatttggaagtatgagaagtttttggctctaaaaatgtgtcttacaagactggaatcatgtggagaccatatgtactgattctgctgaatatgtcctgtgaagccacagttaggtctagagatggaagaatcgtctctttgctagtcagaagacctgaacattttcttttataactggattttaagatgagttatagttctactgttgcttgccagcactgtctggatttaatacaatcctgtcatttctcaaaacagtgctggagaaaacctgattcttagtgttcacagtcaagcatgttaagtattgttccttgttatgtaaaaggggttgaagtgattctaatttgttttcaaggttagtttaatagattggaagaataattggccgcctcatcggctcccttttcattttgtacagtatcaaggtataggaattttactgtatttgactttttttctctctcttccagtgacaatcataggaggcatcgtttttttggcgtttgcattttctgcactatttataagccctgattctggtttttaacaagctgtttgttcatctatatttagtttaaaataggtagtattatctttctgtacatagtgtacattacaactaaaagtgatggaaaaatactgtattttgtagcactgattttgtgagtttgacccattattatgtctgagatataatcattgattctatttgtaacaaggagttttaaaagaaacctgacttctaagtgtgggtttttcttctctccaacataattatgttaatatggtcctcatttttcttttggtgcagaaccgttgtgcagtggggtctaccatgcaattttctttcagcactgacccctttttaaggaatacaaattttctccttcatcacttaggtgttttaagatgtttaccttaaagtttttcttggggaaagaatgaattaatttctatttcttaaaacatttccctgagccagtaaacagtagtttaatcattggtcttttcaaaactaggtgtttaaaaaaagagacatatatgatattgctgttatatcaataacatggcacaacaagaactgtctgccaggtcattcttcctcttttttttttaattgggtaggacacccaatataaaaacagtcaatatttgacaatgtggaattaccaaattaaaagagaatactatgaatgtattcatattttttctatattgaataaacaatgtaacatagataacaatataaataaaagtggtatgaccagtg

SEQ ID NO: 356830 - DNA, 2893 bp, Homo sapiens
acggggccgggaggagtcggggctgggccgcgccgaggcagctggctgactccagtttagccgccgccggagaggacgggcgccgagccggggctgcggacttcggcctgcccctcacctcactcccgctgcttgcacctcccggatggtgctgactgctccctaagcggcggcggcggcgagtcgtgaggacgcgccgcggaggctgttcggggtcgaggcttcccgtcgccggcacttcctcttgcggcgcccgtgcgcggccggcccggcaggcgggatggcggccgcggctccagggaacggccgcgcatcggcgccccggctgcttctgctctttctggttccgctgctgtgggccccggctgcggtccgggccggcccagatgaagaccttagccaccggaacaaagaaccgccggcgccggcccagcagctgcagccgcagcctgtggctgtgcagggccccgagccggcccgggtcgagaaaatatttacaccagcagctccagttcataccaataaagaagatcctgctacccaaactaatttgggatttatccatgcatttgtcgctgccatatcagttattattgtatctgaattgggtgataagacattttttatagcagccatcatggcaatgcgctataaccgcctgaccgtgctggctggtgcaatgcttgccttgggactaatgacatgcttgtcagttttgtttggctatgccaccacagtcatccccagggtctatacatactatgtttcaactgtattatttgccatttttggcattagaatgcttcgggaaggcttaaagatgagccctgatgagggtcaagaggaactggaagaagttcaagctgaattaaagaagaaagatgaagaatttcaacgaaccaaacttttaaatggaccgggagatgttgaaacgggtacaagcataacagtacctcagaaaaagtggttgcattttatttcacccatttttgttcaagctcttacattaacattcttagcagaatggggtgatcgctctcaactaactacaattgtattggcagctagagaggtgagtgatatttgagaggagactgtttaaaatgaaacgtaattattattactttgttccagaaaacactggacacactgaagtgggccacagcattccttcatatgcaagactgttttacatctgataattcagctgctctctaaaattggccttctcccagttcctgctacctgcaggacccctatggtgtagccgtgggtggaactgtggggcactgcctgtgcacgggattggcagtaattggaggaagaatgatagcacagaaaatctctgtcagaactggtaagtcttgaaaattacaaatcagataacattttagaatcactgagagattaaagggtgttagctttgattatttaaatttctgctgctgaagtatacttggtttttctaattacctaccatctcttataataagaggtattaatcctggtattgcaaatacggacttttttcacctgtgtagaagttagcaaaatacaaagtcatttttatcgaattcatagtagcttcttgttaacatattatcttagtaaaacaattgtcatttggaagtatgagaagtttttggctctaaaaatgtgtcttacaagactggaatcatgtggagaccatatgtactgattctgctgaatatgtcctgtgaagccacagttaggtctagagatggaagaatcgtctctttgctagtcagaagacctgaacattttcttttataactggattttaagatgagttatagttctactgttgcttgccagcactgtctggatttaatacaatcctgtcatttctcaaaacagtgctggagaaaacctgattcttagtgttcacagtcaagcatgttaagtattgttccttgttatgtaaaaggggttgaagtgattctaatttgttttcaaggttagtttaatagattggaagaataattggccgcctcatcggctcccttttcattttgtacagtatcaaggtataggaattttactgtatttgactttttttctctctcttccagtgacaatcataggaggcatcgtttttttggcgtttgcattttctgcactatttataagccctgattctggtttttaacaagctgtttgttcatctatatttagtttaaaataggtagtattatctttctgtacatagtgtacattacaactaaaagtgatggaaaaatactgtattttgtagcactgattttgtgagtttgacccattattatgtctgagatataatcattgattctatttgtaacaaggagttttaaaagaaacctgacttctaagtgtgggtttttcttctctccaacataattatgttaatatggtcctcatttttcttttggtgcagaaccgttgtgcagtggggtctaccatgcaattttctttcagcactgacccctttttaaggaatacaaattttctccttcatcacttaggtgttttaagatgtttaccttaaagtttttcttggggaaagaatgaattaatttctatttcttaaaacatttccctgagccagtaaacagtagtttaatcattggtcttttcaaaactaggtgtttaaaaaaagagacatatatgatattgctgttatatcaataacatggcacaacaagaactgtctgccaggtcattcttcctcttttttttttaattgggtaggacacccaatataaaaacagtcaatatttgacaatgtggaattaccaaattaaaagagaatactatgaatgtattcatattttttctatattgaataaacaatgtaacatagataacaatataaataaaagtggtatgaccagtg

SEQ ID NO: 356831 - DNA, 2167 bp, Homo sapiens
acggggccgggaggagtcggggctgggccgcgccgaggcagctggctgactccagtttagccgccgccggagaggacgggcgccgagccggggctgcggacttcggcctgcccctcacctcactcccgctgcttgcacctcccggatggtgctgactgctccctaagcggcggcggcggcgagtcgtgaggacgcgccgcggaggctgttcggggtcgaggcttcccgtcgccggcacttcctcttgcggcgcccgtgcgcggccggcccggcaggcgggatggcggccgcggctccagggaacggccgcgcatcggcgccccggctgcttctgctctttctggttccgctgctgtgggccccggctgcggtccgggccggcccagatgaagaccttagccaccggaacaaagaaccgccggcgccggcccagcagctgcagccgcagcctgtggctgtgcagggccccgagccggcccgggtcgagaaaatatttacaccagcagctccagttcataccaataaagaagatcctgctacccaaactaatttgggatttatccatgcatttgtcgctgccatatcagttattattgtatctgaattgggtgataagacattttttatagcagccatcatggcaatgcgctataaccgcctgaccgtgctggctggtgcaatgcttgccttgggactaatgacatgcttgtcagttttgtttggctatgccaccacagtcatccccagggtctatacatactatgtttcaactgtattatttgccatttttggcattagaatgcttcgggaaggcttaaagatgagccctgatgagggtcaagaggaactggaagaagttcaagctgaattaaagaagaaagatgaagaatttcaacgaaccaaacttttaaatggaccgggagatgttgaaacgggtacaagcataacagtacctcagaaaaagtggttgcattttatttcacccatttttgttcaagctcttacattaacattcttagcagaatggggtgatcgctctcaactaactacaattgtattggcagctagagaggacccctatggtgtagccgtgggtggaactgtggggcactgcctgtgcacgggattggcagtaattggaggaagaatgatagcacagaaaatctctgtcagaactgtgacaatcataggaggcatcgtttttttggcgtttgcattttctgcactatttataagccctgattctggtttttaacaagctgtttgttcatctatatttagtttaaaataggtagtattatctttctgtacatagtgtacattacaactaaaagtgatggaaaaatactgtattttgtagcactgattttgtgagtttgacccattattatgtctgagatataatcattgattctatttgtaacaaggagttttaaaagaaacctgacttctaagtgtgggtttttcttctctccaacataattatgttaatatggtcctcatttttcttttggtgcagaaccgttgtgcagtggggtctaccatgcaattttctttcagcactgacccctttttaaggaatacaaattttctccttcatcacttaggtgttttaagatgtttaccttaaagtttttcttggggaaagaatgaattaatttctatttcttaaaacatttccctgagccagtaaacagtagtttaatcattggtcttttcaaaactaggtgtttaaaaaaagagacatatatgatattgctgttatatcaataacatggcacaacaagaactgtctgccaggtcattcttcctcttttttttttaattgggtaggacacccaatataaaaacagtcaatatttgacaatgtggaattaccaaattaaaagagaatactatgaatgtattcatattttttctatatctattaatgggaaattaaagccgaaatgtttgaacccaatagagattgaaccaaattatttgacgaatagaaaggacacgaccgagaacatgtcccacgcagcgcatcggagcgacaaagaaacaagggaacaacgagcacgggggcgccaagatactggcgcggcggcgcggcggacaacaaaggcgcgaaagatggacgagggcgacgcggggcccacaaaggaccgcaccagagcaagca

SEQ ID NO: 356832 - DNA, 1861 bp, Homo sapiens
acggggccgggaggagtcggggctgggccgcgccgaggcagctggctgactccagtttagccgccgccggagaggacgggcgccgagccggggctgcggacttcggcctgcccctcacctcactcccgctgcttgcacctcccggatggtgctgactgctccctaagcggcggcggcggcgagtcgtgaggacgcgccgcggaggctgttcggggtcgaggcttcccgtcgccggcacttcctcttgcggcgcccgtgcgcggccggcccggcaggcgggatggcggccgcggctccagggaacggccgcgcatcggcgccccggctgcttctgctctttctggttccgctgctgtgggccccggctgcgaaaatatttacaccagcagctccagttcataccaataaagaagatcctgctacccaaactaatttgggatttatccatgcatttgtcgctgccatatcagttattattgtatctgaattgggtgataagacattttttatagcagccatcatggcaatgcgctataaccgcctgaccgtgctggctggtgcaatgcttgccttgggactaatgacatgcttgtcagttttgtttggctatgccaccacagtcatccccagggtctatacatactatgtttcaactgtattatttgccatttttggcattagaatgcttcgggaaggcttaaagatgagccctgatgagggtcaagaggaactggaagaagttcaagctgaattaaagaagaaagatgaagaatttcaacgaaccaaacttttaaatggaccgggagatgttgaaacgggtacaagcataacagtacctcagaaaaagtggttgcattttatttcacccatttttgttcaagctcttacattaacattcttagcagaatggggtgatcgctctcaactaactacaattgtattggcagctagagaggacccctatggtgtagccgtgggtggaactgtggggcactgcctgtgcacgggattggcagtaattggaggaagaatgatagcacagaaaatctctgtcagaactgtgacaatcataggaggcatcgtttttttggcgtttgcattttctgcactatttataagccctgattctggtttttaacaagctgtttgttcatctatatttagtttaaaataggtagtattatctttctgtacatagtgtacattacaactaaaagtgatggaaaaatactgtattttgtagcactgattttgtgagtttgacccattattatgtctgagatataatcattgattctatttgtaacaaggagttttaaaagaaacctgacttctaagtgtgggtttttcttctctccaacataattatgttaatatggtcctcatttttcttttggtgcagaaccgttgtgcagtggggtctaccatgcaattttctttcagcactgacccctttttaaggaatacaaattttctccttcatcacttaggtgttttaagatgtttaccttaaagtttttcttggggaaagaatgaattaatttctatttcttaaaacatttccctgagccagtaaacagtagtttaatcattggtcttttcaaaactaggtgtttaaaaaaagagacatatatgatattgctgttatatcaataacatggcacaacaagaactgtctgccaggtcattcttcctcttttttttttaattgggtaggacacccaatataaaaacagtcaatatttgacaatgtggaattaccaaattaaaagagaatactatgaatgtattcatattttttctatattgaataaacaatgtaacatagataacaatataaataaaagtggtatgaccagtg

SEQ ID NO: 356833 - DNA, 1416 bp, Homo sapiens
acggggccgggaggagtcggggctgggccgcgccgaggcagctggctgactccagtttagccgccgccggagaggacgggcgccgagccggggctgcggacttcggcctgcccctcacctcactcccgctgcttgcacctcccggatggtgctgactgctccctaagcggcggcggcggcgagtcgtgaggacgcgccgcggaggctgttcggggtcgaggcttcccgtcgccggcacttcctcttgcggcgcccgtgcgcggccggcccggcaggcgggatggcggccgcggctccagggaacggccgcgcatcggcgccccggctgcttctgctctttctggttccgctgctgtgggccccggctgcggtccgggccggcccagatgaagaccttagccaccggaacaaagaaccgccggcgccggcccagcagctgcagccgcagcctgtggctgtgcagggccccgagccggcccgggtcgagaaaatatttacaccagcagctccagttcataccaataaagaagatcctgctacccaaactaatttgggatttatccatgcatttgtcgctgccatatcagttattattgtatctgaattgggtgataagacattttttatagcagccatcatggcaatgcgctataaccgcctgaccgtgctggctggtgcaatgcttgccttgggactaatgacatgcttgtcagttttgtttggctatgccaccacagtcatccccagggtctatacatactatgtttcaactgtattatttgccatttttggcattagaatgcttcgggaaggcttaaagatgagccctgatgagggtcaagaggaactggaagaagttcaagctgaattaaagaagaaagatgaagaatttcaacgaaccaaacttttaaatggaccgggagatgttgaaacgggtacaagcataacagtacctcagaaaaagtggttgcattttatttcacccatttttgttcaagctcttacattaacattcttagcagaatggggtgatcgctctcaactaactacaattgtattggcagctagagaggacccctatggtgtagccgtgggtggaactgtggggcactgcctgtgcacgggattggcagtaattggaggaagaatgatagcacagaaaatctctgtcagaactgtgacaatcataggaggcatcgtttttttggcgtttgcattttctgcactatttataagccctgattctggtttttaacaagctgtttgttcatctatatttagtttaaaataggtagtattatctttctgtacatagtgtacattacaactaaaagtgatggaatataaaccattatctattataacaaggatttttaaagaaacctacttgtaagttggtttttctttttccacata

SEQ ID NO: 356834 - DNA, 1971 bp, Homo sapiens
caaaaaaaaaaaaaaaaagggaattttaatgcatggatatagcaggtctgtactctgttcttaaaattgttttggagaattatatgtaaatctgcattatacatgtttagtatcctcaatctaaaatccacagtgctccaaaatctgaaacttgagcactgacatacatgaaatgctcaatggaacattttggatttctggattaggggtactcagctatgatataaatattccaaaatctaaaaaaatccaaaattccaactacttctggtcccatacatttcaggtaagggatactcaaattgtagcaaccatcgtcagaggttaccgtcgttactgatggctttcagagtgattagacagtaaataagtgtaatgaccatgacaagaaaattttcaaaaaaactaaatcttatttacgtgcaaaataaaataattttgaataatgattttaagaagtaactgattttttttttccagaaaatatttacaccagcagctccagttcataccaataaagaagatcctgctacccaaactaatttgggatttatccatgcatttgtcgctgccatatcagttattattgtatctgaattgggtgataagacattttttatagcagccatcatggcaatgcgctataaccgcctgaccgtgctggctggtgcaatgcttgccttgggactaatgacatgcttgtcagttttgtttggctatgccaccacagtcatccccagggtctatacatactatgtttcaactgtattatttgccatttttggcattagaatgcttcgggaaggcttaaagatgagccctgatgagggtcaagaggaactggaagaagttcaagctgaattaaagaagaaagatgaagaatttcaacgaaccaaacttttaaatggaccgggagatgttgaaacgggtacaagcataacagtacctcagaaaaagtggttgcattttatttcacccatttttgttcaagctcttacattaacattcttagcagaatggggtgatcgctctcaactaactacaattgtattggcagctagagaggacccctatggtgtagccgtgggtggaactgtggggcactgcctgtgcacgggattggcagtaattggaggaagaatgatagcacagaaaatctctgtcagaactgtgacaatcataggaggcatcgtttttttggcgtttgcattttctgcactatttataagccctgattctggtttttaacaagctgtttgttcatctatatttagtttaaaataggtagtattatctttctgtacatagtgtacattacaactaaaagtgatggaaaaatactgtattttgtagcactgattttgtgagtttgacccattattatgtctgagatataatcattgattctatttgtaacaaggagttttaaaagaaacctgacttctaagtgtgggtttttcttctctccaacataattatgttaatatggtcctcatttttcttttggtgcagaaccgttgtgcagtggggtctaccatgcaattttctttcagcactgacccctttttaaggaatacaaattttctccttcatcacttaggtgttttaagatgtttaccttaaagtttttcttggggaaagaatgaattaatttctatttcttaaaacatttccctgagccagtaaacagtagtttaatcattggtcttttcaaaactaggtgtttaaaaaaagagacatatatgatattgctgttatatcaataacatggcacaacaagaactgtctgccaggtcattcttcctcttttttttttaattgggtaggacacccaatataaaaacagtcaatatttgacaatgtggaattaccaaattaaaagagaatactatgaatgtattcatattttttctatattgaataaacaatgtaacatagataacaatataaataaaagtggtatgaccagtg

SEQ ID NO: 356835 - DNA, 1681 bp, Homo sapiens
acggggccgggaggagtcggggctgggccgcgccgaggcagctggctgactccagtttagccgccgccggagaggacgggcgccgagccggggctgcggacttcggcctgcccctcacctcactcccgctgcttgcacctcccggatggtgctgactgctccctaagcggcggcggcggcgagtcgtgaggacgcgccgcggaggctgttcggggtcgaggcttcccgtcgccggcacttcctcttgcggcgcccgtgcgcggccggcccggcaggcgggatggcggccgcggctccagggaacggccgcgcatcggcgccccggctgcttctgctctttctggttccgctgctgtgggccccggctgcggtccgggccggcccagatgaagaccttagccaccggaacaaagaaccgccggcgccggcccagcagctgcagccgcagcctgtggctgtgcagggccccgagccggcccgggtcgagaaaatatttacaccagcagctccagttcataccaataaagaagatcctgctacccaaactaatttgggatttatccatgcatttgtcgctgccatatcagttattattgtatctgaattgggtgataagacattttttatagcagccatcatggcaatgcgctataaccgcctgaccgtgctggctggtgcaatgcttgccttgggactaatgacatgcttgtcagttttgtttggctatgccaccacagtcatccccagggtctatacatactatgtttcaactgtattatttgccatttttggcattagaatgcttcgggaaggcttaaagatgagccctgatgagggtcaagaggaactggaagaagttcaagctgaattaaagaagaaagatgaagaatttcaacgaaccaaacttttaaatggaccgggagatgttgaaacgggtacaagcataacagtacctcagaaaaagtggttgcattttatttcacccatttttgttcaagctcttacattaacattcttagcagaatggggtgatcgctctcaactaactacaattgtattggcagctagagaggtgagtgatatttgagaggagactgtttaaaatgaaacgtaattattattactttgttccagaaaacactggacacactgaagtgggccacagcattccttcatatgcaagactgttttacatctgataattcagctgctctctaaaattggccttctcccagttcctgctacctgcaggacccctatggtgtagccgtgggtggaactgtggggcactgcctgtgcacgggattggcagtaattggaggaagaatgatagcacagaaaatctctgtcagaactggtagtttctctccctggctcatcttgcatgcttgctctgatggaaaaggtcacctggaaaggaactgaggatagccttcagccagcaagaaaccaaggccctcagtccaactgcccatgaggaactgaagtgtgccagcaaccactaagtgaggtggaaacagatgccacctcagttgaactttgagatgactgtggctcccaccaacaccttgattacagcctcatgaaagaatctgaagtagagggtccagctaaactgtgcctggactcttgactcaccaaactaggagataacaagtgtgttgttttatatcactaaatt

SEQ ID NO: 356836 - DNA, 2094 bp, Homo sapiens
acggggccgggaggagtcggggctgggccgcgccgaggcagctggctgactccagtttagccgccgccggagaggacgggcgccgagccggggctgcggacttcggcctgcccctcacctcactcccgctgcttgcacctcccggatggtgctgactgctccctaagcggcggcggcggcgagtcgtgaggacgcgccgcggaggctgttcggggtcgaggcttcccgtcgccggcacttcctcttgcggcgcccgtgcgcggccggcccggcaggcgggatggcggccgcggctccagggaacggccgcgcatcggcgccccggctgcttctgctctttctggttccgctgctgtgggccccggctgcggtccgggccggcccagatgaagaccttagccaccggaacaaagaaccgccggcgccggcccagcagctgcagccgcagcctgtggctgtgcagggccccgagccggcccgggtcgagaaaatatttacaccagcagctccagttcataccaataaagaagatcctgctacccaaactaatttgggatttatccatgcatttgtcgctgccatatcagttattattgtatctgaattgggtgataagacattttttatagcagccatcatggcaatgcgctataaccgcctgaccgtgctggctggtgcaatgcttgccttgggactaatgacatgcttgtcagagacaggatttcgccatgttgaccagtggtctcaagctcctgggctcaagtaatccgcccgactcggtctcccaaagtgctgggattacaggcatgagccaccgtgcctggccagattttgtttggctatgccaccacagtcatccccagggtctatacatactatgtttcaactgtattatttgccatttttggcattagaatgcttcgggaaggcttaaagatgagccctgatgagggtcaagaggaactggaagaagttcaagctgaattaaagaagaaagatgaagaatttcaacgaaccaaacttttaaatggaccgggagatgttgaaacgggtacaagcataacagtacctcagaaaaagtggttgcattttatttcacccatttttgttcaagctcttacattaacattcttagcagaatggggtgatcgctctcaactaactacaattgtattggcagctagagaggacccctatggtgtagccgtgggtggaactgtggggcactgcctgtgcacgggattggcagtaattggaggaagaatgatagcacagaaaatctctgtcagaactgtgacaatcataggaggcatcgtttttttggcgtttgcattttctgcactatttataagccctgattctggtttttaacaagctgtttgttcatctatatttagtttaaaataggtagtattatctttctgtacatagtgtacattacaactaaaagtgatggaaaaatactgtattttgtagcactgattttgtgagtttgacccattattatgtctgagatataatcattgattctatttgtaacaaggagttttaaaagaaacctgacttctaagtgtgggtttttcttctctccaacataattatgttaatatggtcctcatttttcttttggtgcagaaccgttgtgcagtggggtctaccatgcaattttctttcagcactgacccctttttaaggaatacaaattttctccttcatcacttaggtgttttaagatgtttaccttaaagtttttcttggggaaagaatgaattaatttctatttcttaaaacatttccctgagccagtaaacagtagtttaatcattggtcttttcaaaactaggtgtttaaaaaaagagacatatatgatattgctgttatatcaataacatggcacaacaagaactgtctgccaggtcattcttcctcttttttttttaattgggtaggacacccaatataaaaacagtcaatatttgacaatgtggaattaccaaattaaaagagaatactatgaatgtattcatattttttctatattgaataaacaatgtaacatagataacaatataaataaaagtggtatgaccagtg

SEQ ID NO: 356837 - DNA, 1857 bp, Homo sapiens
gaatgtttgagcctgttgtaacattattttaatataataagaaatttttagatttttttcataaaacgtacttattttaaatagttacaagggagcagagtttaaatcttgctatgtgagacttttgtcatgattcttcactagaagtttgtgatttaaagatttgtgatgaagaaattccactatgcaagtggcatggcttcccagttataaaatctcagctcttgagagggcctcagagctaacttctaccccaggtactgtgccttgcacaacataaggcaagccagcctctgactgaacatgcctggaaaggagttcaatatcttacttaacatctctcaggaagatgtgccatcttcaactggaccattggcttctgagtaagctgtgttaggcctgggctagacctaatggtttattattggtggagagaaagatctggaaatacttgaggttattacatactagattagcttctaatgtgaaccatttttcttttaacagtgataaattattatttccgaagttaactgttcccttggtcgtgatacacactcgattaacaaacatactgttgtattttttccagttttgtttggctatgccaccacagtcatccccagggtctatacatactatgtttcaactgtattatttgccatttttggcattagaatgcttcgggaaggcttaaagatgagccctgatgagggtcaagaggaactggaagaagttcaagctgaattaaagaagaaagatgaagaatttcaacgaaccaaacttttaaatggaccgggagatgttgaaacgggtacaagcataacagtacctcagaaaaagtggttgcattttatttcacccatttttgttcaagctcttacattaacattcttagcagaatggggtgatcgctctcaactaactacaattgtattggcagctagagaggacccctatggtgtagccgtgggtggaactgtggggcactgcctgtgcacgggattggcagtaattggaggaagaatgatagcacagaaaatctctgtcagaactgtgacaatcataggaggcatcgtttttttggcgtttgcattttctgcactatttataagccctgattctggtttttaacaagctgtttgttcatctatatttagtttaaaataggtagtattatctttctgtacatagtgtacattacaactaaaagtgatggaaaaatactgtattttgtagcactgattttgtgagtttgacccattattatgtctgagatataatcattgattctatttgtaacaaggagttttaaaagaaacctgacttctaagtgtgggtttttcttctctccaacataattatgttaatatggtcctcatttttcttttggtgcagaaccgttgtgcagtggggtctaccatgcaattttctttcagcactgacccctttttaaggaatacaaattttctccttcatcacttaggtgttttaagatgtttaccttaaagtttttcttggggaaagaatgaattaatttctatttcttaaaacatttccctgagccagtaaacagtagtttaatcattggtcttttcaaaactaggtgtttaaaaaaagagacatatatgatattgctgttatatcaataacatggcacaacaagaactgtctgccaggtcattcttcctcttttttttttaattgggtaggacacccaatataaaaacagtcaatatttgacaatgtggaattaccaaattaaaagagaatactatgaatgtattcatattttttctatattgaataaacaatgtaacatagataacaatataaataaaagtggtatgaccagtg

SEQ ID NO: 356838 - DNA, 2573 bp, Homo sapiens
gaatgtttgagcctgttgtaacattattttaatataataagaaatttttagatttttttcataaaacgtacttattttaaatagttacaagggagcagagtttaaatcttgctatgtgagacttttgtcatgattcttcactagaagtttgtgatttaaagatttgtgatgaagaaattccactatgcaagtggcatggcttcccagttataaaatctcagctcttgagagggcctcagagctaacttctaccccaggtactgtgccttgcacaacataaggcaagccagcctctgactgaacatgcctggaaaggagttcaatatcttacttaacatctctcaggaagatgtgccatcttcaactggaccattggcttctgagtaagctgtgttaggcctgggctagacctaatggtttattattggtggagagaaagatctggaaatacttgaggttattacatactagattagcttctaatgtgaaccatttttcttttaacagtgataaattattatttccgaagttaactgttcccttggtcgtgatacacactcgattaacaaacatactgttgtattttttccagttttgtttggctatgccaccacagtcatccccagggtctatacatactatgtttcaactgtattatttgccatttttggcattagaatgcttcgggaaggcttaaagatgagccctgatgagggtcaagaggaactggaagaagttcaagctgaattaaagaagaaagatgaagaatttcaacgaaccaaacttttaaatggaccgggagatgttgaaacggaaaacactggacacactgaagtgggccacagcattccttcatatgcaagactgttttacatctgataattcagctgctctctaaaattggccttctcccagttcctgctacctgcaggacccctatggtgtagccgtgggtggaactgtggggcactgcctgtgcacgggattggcagtaattggaggaagaatgatagcacagaaaatctctgtcagaactggtaagtcttgaaaattacaaatcagataacattttagaatcactgagagattaaagggtgttagctttgattatttaaatttctgctgctgaagtatacttggtttttctaattacctaccatctcttataataagaggtattaatcctggtattgcaaatacggacttttttcacctgtgtagaagttagcaaaatacaaagtcatttttatcgaattcatagtagcttcttgttaacatattatcttagtaaaacaattgtcatttggaagtatgagaagtttttggctctaaaaatgtgtcttacaagactggaatcatgtggagaccatatgtactgattctgctgaatatgtcctgtgaagccacagttaggtctagagatggaagaatcgtctctttgctagtcagaagacctgaacattttcttttataactggattttaagatgagttatagttctactgttgcttgccagcactgtctggatttaatacaatcctgtcatttctcaaaacagtgctggagaaaacctgattcttagtgttcacagtcaagcatgttaagtattgttccttgttatgtaaaaggggttgaagtgattctaatttgttttcaaggttagtttaatagattggaagaataattggccgcctcatcggctcccttttcattttgtacagtatcaaggtataggaattttactgtatttgactttttttctctctcttccagtgacaatcataggaggcatcgtttttttggcgtttgcattttctgcactatttataagccctgattctggtttttaacaagctgtttgttcatctatatttagtttaaaataggtagtattatctttctgtacatagtgtacattacaactaaaagtgatggaaaaatactgtattttgtagcactgattttgtgagtttgacccattattatgtctgagatataatcattgattctatttgtaacaaggagttttaaaagaaacctgacttctaagtgtgggtttttcttctctccaacataattatgttaatatggtcctcatttttcttttggtgcagaaccgttgtgcagtggggtctaccatgcaattttctttcagcactgacccctttttaaggaatacaaattttctccttcatcacttaggtgttttaagatgtttaccttaaagtttttcttggggaaagaatgaattaatttctatttcttaaaacatttccctgagccagtaaacagtagtttaatcattggtcttttcaaaactaggtgtttaaaaaaagagacatatatgatattgctgttatatcaataacatggcacaacaagaactgtctgccaggtcattcttcctcttttttttttaattgggtaggacacccaatataaaaacagtcaatatttgacaatgtggaattaccaaattaaaagagaatactatgaatgtattcatattttttctatattgaataaacaatgtaacatagataacaatataaataaaagtggtatgaccagtg

SEQ ID NO: 356839 - DNA, 1393 bp, Homo sapiens
acggggccgggaggagtcggggctgggccgcgccgaggcagctggctgactccagtttagccgccgccggagaggacgggcgccgagccggggctgcggacttcggcctgcccctcacctcactcccgctgcttgcacctcccggatggtgctgactgctccctaagcggcggcggcggcgagtcgtgaggacgcgccgcggaggctgttcggggtcgaggcttcccgtcgccggcacttcctcttgcggcgcccgtgcgcggccggcccggcaggcgggatggcggccgcggctccagggaacggccgcgcatcggcgccccggctgcttctgctctttctggttccgctgctgtgggccccggctgcggtccgggccggcccagatgaagaccttagccaccggaacaaagaaccgccggcgccggcccagcagctgcagccgcagcctgtggctgtgcagggccccgagccggcccgggtcgaggacccctatggtgtagccgtgggtggaactgtggggcactgcctgtgcacgggattggcagtaattggaggaagaatgatagcacagaaaatctctgtcagaactgtgacaatcataggaggcatcgtttttttggcgtttgcattttctgcactatttataagccctgattctggtttttaacaagctgtttgttcatctatatttagtttaaaataggtagtattatctttctgtacatagtgtacattacaactaaaagtgatggaaaaatactgtattttgtagcactgattttgtgagtttgacccattattatgtctgagatataatcattgattctatttgtaacaaggagttttaaaagaaacctgacttctaagtgtgggtttttcttctctccaacataattatgttaatatggtcctcatttttcttttggtgcagaaccgttgtgcagtggggtctaccatgcaattttctttcagcactgacccctttttaaggaatacaaattttctccttcatcacttaggtgttttaagatgtttaccttaaagtttttcttggggaaagaatgaattaatttctatttcttaaaacatttccctgagccagtaaacagtagtttaatcattggtcttttcaaaactaggtgtttaaaaaaagagacatatatgatattgctgttatatcaataacatggcacaacaagaactgtctgccaggtcattcttcctcttttttttttaattgggtaggacacccaatataaaaacagtcaatatttgacaatgtggaattaccaaattaaaagagaatactatgaatgtattcatattttttctatattgaataaacaatgtaacatagataacaatataaataaaagtggtatgaccagtg

SEQ ID NO: 356840 - DNA, 2127 bp, Homo sapiens
cataaatgtagtttttttggagcatatttcatagaatttaaacacttagaaaagtcaagtgatttgtgtgctattttgatttgcttcctgtgcttactttcatttgtttattatttattttagtttcaacgaaccaaacttttaaatggaccgggagatgttgaaacgggtacaagcataacagtacctcagaaaaagtggttgcattttatttcacccatttttgttcaagctcttacattaacattcttagcagaatggggtgatcgctctcaactaactacaattgtattggcagctagagaggtgagtgatatttgagaggagactgtttaaaatgaaacgtaattattattactttgttccagaaaacactggacacactgaagtgggccacagcattccttcatatgcaagactgttttacatctgataattcagctgctctctaaaattggccttctcccagttcctgctacctgcaggacccctatggtgtagccgtgggtggaactgtggggcactgcctgtgcacgggattggcagtaattggaggaagaatgatagcacagaaaatctctgtcagaactggtaagtcttgaaaattacaaatcagataacattttagaatcactgagagattaaagggtgttagctttgattatttaaatttctgctgctgaagtatacttggtttttctaattacctaccatctcttataataagaggtattaatcctggtattgcaaatacggacttttttcacctgtgtagaagttagcaaaatacaaagtcatttttatcgaattcatagtagcttcttgttaacatattatcttagtaaaacaattgtcatttggaagtatgagaagtttttggctctaaaaatgtgtcttacaagactggaatcatgtggagaccatatgtactgattctgctgaatatgtcctgtgaagccacagttaggtctagagatggaagaatcgtctctttgctagtcagaagacctgaacattttcttttataactggattttaagatgagttatagttctactgttgcttgccagcactgtctggatttaatacaatcctgtcatttctcaaaacagtgctggagaaaacctgattcttagtgttcacagtcaagcatgttaagtattgttccttgttatgtaaaaggggttgaagtgattctaatttgttttcaaggttagtttaatagattggaagaataattggccgcctcatcggctcccttttcattttgtacagtatcaaggtataggaattttactgtatttgactttttttctctctcttccagtgacaatcataggaggcatcgtttttttggcgtttgcattttctgcactatttataagccctgattctggtttttaacaagctgtttgttcatctatatttagtttaaaataggtagtattatctttctgtacatagtgtacattacaactaaaagtgatggaaaaatactgtattttgtagcactgattttgtgagtttgacccattattatgtctgagatataatcattgattctatttgtaacaaggagttttaaaagaaacctgacttctaagtgtgggtttttcttctctccaacataattatgttaatatggtcctcatttttcttttggtgcagaaccgttgtgcagtggggtctaccatgcaattttctttcagcactgacccctttttaaggaatacaaattttctccttcatcacttaggtgttttaagatgtttaccttaaagtttttcttggggaaagaatgaattaatttctatttcttaaaacatttccctgagccagtaaacagtagtttaatcattggtcttttcaaaactaggtgtttaaaaaaagagacatatatgatattgctgttatatcaataacatggcacaacaagaactgtctgccaggtcattcttcctcttttttttttaattgggtaggacacccaatataaaaacagtcaatatttgacaatgtggaattaccaaattaaaagagaatactatgaatgtattcatattttttctatattgaataaacaatgtaacatagataacaatataaataaaagtggtatgaccagtg

SEQ ID NO: 356841 - DNA, 1837 bp, Homo sapiens
gaatgtttgagcctgttgtaacattattttaatataataagaaatttttagatttttttcataaaacgtacttattttaaatagttacaagggagcagagtttaaatcttgctatgtgagacttttgtcatgattcttcactagaagtttgtgatttaaagatttgtgatgaagaaattccactatgcaagtggcatggcttcccagttataaaatctcagctcttgagagggcctcagagctaacttctaccccaggtactgtgccttgcacaacataaggcaagccagcctctgactgaacatgcctggaaaggagttcaatatcttacttaacatctctcaggaagatgtgccatcttcaactggaccattggcttctgagtaagctgtgttaggcctgggctagacctaatggtttattattggtggagagaaagatctggaaatacttgaggttattacatactagattagcttctaatgtgaaccatttttcttttaacagtgataaattattatttccgaagttaactgttcccttggtcgtgatacacactcgattaacaaacatactgttgtattttttccagttttgtttggctatgccaccacagtcatccccagggtctatacatactatgtttcaactgtattatttgccatttttggcattagaatgcttcgggaaggcttaaagatgagccctgatgagggtcaagaggaactggaagaagttcaagctgaattaaagaagaaagatgaagaatttcaacgaaccaaacttttaaatggaccgggagatgttgaaacggaaaacactggacacactgaagtgggccacagcattccttcatatgcaagactgttttacatctgataattcagctgctctctaaaattggccttctcccagttcctgctacctgcaggacccctatggtgtagccgtgggtggaactgtggggcactgcctgtgcacgggattggcagtaattggaggaagaatgatagcacagaaaatctctgtcagaactgtgacaatcataggaggcatcgtttttttggcgtttgcattttctgcactatttataagccctgattctggtttttaacaagctgtttgttcatctatatttagtttaaaataggtagtattatctttctgtacatagtgtacattacaactaaaagtgatggaaaaatactgtattttgtagcactgattttgtgagtttgacccattattatgtctgagatataatcattgattctatttgtaacaaggagttttaaaagaaacctgacttctaagtgtgggtttttcttctctccaacataattatgttaatatggtcctcatttttcttttggtgcagaaccgttgtgcagtggggtctaccatgcaattttctttcagcactgacccctttttaaggaatacaaattttctccttcatcacttaggtgttttaagatgtttaccttaaagtttttcttggggaaagaatgaattaatttctatttcttaaaacatttccctgagccagtaaacagtagtttaatcattggtcttttcaaaactaggtgtttaaaaaaagagacatatatgatattgctgttatatcaataacatggcacaacaagaactgtctgccaggtcattcttcctcttttttttttaattgggtaggacacccaatataaaaacagtcaatatttgacaatgtggaattaccaaattaaaagagaatactatgaatgtattcatattttttctatattgaataaacaatgtaacatagataacaatataaataaaagtggtatgaccagtg

SEQ ID NO: 356842 - DNA, 1902 bp, Homo sapiens
  misc_feature (1)..(5): n is a, c, g, or t
  misc_feature (8)..(9): n is a, c, g, or t
  misc_feature (788)..(788): n is a, c, g, or t
  misc_feature (865)..(865): n is a, c, g, or t
nnnnncgnntagctgggaccacttgtgcttgctaggatgcctggctaatttttaatttttttgtagagatgaggtcccactgtgttgcctaggctagtctcaaactgccaggctcaagcaatcctcttgcttcagcctcccaaagtgttgggattacaggcatgagccactgcacctggcctagcggatttctgaagcattaatctgttctgttactttccagctaaaaaccaacaagtgtctgaggacacagtttaaactccaagatgatagggtcctccctcacctgggctcccacctaccctcatgacctccttttgtgaaatgctgaagggctctgcagctggttgtctggtactgctggcctttgctttctatttagcatgttccttctcccacaaaacaaaatcacattctcactatgccctgttcattcttcaggactatcttctgggaaacttttactacatacccctctccccctaatctgagtgtctgctttgctcaggtagcatgtgttcactggataaatccttgattcctggcactgaggcagggtttctgttcccaggaagcagaggcatactattctgtgaaggattgactgagtttctcctaataccaagcagtatctgagggaacagatgtctagcttaaaatcctccctagcacttgtcatagcagtgctacgtattgcctgtgaaggaagtttaataactgctgaaaggctcgattagctttatttcatcaggatttgtttgactttacaaattgatttgggttatttnaacttttaggtctagtcttaagtataactggtacatattccttcaagcagccattacacctttcataaatttattanacacctgcatttttataactattatgctttttaattgttggccaccatttttagtgcttctgaattgttatggttctcaagcagcagttgtcaccttggttttgaattaatgctgtgacgcttgcttccaggacccctatggtgtagccgtgggtggaactgtggggcactgcctgtgcacgggattggcagtaattggaggaagaatgatagcacagaaaatctctgtcagaactgtgacaatcataggaggcatcgtttttttggcgtttgcattttctgcactatttataagccctgattctggtttttaacaagctgtttgttcatctatatttagtttaaaataggtagtattatctttctgtacatagtgtacattacaactaaaagtgatggaaaaatactgtattttgtagcactgattttgtgagtttgacccattattatgtctgagatataatcattgattctatttgtaacaaggagttttaaaagaaacctgacttctaagtgtgggtttttcttctctccaacataattatgttaatatggtcctcatttttcttttggtgcagaaccgttgtgcagtggggtctaccatgcaattttctttcagcactgacccctttttaaggaatacaaattttctccttcatcacttaggtgttttaagatgtttaccttaaagtttttcttggggaaagaatgaattaatttctatttcttaaaacatttccctgagccagtaaacagtagtttaatcattggtcttttcaaaactaggtgtttaaaaaaagagacatatatgatattgctgttatatcaataacatggcacaacaagaactgtctgccaggtcattcttcctcttttttttttaattgggtaggacacccaatataaaaacagtcaatatttgacaatgtggaattaccaaattaaaagagaatactatgaatgtattcatattttttctatattgaataaacaatgtaacatagataacaatataaataaaagtggtatgaccagtg

SEQ ID NO: 356843 - DNA, 1602 bp, Homo sapiens
acggggccgggaggagtcggggctgggccgcgccgaggcagctggctgactccagtttagccgccgccggagaggacgggcgccgagccggggctgcggacttcggcctgcccctcacctcactcccgctgcttgcacctcccggatggtgctgactgctccctaagcggcggcggcggcgagtcgtgaggacgcgccgcggaggctgttcggggtcgaggcttcccgtcgccggcacttcctcttgcggcgcccgtgcgcggccggcccggcaggcgggatggcggccgcggctccagggaacggccgcgcatcggcgccccggctgcttctgctctttctggttccgctgctgtgggccccggctgcggtccgggccggcccagatgaagaccttagccaccggaacaaagaaccgccggcgccggcccagcagctgcagccgcagcctgtggctgtgcagggccccgagccggcccgggtcgaggtgagcgggccgggatggggcgagcgaggctgcagggccggctgcgccgagtaccaggctccaggcctttgaaagcgccgcactccgccggcctcggctgggggaggggagcccggcccctgctcccggggtggagggcggtcggctgcgctgttttccggtgaggcctggtcttgcccgctcctttagggaaagggagagggagagtccaagaggagcccgctataaacgttgatctccggagggccaagatgctgctccgggatgggcgttttattgatcagatgtgtcttagagtagctagaaagactcatccctaccaaaaagtttttaacagaaggctgctaggaggctttttgtattccctgaggatcatcacatcggccatttcattgttgaaatagcttatgccaaactgcttacccaaattcaacttggcactgcctgtgctttttgccaaatatggattatgaaccatgactctcactttttaaaaatgtgctttggctagcaggaagtagcctttaggaacgcagaggaattagtctccggcagtacagcgtgctgcagcgatgtgggatgccaaaactacatttataagtaaaacagaatcctgtattttgtccttccctgaatagatactagaaatcaactttttaatctgttaatagaattagtccttagtcacttggcagcgttttaacatttctcccttctcccagtcgtgggctttgtcgtcatttccagtatctgctccctgaatcccggccagtgtggcactcaaacccccactcccacccaggccacatccagcccatctccacgtaactaatcttcccgaacattgaattctgccatcttgtcagaagtcgtcggtgagttgcctccactaatttcagtccagcctttttaggagagtgatgttcaggtttcttctgatctggctccagctcacctccaggctttttagccaccgctttcttgctcatatgctaaagggatatgctcatctgcaaaaaagaatgtgcttcaagagccctttgggacaggctttgtgctctcttgccagttcctccctaacacaagaccttttcaaagaaaaaaaaaaaaagacc

SEQ ID NO: 356844 - DNA, 880 bp, Homo sapiens
acggggccgggaggagtcggggctgggccgcgccgaggcagctggctgactccagtttagccgccgccggagaggacgggcgccgagccggggctgcggacttcggcctgcccctcacctcactcccgctgcttgcacctcccggatggtgctgactgctccctaagcggcggcggcggcgagtcgtgaggacgcgccgcggaggctgttcggggtcgaggcttcccgtcgccggcacttcctcttgcggcgcccgtgcgcggccggcccggcaggcgggatggcggccgcggctccagggaacggccgcgcatcggcgccccggctgcttctgctctttctggttccgctgctgtgggccccggctgcggtccgggccggcccagatgaagaccttagccaccggaacaaagaaccgccggcgccggcccagcagctgcagccgcagcctgtggctgtgcagggccccgagccggcccgggtcgagtcgtgggctttgtcgtcatttccagtatctgctccctgaatcccggccagtgtggcactcaaacccccactcccacccaggccacatccagcccatctccacgtaactaatcttcccgaacattgaattctgccatcttgtcagaagtcgtcggtgagttgcctccactaatttcagtccagcctttttaggagagtgatgttcaggtttcttctgatctggctccagctcacctccaggctttttagccaccgctttcttgctcatatgctaaagggatatgctcatctgcaaaaaagaatgtgcttcaagagccctttgggacaggctttgtgctctcttgccagttcctccctaacacaagaccttttcaaagaaaaaaaaaaaaagacc

SEQ ID NO: 356845 - DNA, 220 bp, Homo sapiens
atagataacaatataaataaaagtggtatgaccagtgcttgtttttccttgtgtgtcatataaaattatcagtattgataggccaatttctaaagctgatgtaaaaacactaacatattaaatatttgagatatgcctaaagtagctaaacaggagccaggcattgttcgaaagcattgtcacccttacagttctgtgaggtagtaggtactaatataag

SEQ ID NO: 356846 - DNA, 1892 bp, Homo sapiens
gcacgaggcaggccgaagtccgcagccccggctcggctcccgctgcttgcacctcccggatggtgctgactgctccctaagcggcggcggcggcgagtcgtgaggacgcgccgcggaggctgttcggggtcgaggcttcccgtcgccggcacttcctcttgcggcgcccgtgcgcggccggcccggcaggcgggatggcggccgcggctccagggaacggccgcgcatcggcgccccggctgcttctgctctttctggttccgctgctgtgggccccggctgcggtccgggccggcccagatgaagaccttagccaccggaacaaagaaccgccggcgccggcccagcagctgcagccgcagcctgtggctgtgcagggccccgagccggcccgggtcgagaaaatatttacaccagcagctccagttcataccaataaagaagatcctgctacccaaactaatttgggatttatccatgcatttgtcgctgccatatcagttattattgtatctgaattgggtgataagacattttttatagcagccatcatggcaatgcgctataaccgcctgaccgtgctggctggtgcaatgcttgccttgggactaatgacatgcttgtcagttttgtttggctatgccaccacagtcatccccagggtctatacatactatgtttcaactgtattatttgccatttttggcattagaatgcttcgggaaggcttaaagatgagccctgatgagggtcaagaggaactggaagaagttcaagctgaattaaagaagaaagatgaagaatttcaacgaaccaaacttttaaatggaccgggagatgttgaaacgggtacaagcataacagtacctcagaaaaagtggttgcattttatttcacccatttttgttcaagctcttacattaacattcttagcagaatggggtgatcgctctcaactaactacaattgtattggcagctagagaggacccctatggtgtagccgtgggtggaactgtggggcactgcctgtgcacgggattggcagtaattggaggaagaatgatagcacagaaaatctctgtcagaactgtgacaatcataggaggcatcgtttttttggcgtttgcattttctgcactatttataagccctgattctggtttttaacaagctgtttgttcatctatatttagtttaaaataggtagtattatctttctgtacatagtgtacattacaactaaaagtgatggaaaaatactgtattttgtagcactgattttgtgagtttgacccattattatgtctgagatataatcattgattctatttgtaacaaggagttttaaaagaaacctgacttctaagtgtgggtttttcttctctccaacataattatgttaatatggtcctcatttttcttttggtgcagaaccgttgtgcagtggggtctaccatgcaattttctttcagcactgacccctttttaaggaatacaaattttctccttcatcacttaggtgttttaagatgtttaccttaaagtttttcttggggaaagaatgaattaatttctatttcttaaaacatttccctgagccagtaaacagtagtttaatcattggtcttttcaaaactaggtgtttaaaaaaagagacatatatgatattgctgttatatcaataacatggcacaacaagaactgtctgccaggtcattcttcctcttttttttttaattgggtaggacacccaatataaaaacagtcaatatttgacaatgtggaattaccaaattaaaagagaatactatgaatgtattcatattttttctatattgaataaacaatgtaacatagataacaatataaataaaagtggtatgaccagtg

SEQ ID NO: 356847 - DNA, 2092 bp, Homo sapiens
acggggccgggaggagtcggggctgggccgcgccgaggcagctggctgactccagtttagccgccgccggagaggacgggcgccgagccggggctgcggacttcggcctgcccctcacctcactcccgctgcttgcacctcccggatggtgctgactgctccctaagcggcggcggcggcgagtcgtgaggacgcgccgcggaggctgttcggggtcgaggcttcccgtcgccggcacttcctcttgcggcgcccgtgcgcggccggcccggcaggcgggatggcggccgcggctccagggaacggccgcgcatcggcgccccggctgcttctgctctttctggttccgctgctgtgggccccggctgcggtccgggccggcccagatgaagaccttagccaccggaacaaagaaccgccggcgccggcccagcagctgcagccgcagcctgtggctgtgcagggccccgagccggcccgggtcgagaaaatatttacaccagcagctccagttcataccaataaagaagatcctgctacccaaactaatttgggatttatccatgcatttgtcgctgccatatcagttattattgtatctgaattgggtgataagacattttttatagcagccatcatggcaatgcgctataaccgcctgaccgtgctggctggtgcaatgcttgccttgggactaatgacatgcttgtcagttttgtttggctatgccaccacagtcatccccagggtctatacatactatgtttcaactgtattatttgccatttttggcattagaatgcttcgggaaggcttaaagatgagccctgatgagggtcaagaggaactggaagaagttcaagctgaattaaagaagaaagatgaagaatttcaacgaaccaaacttttaaatggaccgggagatgttgaaacgggtacaagcataacagtacctcagaaaaagtggttgcattttatttcacccatttttgttcaagctcttacattaacattcttagcagaatggggtgatcgctctcaactaactacaattgtattggcagctagagaggacccctatggtgtagccgtgggtggaactgtggggcactgcctgtgcacgggattggcagtaattggaggaagaatgatagcacagaaaatctctgtcagaactgtgacaatcataggaggcatcgtttttttggcgtttgcattttctgcactatttataagccctgattctggtttttaacaagctgtttgttcatctatatttagtttaaaataggtagtattatctttctgtacatagtgtacattacaactaaaagtgatggaaaaatactgtattttgtagcactgattttgtgagtttgacccattattatgtctgagatataatcattgattctatttgtaacaaggagttttaaaagaaacctgacttctaagtgtgggtttttcttctctccaacataattatgttaatatggtcctcatttttcttttggtgcagaaccgttgtgcagtggggtctaccatgcaattttctttcagcactgacccctttttaaggaatacaaattttctccttcatcacttaggtgttttaagatgtttaccttaaagtttttcttggggaaagaatgaattaatttctatttcttaaaacatttccctgagccagtaaacagtagtttaatcattggtcttttcaaaactaggtgtttaaaaaaagagacatatatgatattgctgttatatcaataacatggcacaacaagaactgtctgccaggtcattcttcctcttttttttttaattgggtaggacacccaatataaaaacagtcaatatttgacaatgtggaattaccaaattaaaagagaatactatgaatgtattcatattttttctatattgaataaacaatgtaacatagataacaatataaataaaagtggtatgaccagtgaaaaaaaaaaaaaaaaaaaaaaaaaaaaaaaaaaaaaaaaaaaaaaaaaaaaaaaaaaaaaaaaaaaaaaaaaaaaaaaaaaaaaaaaaaaaaaaaaaaaaaaaaaaaaaaaag

SEQ ID NO: 356848 - DNA, 2157 bp, Homo sapiens
acggggccgggaggagtcggggctgggccgcgccgaggcagctggctgactccagtttagccgccgccggagaggacgggcgccgagccggggctgcggacttcggcctgcccctcacctcactcccgctgcttgcacctcccggatggtgctgactgctccctaagcggcggcggcggcgagtcgtgaggacgcgccgcggaggctgttcggggtcgaggcttcccgtcgccggcacttcctcttgcggcgcccgtgcgcggccggcccggcaggcgggatggcggccgcggctccagggaacggccgcgcatcggcgccccggctgcttctgctctttctggttccgctgctgtgggccccggctgcggtccgggccggcccagatgaagaccttagccaccggaacaaagaaccgccggcgccggcccagcagctgcagccgcagcctgtggctgtgcagggccccgagccggcccgggtcgagaaaatatttacaccagcagctccagttcataccaataaagaagatcctgctacccaaactaatttgggatttatccatgcatttgtcgctgccatatcagttattattgtatctgaattgggtgataagacattttttatagcagccatcatggcaatgcgctataaccgcctgaccgtgctggctggtgcaatgcttgccttgggactaatgacatgcttgtcagttttgtttggctatgccaccacagtcatccccagggtctatacatactatgtttcaactgtattatttgccatttttggcattagaatgcttcgggaaggcttaaagatgagccctgatgagggtcaagaggaactggaagaagttcaagctgaattaaagaagaaagatgaagaatttcaacgaaccaaacttttaaatggaccgggagatgttgaaacgggtacaagcataacagtacctcagaaaaagtggttgcattttatttcacccatttttgttcaagctcttacattaacattcttagcagaatggggtgatcgctctcaactaactacaattgtattggcagctagagaggtgagtgatatttgagaggagactgtttaaaatgaaacgtaattattattactttgttccagaaaacactggacacactgaagtgggccacagcattccttcatatgcaagactgttttacatctgataattcagctgctctctaaaattggccttctcccagttcctgctacctgcaggacccctatggtgtagccgtgggtggaactgtggggcactgcctgtgcacgggattggcagtaattggaggaagaatgatagcacagaaaatctctgtcagaactgtgacaatcataggaggcatcgtttttttggcgtttgcattttctgcactatttataagccctgattctggtttttaacaagctgtttgttcatctatatttagtttaaaataggtagtattatctttctgtacatagtgtacattacaactaaaagtgatggaaaaatactgtattttgtagcactgattttgtgagtttgacccattattatgtctgagatataatcattgattctatttgtaacaaggagttttaaaagaaacctgacttctaagtgtgggtttttcttctctccaacataattatgttaatatggtcctcatttttcttttggtgcagaaccgttgtgcagtggggtctaccatgcaattttctttcagcactgacccctttttaaggaatacaaattttctccttcatcacttaggtgttttaagatgtttaccttaaagtttttcttggggaaagaatgaattaatttctatttcttaaaacatttccctgagccagtaaacagtagtttaatcattggtcttttcaaaactaggtgtttaaaaaaagagacatatatgatattgctgttatatcaataacatggcacaacaagaactgtctgccaggtcattcttcctcttttttttttaattgggtaggacacccaatataaaaacagtcaatatttgacaatgtggaattaccaaattaaaagagaatactatgaatgtattcatattttttctatattgaataaacaatgtaacatagataacaatataaataaaagtggtatgaccagtg

SEQ ID NO: 356849 - DNA, 2081 bp, Homo sapiens
acggggccgggaggagtcggggctgggccgcgccgaggcagctggctgactccagtttagccgccgccggagaggacgggcgccgagccggggctgcggacttcggcctgcccctcacctcactcccgctgcttgcacctcccggatggtgctgactgctccctaagcggcggcggcggcgagtcgtgaggacgcgccgcggaggctgttcggggtcgaggcttcccgtcgccggcacttcctcttgcggcgcccgtgcgcggccggcccggcaggcgggatggcggccgcggctccagggaacggccgcgcatcggcgccccggctgcttctgctctttctggttccgctgctgtgggccccggctgcggtccgggccggcccagatgaagaccttagccaccggaacaaagaaccgccggcgccggcccagcagctgcagccgcagcctgtggctgtgcagggccccgagccggcccgggtcgagggacatcagtttttttcttggtagcaagctgtagattttgtttcaaggaaagcatcttcatcttctctagtttcatcatgtatagatggagattccgatgcagaaaatatttacaccagcagctccagttcataccaataaagaagatcctgctacccaaactaatttgggatttatccatgcatttgtcgctgccatatcagttattattgtatctgaattgggtgataagacattttttatagcagccatcatggcaatgcgctataaccgcctgaccgtgctggctggtgcaatgcttgccttgggactaatgacatgcttgtcagttttgtttggctatgccaccacagtcatccccagggtctatacatactatgtttcaactgtattatttgccatttttggcattagaatgcttcgggaaggcttaaagatgagccctgatgagggtcaagaggaactggaagaagttcaagctgaattaaagaagaaagatgaagaatttcaacgaaccaaacttttaaatggaccgggagatgttgaaacgggtacaagcataacagtacctcagaaaaagtggttgcattttatttcacccatttttgttcaagctcttacattaacattcttagcagaatggggtgatcgctctcaactaactacaattgtattggcagctagagaggacccctatggtgtagccgtgggtggaactgtggggcactgcctgtgcacgggattggcagtaattggaggaagaatgatagcacagaaaatctctgtcagaactgtgacaatcataggaggcatcgtttttttggcgtttgcattttctgcactatttataagccctgattctggtttttaacaagctgtttgttcatctatatttagtttaaaataggtagtattatctttctgtacatagtgtacattacaactaaaagtgatggaaaaatactgtattttgtagcactgattttgtgagtttgacccattattatgtctgagatataatcattgattctatttgtaacaaggagttttaaaagaaacctgacttctaagtgtgggtttttcttctctccaacataattatgttaatatggtcctcatttttcttttggtgcagaaccgttgtgcagtggggtctaccatgcaattttctttcagcactgacccctttttaaggaatacaaattttctccttcatcacttaggtgttttaagatgtttaccttaaagtttttcttggggaaagaatgaattaatttctatttcttaaaacatttccctgagccagtaaacagtagtttaatcattggtcttttcaaaactaggtgtttaaaaaaagagacatatatgatattgctgttatatcaataacatggcacaacaagaactgtctgccaggtcattcttcctcttttttttttaattgggtaggacacccaatataaaaacagtcaatatttgacaatgtggaattaccaaattaaaagagaatactatgaatgtattcatattttttctatattgaataaacaatgtaacatagataacaatataaataaaagtggtatgaccagtg

SEQ ID NO: 356850 - DNA, 1502 bp, Homo sapiens
acggggccgggaggagtcggggctgggccgcgccgaggcagctggctgactccagtttagccgccgccggagaggacgggcgccgagccggggctgcggacttcggcctgcccctcacctcactcccgctgcttgcacctcccggatggtgctgactgctccctaagcggcggcggcggcgagtcgtgaggacgcgccgcggaggctgttcggggtcgaggcttcccgtcgccggcacttcctcttgcggcgcccgtgcgcggccggcccggcaggcgggatggcggccgcggctccagggaacggccgcgcatcggcgccccggctgcttctgctctttctggttccgctgctgtgggccccggctgcggtccgggccggcccagatgaagaccttagccaccggaacaaagaaccgccggcgccggcccagcagctgcagccgcagcctgtggctgtgcagggccccgagccggcccgggtcgagaaaatatttacaccagcagctccagttcataccaataaagaagatcctgctacccaaactaatttgggatttatccatgcatttgtcgctgccatatcagttattattgtatctgaattgggtgataagacattttttatagcagccatcatggcaatgcgctataaccgcctgaccgtgctggctggtgcaatgcttgccttgggactaatgacatgcttgtcagttttgtttggctatgccaccacagtcatccccagggtctatacatactatgtttcaactgtattatttgccatttttggcattagaatgcttcgggaaggcttaaagatgagccctgatgagggtcaagaggaactggaagaagttcaagctgaattaaagaagaaagatgaagaatttcaacgaaccaaacttttaaatggaccgggagatgttgaaacgggtacaagcataacagtacctcagaaaaagtggttgcattttatttcacccatttttgttcaagctcttacattaacattcttagcagaatggggtgatcgctctcaactaactacaattgtattggcagctagagaggacccctatggtgtagccgtgggtggaactgtggggcactgcctgtgcacgggattggcagtaattggaggaagaatgatagcacagaaaatctctgtcagaactggtagtttctctccctggctcatcttgcatgcttgctctgatggaaaaggtcacctggaaaggaactgaggatagccttcagccagcaagaaaccaaggccctcagtccaactgcccatgaggaactgaagtgtgccagcaaccactaagtgaggtggaaacagatgccacctcagttgaactttgagatgactgtggctcccaccaacaccttgattacagcctcatgaaagaatctgaagtagagggtccagctaaactgtgcctggactcttgactcaccaaactaggagataacaagtgtgttgttttatatcactaaatt

SEQ ID NO: 356851 - DNA, 1609 bp, Homo sapiens
acggggccgggaggagtcggggctgggccgcgccgaggcagctggctgactccagtttagccgccgccggagaggacgggcgccgagccggggctgcggacttcggcctgcccctcacctcactcccgctgcttgcacctcccggatggtgctgactgctccctaagcggcggcggcggcgagtcgtgaggacgcgccgcggaggctgttcggggtcgaggcttcccgtcgccggcacttcctcttgcggcgcccgtgcgcggccggcccggcaggcgggatggcggccgcggctccagggaacggccgcgcatcggcgccccggctgcttctgctctttctggttccgctgctgtgggccccggctgcggtccgggccggcccagatgaagaccttagccaccggaacaaagaaccgccggcgccggcccagcagctgcagccgcagcctgtggctgtgcagggccccgagccggcccgggtcgagaaaatatttacaccagcagctccagttcataccaataaagaagatcctgctacccaaactaatttgggatttatccatgcatttgtcgctgccatatcagttattattgtatctgaattgggtgataagacattttttatagcagccatcatggcaatgcgctataaccgcctgaccgtgctggctggtgcaatgcttgccttgggactaatgacatgcttgtcagttttgtttggctatgccaccacagtcatccccagggtctatacatactatgtttcaactgtattatttgccatttttggcattagaatgcttcgggaaggcttaaagatgagccctgatgagggtcaagaggaactggaagaagttcaagctgaattaaagaagaaagatgaagaatttcaacgaaccaaacttttaaatggaccgggagatgttgaaacgggtacaagcataacagtacctcagaaaaagtggttgcattttatttcacccatttttgttcaagctcttacattaacattcttagcagaatggggtgatcgctctcaactaactacaattgtattggcagctagagaggtgagtgatatttgagaggagactgtttaaaatgaaacgtaattattattactttgttccagaaaacactggacacactgaagtgggccacagcattccttcatatgcaagactgttttacatctgataattcagctgctctctaaaattggccttctcccagttcctgctacctgcaggtgaaattcttgtaaccaagctcagttgggctctttttactcatccttttccctttggttttgccaaaatgatgccgtggtacttgtcatcttagcttggttttcttatcatagaactttcttttttatagttgttgagaatataaatcagtataatattattgaaggccattttggtgtttaatacctaaagccttaaaaatgtgtagctagccgggcttggtggtatgcacctgtagtcccagctactcaggagggttgaggtgggaggattgcttgagcctgggaggttgaggctccagtgagctgtgttcgcgccactgcactccagccttggtgacagggagacccagtctga

SEQ ID NO: 356852 - DNA, 1496 bp, Homo sapiens
acggggccgggaggagtcggggctgggccgcgccgaggcagctggctgactccagtttagccgccgccggagaggacgggcgccgagccggggctgcggacttcggcctgcccctcacctcactcccgctgcttgcacctcccggatggtgctgactgctccctaagcggcggcggcggcgagtcgtgaggacgcgccgcggaggctgttcggggtcgaggcttcccgtcgccggcacttcctcttgcggcgcccgtgcgcggccggcccggcaggcgggatggcggccgcggctccagggaacggccgcgcatcggcgccccggctgcttctgctctttctggttccgctgctgtgggccccggctgcggtccgggccggcccagatgaagaccttagccaccggaacaaagaaccgccggctgcgccgagtaccaggctccaggcctttgaaagcgccgcactccgccggcctcggctgggggaggggagcccggcccctgctcccggggtggagggcggtcggctgcgctgttttccggtgaggcctggtcttgcccgctcctttagggaaagggagagggagagtccaagaggagcccgctataaacgttgatctccggagggccaagatgctgctccgggatgggcgttttattgatcagatgtgtcttagagtagctagaaagactcatccctaccaaaaagtttttaacagaaggctgctaggaggctttttgtattccctgaggatcatcacatcggccatttcattgttgaaatagcttatgccaaactgcttacccaaattcaacttggcactgcctgtgctttttgccaaatatggattatgaaccatgactctcactttttaaaaatgtgctttggctagcaggaagtagcctttaggaacgcagaggaattagtctccggcagtacagcgtgctgcagcgatgtgggatgccaaaactacatttataagtaaaacagaatcctgtattttgtccttccctgaatagatactagaaatcaactttttaatctgttaatagaattagtccttagtcacttggcagcgttttaacatttctcccttctcccagtcgtgggctttgtcgtcatttccagtatctgctccctgaatcccggccagtgtggcactcaaacccccactcccacccaggccacatccagcccatctccacgtaactaatcttcccgaacattgaattctgccatcttgtcagaagtcgtcggtgagttgcctccactaatttcagtccagcctttttaggagagtgatgttcaggtttcttctgatctggctccagctcacctccaggctttttagccaccgctttcttgctcatatgctaaagggatatgctcatctgcaaaaaagaatgtgcttcaagagccctttgggacaggctttgtgctctcttgccagttcctccctaacacaagaccttttcaaagaaaaaaaaaaaaagacc

SEQ ID NO: 356853 - DNA, 529 bp, Homo sapiens
gctcccaggcctttggactccaggacttattccagtgcccctctgtgatctcaggctttcggccttggactgagaattgcaccgtcagttttcctggttctgagatcttcagacttggactgagttacactaccagcaccccagggtctccagcttgcaaatggcctttcatgaaacttagtatccataaccataatgtaaaggtcatgtactgacattgtggagatcttctaaaattcagtgaaataaaagacgaaactaccattaattttaccatccagactgcaccaaaatgttaacaatactgttttctctcctattaataaacctgtacttatattttataaaattgggagcatatttcatacttttataacttgtgtttttcatgtatatcatgaacattttccaagattgttaaatactctgaaaacatgatttttaatagtaatattaaatatttgtaatattccttttgatagtccactatttatcctacatgatctataacataagtataaataaaaac

SEQ ID NO: 356854 - DNA, 2848 bp, Homo sapiens
ttgaaattaccattatagctaattattttattacaatgttttcagaattagatctaggtgacataaaatacacaaaagcataaagccatctgaatagtacagtcaacaagcaacaaccagtacaatcagcaataatagagaacttttaactttgtatgtcacagagaatgtatatacctttttaataaaaagcctgaataaaccaataactattaaagaaatcacaaagctgattaaaaatctactattaaaagtgtcatcaggattagattgttttacactttgtcctagctaacttttaacaaacaaataattctaatgctatttaaattattccagaccacaggaaaaaaattgaaaactcacatattcatatttttttaaagctagcacaacttcaataacaaaacttgataaagatagcatcagaaggacaaaatacaattttactttggaatgaaaatgcaataattctaaattaaatactggtaaataaaatccactcatgtagcaaatcattatttcacaatgaccaagtagtatttgttccagaaatacaagtttggttccacatcaaatgcctaccattctaattcattacatcaacaaattaaagagaaaaaaaatcatacaattttatcaatagatgctgaaaaggcattttataaaattcaggaaccacttctagcaataacactataaaacaggaatagcggaaactcttaaacatgttaatgactacctactaataaccaaaagtaaatgtcatactaatagggaatactattccctattaatattttgcattcttacttccatgaaaattaagaacaagacagtcacgtctgtcatcactcttcaacattgttttgaaaaatccagctaatgtaacagtaatcagtataaacattaagaggaaataaaatgatctatatgttcaggtgaaataatttcatatctagaaaacccaaaatattatattcttaaaaatctactgtaatttcaatgattaaataagctcattagacagaagataaaaatacaaaatctataggttgtctatattgtcaaaaatagctaattacaaatgagaagaaaaaaaccaattcacaatgtcaaaatatgaaataaaactgtaaaaatacttagaaataaattcagttagctatgatatacttacgtgaagaatattccaataacaagaccaaaagatttcaatgatgtacgaagactcttgagtgctaagatttaatattactaaagagccctctaaacaaaaatgcaggattttaattgtgatgtcagccatcataattagaattttattaaaattctgcatttcattttttcacatgaaaaaatgaatgtctaggacatattatataaagaaaaaaaaaactaatgaagtgggacttgctttatcggattctaaaacttacgatgaagccactataattaaatcatgatattggctcagaaatttgaaaatgggtaacattttaaataaatgtcacaatcaggtatccaatgtgaacaaaatgttatagctggatccccatcttacaccatatacaaaaataaatttcagatggatcaaacatttaaacattaaaaataataaagttattagaagaaaatgtaggtgaatatttgtatgactttgggtgggggcatccatgtgataaaaaaaggaaaccaaaatctataaaagagataagggtctacctaaaaagtttaaaaattttaaaggaaaatatatcatcaataaagtcaagatgaaaacgtcataacacattagagctacaaatgattaatatgcactatgtagtaagaatttctacaaatttataatgaaaaacatcaatagatacatgagcaaagggtaagaacaggcaaatcagagaaaaatccaaacagaaacaaggacagcaacaacaacaaacctctttgaactcagacaaaaggcaattaaactaacaagcaatacaatgcaatttttagcctttcatattttcaagcattaaagagtgctggagaggacgctggaacgggcgctttcattttggatagtaatcttgtaatatttctgaaacatatgcctacatagtatttctgggaatccaacctatataaataaaagcaccagtatgtattacagcagtgttattttgaaaaaaaataaaaaaaggaaataaaagacgatcaataacgaaatggttgaatgcctttttggtacatcaacaagtactgtgtattcagctgttagagtaagggagggagggggagagcaagagtgcaagagagtaagagtgagggccagagagagccagagagagcaagaaagactgaagctactgataagaagagatatcatctacatgtcaagtgagaaaagcatgtggcttgccatttttacagaaactactagaacatactttctgcatgaagatggggaaaataggtggaaggatgtacttcgcatcctcaacacttgttttctgggaagaaacaagaatgtaaaggtcatgtactgacattgtggagatcttctaaaattcagtgaaataaaagacgaaactaccattaattttaccatccagactgcaccaaaatgttaacaatactgttttctctcctattaataaacctgtacttatattttataaaattgggagcatatttcatacttttataacttgtgtttttcatgtatatcatgaacattttccaagattgttaaatactctgaaaacatgatttttaatagtaatattaaatatttgtaatattccttttgatagtccactatttatcctacatgatctataacataagtataaataaaaac

SEQ ID NO: 356855 - DNA, 3224 bp, Homo sapiens
ttgaaattaccattatagctaattattttattacaatgttttcagaattagatctaggtgacataaaatacacaaaagcataaagccatctgaatagtacagtcaacaagcaacaaccagtacaatcagcaataatagagaacttttaactttgtatgtcacagagaatgtatatacctttttaataaaaagcctgaataaaccaataactattaaagaaatcacaaagctgattaaaaatctactattaaaagtgtcatcaggattagattgttttacactttgtcctagctaacttttaacaaacaaataattctaatgctatttaaattattccagaccacaggaaaaaaattgaaaactcacatattcatatttttttaaagctagcacaacttcaataacaaaacttgataaagatagcatcagaaggacaaaatacaattttactttggaatgaaaatgcaataattctaaattaaatactggtaaataaaatccactcatgtagcaaatcattatttcacaatgaccaagtagtatttgttccagaaatacaagtttggttccacatcaaatgcctaccattctaattcattacatcaacaaattaaagagaaaaaaaatcatacaattttatcaatagatgctgaaaaggcattttataaaattcaggaaccacttctagcaataacactataaaacaggaatagcggaaactcttaaacatgttaatgactacctactaataaccaaaagtaaatgtcatactaatagggaatactattccctattaatattttgcattcttacttccatgaaaattaagaacaagacagtcacgtctgtcatcactcttcaacattgttttgaaaaatccagctaatgtaacagtaatcagtataaacattaagaggaaataaaatgatctatatgttcaggtgaaataatttcatatctagaaaacccaaaatattatattcttaaaaatctactgtaatttcaatgattaaataagctcattagacagaagataaaaatacaaaatctataggttgtctatattgtcaaaaatagctaattacaaatgagaagaaaaaaaccaattcacaatgtcaaaatatgaaataaaactgtaaaaatacttagaaataaattcagttagctatgatatacttacgtgaagaatattccaataacaagaccaaaagatttcaatgatgtacgaagactcttgagtgctaagatttaatattactaaagagccctctaaacaaaaatgcaggattttaattgtgatgtcagccatcataattagaattttattaaaattctgcatttcattttttcacatgaaaaaatgaatgtctaggacatattatataaagaaaaaaaaaactaatgaagtgggacttgctttatcggattctaaaacttacgatgaagccactataattaaatcatgatattggctcagaaatttgaaaatgggtaacattttaaataaatgtcacaatcaggtatccaatgtgaacaaaatgttatagctggatccccatcttacaccatatacaaaaataaatttcagatggatcaaacatttaaacattaaaaataataaagttattagaagaaaatgtaggtgaatatttgtatgactttgggtgggggcatccatgtgataaaaaaaggaaaccaaaatctataaaagagataagggtctacctaaaaagtttaaaaattttaaaggaaaatatatcatcaataaagtcaagatgaaaacgtcataacacattagagctacaaatgattaatatgcactatgtagtaagaatttctacaaatttataatgaaaaacatcaatagatacatgagcaaagggtaagaacaggcaaatcagagaaaaatccaaacagaaacaaggacagcaacaacaacaaacctctttgaactcagacaaaaggcaattaaactaacaagcaatacaatgcaatttttagcctttcatattttcaagcattaaagagtgctggagaggacgctggaacgggcgctttcattttggatagtaatcttgtaatatttctgaaacatatgcctacatagtatttctgggaatccaacctatataaataaaagcaccagtatgtattacagcagtgttattttgaaaaaaaataaaaaaaggaaataaaagacgatcaataacgaaatggttgaatgcctttttggtacatcaacaagtactgtgtattcagctgttagagtaagggagggagggggagagcaagagtgcaagagagtaagagtgagggccagagagagccagagagagcaagaaagactgaagctactgataagaagagatatcatctacatgtcaagtgagaaaagcatgtggcttgccatttttacagaaactactagaacatactttctgcatgaagatggggaaaataggtggaaggatgtacttcgcatcctcaacacttgttttctgggaagaaacaaggtaaggaaaggaaggggtaaggacggggtgtgggtttacaccattaatttttcttaatctatttttgcattgttccaatggttgcaaacactttttaattttctattagcacccaatttaactgttaagttacagaacaaggcaatatcaaaagtagcaaagtacacttgaggcaaaattgtgaaactagtcaaggtaagatttgttggcacaataaaatttatccactttcctgaatttctgacacctaaactcttctctgcgttcacaactacgagaacacaaaataattcacatctaacagatccacaacttctctaaagagcacaaagaatttaaggagttttcaccaaaccatagacataaatgtgaatatcatcatcaaacttaatgaagtaaacagatggcttcgccaccacttgatgtataaaaatgccagttctcttggacccgtcatctttggcatgctccacctgcttgcccacgagactgtcgaccacctctccaggctcctgttctgctgtagggaaatagtagttggaatctggaataatgcgtaagtcaccatctttgtagtcatcaagcagcgtgtacatatagagaacaggatctttctcgtaggtgatgtaaaaccaagtatccatcacaggagctcgcgccaggaccatacccttccattcatccttggtaccatgttcaccttcaaacaca

SEQ ID NO: 356856 - DNA, 3183 bp, Homo sapiens
ctgggccttttcttcttttatcccctgtccccgcccccctacacctcttacaaatttagcccaggagctttctatccccaccgacttgaagggtttatcggtcttaagagcgaaatcctggcggagtgcagtccctcggggctagcatccacgttccgcctgcgccctgcccgggctgttccgagggatccccgcaagggcactgccccagctttcactcttggagtcggggaaataaggtgtccacaaaggatgcaagcaagtcattgtcagtgcagacccgaagggcgcgtccggagtgcaggtatgaaagacgggcgcatgcgcgcagtccggggccgggcttcgcagcccgggctccgctctagccccgcagcgtctcggtggccggtctcgtcctccgcccgccgcgcgggggcgccgctctagccccgcgccatctcggtggccgtccgcccactccgcggcgttcggggaaatggctgcgagaccctagaggcctgcggcctgcggagcttactccacgggaacagcctctagataatctgagttgttgaaaatacgaagcctgttactcgtgaacagtggctgacaacagtgttgttgtgagcctggctgtctgcttggacccagaggtttcgtctgccagggtttttggttgtatttaggatttcagggaaaagtgtccaagctttcagtgttggagcaggtatggacgacaaaggcgacccgagcaatgaggaggcacctaaggccatcaaacccaccagcaaagagttcaggaaaacatggggttttcgaaggaccactatcgccaagcgagagggcgcaggggacgcggaggctgacccactggagccgccacccccacagcagcagctgggcctgtccctgcggcgcagtgggaggcagcccaagcgcactgagcgcgtggagcagttcctgaccattgcgcggcgccgcggcaggaggagcatgcctgtctccctggaggattctggtgagcccacgtcctgccccgccacagacgccgagacagcctccgagggcagcgtggaaagcgcttctgagaccagaagcggcccccagtctgcttccacagctgtgaaggaacgaccagcctcttctgaaaaggtgaaaggaggggatgaccacgatgacacctccgatagtgacagcgatggcctgaccttgaaagagcttcagaatcgccttcgcaggaagcgggaacaggagcccactgagaggcccctgaaagggatccagagtcgcctgcggaagaagcgccgggaggagggtcccgccgagactgtgggctccgaggccagtgacactgtggagggcgtcctgcccagtaagcaggagcccgagaacgatcagggggttgtgtcccaggctgggaaagatgacagagagagtaagttggagggaaaggcggctcaggacatcaaagatgaggagcctggagacttgggccgaccgaagcctgaatgtgagggttacgaccccaacgccctgtattgcatttgccgccagcctcacaacaacaggtttatgatttgctgtgaccgctgtgaagaatggtttcatggcgattgtgtgggcatttctgaggctcgagggaggcttttggaaaggaatggggaagactatatctgcccaaactgcaccattctgcaagtgcaggatgagactcattcagaaacggcagatcagcaggaagctaaatggagacctggagatgctgatggcaccgattgtacaagtataggaacaatagagcagaagtctagcgaagaccaagggataaagggtagaattgagaaagctgcaaatccaagtggcaagaagaaactcaagatcttccagcctgtgatagaggcgcctggtgcctcaaaatgtattggccccgggtgctgtcacgtggcgcagcccgactcggtgtactgcagtaatgactgtatcctcaaacacgccgcagcgacaatgaagtttctaagctcaggtaaagaacagaagccaaagcctaaagaaaagatgaagatgaagccagagaagcccagtcttccgaaatgcggtgctcaggcaggtattaaaatctcttctgtgcacaagagaccagctccagaaaaaaaagagaccacagtgaagaaggcagtggtggtccctgcgcggagtgaagcactcgggaaggaagcagcttgtgagagcagcacgccgtcgtgggcgagcgatcacaattacaatgcagtaaagccagaaaagactgctgctccctcgccgtcactgttgtataaatgtatgtatcacctaggggttggcctcctggacccctcccgttctttctggatagccatcccctgggcctgtccaggactgggagttgcagctttgtgttaagctgatcacagacaccggctgcaccatcagcgggaagcagagcccatgtccaggatgcctcctgctgccctgtgtccatccctagtctgtcaggacttcctgtcactgttttccaaagctgtaaacctcactggtgaacgttcaccttaatgattgattctttaatctctgttttcactctcaggctctggtaagtattcgtattctcttcatcccagtctgattgcatagccacactgcccggcacgccacatccacccctgtctgcacatgagttgttctgacaacagcgctgtatacgcttcagtttttccacattgtccacggccagcacatgaaagcatcacttcttttttatgttgtgggaatctttgcaagttagtgttgcatctgattttcaggtgtacatttatttttgactgggcagataggggatttttttttttccatgtccgattcacacgctacacacccacatgaacacattcgaacttcgaaggccacacactcctgcttcataggccccacggtaagtgagttcacacctagaacactgtcctgaccgcaggacgcgtgccttggacttggtattctacatgtgactggctttcttgccctcgtctcttgaatgtttagactcttaagatcatatcctgccccaaatttcaaattaatgaaatgaagatatttcaaacagatctttgaaacctcagattctgtggtgcaattttaatgttttcttgtttctcagttttctgctataaaactattttcaattcagaa

SEQ ID NO: 356857 - DNA, 337 bp, Homo sapiens
ggggagcgggagggcaggcgcaccggaggccgcccctcagcacctctcgcgacagcaagagagcgcgagagcgcgagccgatgaccaatgaagcgcccccgcgagggggcggggcggacggcctcccggaagcgcggaacctcagcttccgtacttgcgcagaactcccctcgcggcgaccacgcactacgggttggcgccagagtcaaaaggcgtcggccctctggcaagatggctgctgcggaggcgttggagcgcggaaatctggaaccgggatggcgacgtctacactgagtcggaggcgaaggtcccagcttttttcctgtcgtttgcgtga

SEQ ID NO: 356858 - DNA, 274 bp, Homo sapiens
tcgtaagtggtgaaggagtagacacactggggtgaaggggcaggagaatagatacgcttgggggtgaagttgggttgtggtgaagtttgggagaggcgtggcttaggcccttacctgggatagggttggggtgagttgggagctggttgaagacctcgagctcagatagaatgaaatggcagtgtacggggggcataagacttcaggacacaccctgctgtcttgtgagaagagttggtaaccacccggtggagtttgtagagcgtagacttgc

SEQ ID NO: 356859 - DNA, 7657 bp, Homo sapiens
  misc_feature (1993)..(1993): n is a, c, g, or t
  misc_feature (2028)..(2028): n is a, c, g, or t
  misc_feature (4196)..(4196): n is a, c, g, or t
  misc_feature (5421)..(5421): n is a, c, g, or t
tggcgaattcggcacgaggggaaatggctgcgagaccctagaggctgcggctgcggagcttactccacgggaacagcctctagataatctgagttgttgaaaatacgaagcctgttactcgtgaacagtggctgacaacagtgttgttgtgagcctggctgtctgcttggacccagaggtttcgtctgccagggtttttggttgtatttaggatttcagggaaaagtgtccaagctttcagtgttggagcaggtatggacgacaaaggcgacccgagcaatgaggaggcacctaaggccatcaaacccaccagcaaagagttcaggaaaacatggggttttcgaaggaccactatcgccaagcgagagggcgcaggggacgcggaggctgacccactggagccgccacccccacagcagcagctgggcctgtccctgcggcgcagtgggaggcagcccaagcgcactgagcgcgtggagcagttcctgaccattgcgcggcgccgcggcaggaggagcatgcctgtctccctggaggattctggtgagcccacgtcctgccccgccacagacgccgagacagcctccgagggcagcgtggaaagcgcttctgagaccagaagcggcccccagtctgcttccacagctgtgaaggaacgaccagcctcttctgaaaaggtgaaaggaggggatgaccacgatgacacctccgatagtgacagcgatggcctgaccttgaaagagcttcagaatcgccttcgcaggaagcgggaacaggagcccactgagaggcccctgaaagggatccagagtcgcctgcggaagaagcgccgggaggagggtcccgccgagactgtgggctccgaggccagtgacactgtggagggcgtcctgcccagtaagcaggagcccgagaacgatcagggggttgtgtcccaggctgggaaagatgacagagagagtaagttggagggaaaggcggctcaggacatcaaagatgaggagcctggagacttgggccgaccgaagcctgaatgtgagggttacgaccccaacgccctgtattgcatttgccgccagcctcacaacaacaggtttatgatttgctgtgaccgctgtgaagaatggtttcatggcgattgtgtgggcatttctgaggctcgagggaggcttttggaaaggaatggggaagactatatctgcccaaactgcaccattctgcaagtgcaggatgagactcattcagaaacggcagatcagcaggaagctaaatggagacctggagatgctgatggcaccgattgtacaagtataggaacaatagagcagaagtctagcgaagaccaagggataaagggtagaattgagaaagctgcaaatccaagtggcaagaagaaactcaagatcttccagcctggtcccgggcctgtccccacccagctgcctgtcctctggcaggtattggaaattgctgtgtctagaagcatctctgccttcacactcttgcactgcattagctgcaaggtgatagaggcgcctggtgcctcaaaatgtattggccccgggtgctgtcacgtggcgcagcccgactcggtgtactgcagtaatgactgtatcctcaaacacgccgcagcgacaatgaagtttctaagctcaggtaaagaacagaagccaaagcctaaagaaaagatgaagatgaagccagagaagcccagtcttccgaaatgcggtgctcaggcaggtattaaaatctcttctgtgcacaagagaccagctccagaaaaaaaagagaccacagtgaagaaggcagtggtggtccctgcgcggagtgaagcactcgggaaggaagcagcttgtgagagcagcacgccgtcgtgggcgagcgatcacaattacaatgcagtaaagccagaaaagactgctgctccctcgccgtcactgttgtataaatccacgaaggaagacaggaggtccgaggagaaagcggcagccanggcagcctcaaagaaaacagcccctccaggctccncggtgggcaagcagcctgcacctagaaacctcgtgccaaagaagtcttcttttgctaatgtggcagcagccacaccagccattaaaaagccaccctcaggtttcaagggcaccatccccaagaggccatggctctccgctaccccatcgagtggtgcttcagctgccaggcaggccggaccggcacctgcagcggcgacggctgcctccaagaagttccctggctccgctgctttggtgggagccgtaaggaagccagtggtaccttctgttccaatggcctcgccagccccaggacgccttggggctatgagtgctgcaccatcgcagccaaattcacaaattcggcaaaatatcagacgctccttaaaagagattttgtggaaaagagtcaatgacagcgatgacttaatcatgacagaaaacgaagtaggaaaaattgccctccatattgagaaggagatgtttaacttgtttcaagttacagataatcgctacaagagtaaatatcgcagcatcatgttcaacctgaaggaccctaaaaatcagggactcttccatcgtgttctgcgtgaggaaatctctttggcgaaacttgtgagactgaagccagaagaacttgtatctaaagagctttccacgtggaaagagaggccagcgagatctgtgatggagtccagaactaaactgcacaatgaaagcaagaagacggcccccaggcaggaggccatccccgatctggaggactctccgccagtgtcggattcagaggaacagcaagagtcagcacgtgctgtccctgagaagagcacagcgccgcttctcgacgtcttcagcagcatgttgaaagacaccaccagtcagcaccgcgcacacctcttcgatctcaactgtaaaatttgcacaggccaggttccctccgcagaagatgagccagctccgaaaaaacaaaaattgtcagcttctgttaagaaagaagacttaaaatcaaagcatgacagctctgcacctgacccagctccggattcagctgatgaggtgatgccggaggctgtgcctgaagttgcctctgagccaggcctagaaagtgcttctcatccaaatgtggacagaacgtatttccctgggcctccaggagatggccatcccgagccctccccgctggaagacctgtccccctgcccagcctcctgtgggagcggggtggtcaccaccgtcacagtgtccggccgggaccccaggaccgctccaagcagttcatgcacagccgtggcctccgcagcatcccgcccagacagcacccacatggtggaagccagacaggatgtgccgaagcctgtcttgacttctgtgatggtgcccaagtccatactagctaagccatcctcatctcctgacccaagatacctgtcagttcctccgtcaccaaatatcagcacttcagaatcacgttcccctccagagggagacacgaccctctttttgtctcgactcagcaccatttggaaaggatttattaacatgcagagtgtggcaaaatttgtcactaaggcgtatcctgtctctgggtgttttgattacctcagtgaggatttgcctgacacaattcacattggtgggaggatcgcaccgaagacagtttgggattatgttggcaaactcaagtcttctgtgtctaaggagctctgtctgatccgcttccaccccgccacagaggaagaggaggtcgcctatatctctctctactcctatttcagcagccgtggccgctttggtgttgtagctaataacaacaggcacgtcaaggacctctacctgatcccgctgagcgcccaggaccctgttccatccaaactcttgccctttgagggaccaggtaagcgccggctttctgggtggaggtgaggcccacctgcacctgcacccctcctcccactgacatgccctgctgagtcctgaccagcccagggctctctgggagcaggagttaggagcacagacgcagcggttagcaataggattcatctttgagggcgtaggactgtggcacgagaagtacccctgattcacagcataaattgtcttaggagagttttttagagagggaaaaacccacagcctgcaaccagctcatcttggcctcaggtcagagaagactcagtgcccagnagcccaaggctcagccagaaagggaggtgacactcccagcggccctgctctttcctctagacagactcgggagccagcacacaccgggaagtggctccatcagggatcacttctctaacagggatggatttccaggagacttaacaataatgacatagaaaactatttctagaaataattattttaaaatctgcagctcaaattgtaataggttcattcatctttggcaagctattttgtgtttgcacgttccttggaaagtactgtatttaaacgattatttacaaatagcctaaaatacatctttgtcaagggttgagggtgattccaggggccacgtgctctgttagtgaccagctctttcatagccccttagaagaagctgatgtgacttcagttaggggttagtatctgatgcccaactgaagtgtctccgtggccatgcagtccccagaggattggtgttctctcaaagcgggtgtgtggatcacacagtgtcctctgaagtgcttcgtcataaaggcaggtgctgtctggaccctgtgcctcagtgccctctgtccctgtcaccaggcctcggcgggtgttcctgccatagctgtgcagggtgttcccacccacacccctcatgccgcaccctagctagctggggtcctgtaggggccactccacatcttgggcgggacttctgtcgccccaggcacagcccacgttcctactggagcccattcttcacagctggagtgggctcagcctatgcctgtgttgtggaattatatgtccataaagggattggttggtatcagtaatttcagggttaaatatttgctggcgtggtgcattaaattattttagtgccagataaatttttaaaagcaaagtgctttagtgtgtcccctcaaatcctacttgggataaagagatgccacctaatgggtggcagaaaggaccctggtagaggttcttggtgttgcttgtgaagagctctggccagctccacgtgaccagggagaggaaaagcccggccctcctggaggtgaagaccgagaagctggcctctccgcacctgtgaagacccactggtcagttgcaagtgcgacagtgtgtgcactcagtgcagacactgcagcacctcagcacctccctaccggggtggaaagagcactttttctttacagaaacatgattcttagatagcgagcctcccctttttaaaacaattgangcgatatttcatcctttcttgagcttctctccctgctcatctccaaacttggagctgtcaggtgagcacaggttgtagggtgttgagcgagccccggcgcatgccgggcaccgggttccccacactgggcagtgacggggcccagggaggccaccagaggagcggcgcctccattctccccacagcaagggctggctgtgcaggtgcagccccggggcagagggaaaggacaggtctcccagcacctcccggatggcaccgggacaaggagggctgggctggggtcactcaccttgtctgctgagtgcgatggcaccaaccacccacactgtcagctccgcgaccagctgggggaacgtcacactcgcccaccaaggcacttgctgaggccacgacgccgcctgacggggacacacaaaagccccagggactttgatccacgataaagagcagaggcgtctgggtaaagtaacacagggcaagggactttagaaaagtaacagctagtgaaacctttccatacacttcagaaatgttttaacttaagacttcagtataatgttaacttctcctgatgtccttgttgacatgaatgcgtgtgcgtgaaatctcacacacttccatggtcactaaacagccttcaccccgggccaggccatcgggtactcggcccgcttcacgtactgattacttgacttggcgttttctagatataaacatgtacatgtgtgtcctggctttgtggtgtaaatgtgtagtgcgtgtgcatgtgcgcgcgtgtgtgtgtgtaaggctaggtcctggcacgtttcccctgtctcagcggaccctgtcctcacggagatagcccagaagcccttggacagcacaggccacacctgagggtgctgatggtggtgactccacagagctgtggtcaggggtgagcgtgtgctgcgcagcttggagtcacgcccccagaagtgctgggtgagggtctgcaggacccagctccattccacagcctcagttctctgcggcacatgcagcacaggcctgaaggagacctggcgccccagccttgagctgcccgtctgcatcagggcactgatgtgggagcatcttcccctggggatgttaaggagaaggtcctgttgggggtagagattcacgcagaaaagagtgactgactcgtccatgtgcctcagtttataccacacaattgcaggtgtccatgcctcccacacatggggacctagtgggttttgacagcgtggtgtccagtcctagccccctcagtgcttgctgttcacacttaagcaagtgaaggcctgaaggtgcccagctgtgccctcaggggaaacttaagtcacccgccctgtcagcacttggcccttgtcgggcagtgagagtggagctgcccccgcagcaccctcaggagccatgcagttcacagcagtagctggatctccctgaggacatttgtccttgcatatcttaatgatttgtccacagaaacaccgggttgtcttcctctgcccctctgccccgcagtgggggcactctctgtaactcagcatcacggtggggggcagctgggaggcctggttccaggtgaccttctccacctagatgttcaccccactcagttccagctttaccaacagggccccccgcagggacttggggtcgcagagtcccggcctgtctcagggccttgttcatggaagggagatgagtcaggttgaaagctcatcgtgtagggttctgtgcagggcccttacaggactggaccgcagccaagatgcctgcctgttaaccatgcccagcccccgtcatttccgcgtgaagccgcaggcctcggagccttggtctgaaatgcctgtggagtaacctcggtccataaacatgggtgcacagtctgttctccccaagtacagggcaggaggaaacaccgccctctgtagctgctcgaatggaaagggctcttttctctgaggtctttatacattagaaagctcttctgggaagaatgtttgaatccatagtgtctttctgtattcacttttaattgctttctaaattagctgagaaattctgacttgaaatattgtcaggtaagcatttcttcagttttcatgtgtgtatgtaacagtagctttgcatggaaattgtaatcagagtcaaatacagtattgaatggaatgtactgccttctcctcctaaatcaataaacatctttcatggaaaaaaaaac

SEQ ID NO: 356860 - DNA, 2441 bp, Homo sapiens
tggcgaattcggcacgaggggaaatggctgcgagaccctagaggctgcggctgcggagcttactccacgggaacagcctctagataatctgagttgttgaaaatacgaagcctgttactcgtgaacagtggctgacaacagtgttgttgtgagcctggctgtctgcttggacccagaggtttcgtctgccagggtttttggttgtatttaggatttcagggaaaagtgtccaagctttcagtgttggagcaggtatggacgacaaaggcgacccgagcaatgaggaggcacctaaggccatcaaacccaccagcaaagagttcaggaaaacatggggttttcgaaggaccactatcgccaagcgagagggcgcaggggacgcggaggctgacccactggagccgccacccccacagcagcagctgggcctgtccctgcggcgcagtgggaggcagcccaagcgcactgagcgcgtggagcagttcctgaccattgcgcggcgccgcggcaggaggagcatgcctgtctccctggaggattctggtgagcccacgtcctgccccgccacagacgccgagacagcctccgagggcagcgtggaaagcgcttctgagaccagaagcggcccccagtctgcttccacagctgtgaaggaacgaccagcctcttctgaaaaggtgaaaggaggggatgaccacgatgacacctccgatagtgacagcgatggcctgaccttgaaagagcttcagaatcgccttcgcaggaagcgggaacaggagcccactgagaggcccctgaaagggatccagagtcgcctgcggaagaagcgccgggaggagggtcccgccgagactgtgggctccgaggccagtgacactgtggagggcgtcctgcccagtaagcaggagcccgagaacgatcagggggttgtgtcccaggctgggaaagatgacagagagagtaagttggagggaaaggcggctcaggacatcaaagatgaggagcctggagacttgggccgaccgaagcctgaatgtgagggttacgaccccaacgccctgtattgcatttgccgccagcctcacaacaacaggtttatgatttgctgtgaccgctgtgaagaatggtttcatggcgattgtgtgggcatttctgaggctcgagggaggcttttggaaaggaatggggaagactatatctgcccaaactgcaccattctgcaagtgcaggatgagactcattcagaaacggcagatcagcaggaagctaaatggagacctggagatgctgatggcaccgattgtacaagtataggaacaatagagcagaagtctagcgaagaccaagggataaagggtagaattgagaaagctgcaaatccaagtggcaagaagaaactcaagatcttccagcctgtgatagaggcgcctggtgcctcaaaatgtattggccccgggtgctgtcacgtggcgcagcccgactcggtgtactgcagtaatgactgtatcctcaaacacgccgcagcgacaatgaagtttctaagctcaggtaaagaacagaagccaaagcctaaagaaaagatgaagatgaagccagagaagcccagtcttccgaaatgcggtgctcaggcaggtattaaaatctcttctgtgcacaagagaccagctccagaaaaaaaagagaccacagtgaagaaggcagtggtggtccctgcgcggagtgaagcactcgggaaggaagcagcttgtgagagcagcacgccgtcgtgggcgagcgatcacaattacaatgcagtaaagccagaaaagactgctgctccctcgccgtcactgttgtataaatgctctggtaagtattcgtattctcttcatcccagtctgattgcatagccacactgcccggcacgccacatccacccctgtctgcacatgagttgttctgacaacagcgctgtatacgcttcagtttttccacattgtccacggccagcacatgaaagcatcacttcttttttatgttgtgggaatctttgcaagttagtgttgcatctgattttcaggtgtacatttatttttgactgggcagataggggatttttttttttccatgtccgattcacacgctacacacccacatgaacacattcgaacttcgaaggccacacactcctgcttcataggccccacggtaagtgagttcacacctagaacactgtcctgaccgcaggacgcgtgccttggacttggtattctacatgtgactggctttcttgccctcgtctcttgaatgtttagactcttaagatcatatcctgccccaaatttcaaattaatgaaatgaagatatttcaaacagatctttgaaacctcagattctgtggtgcaattttaatgttttcttgtttctcagttttctgctataaaactattttcaattcagaa

SEQ ID NO: 356861 - DNA, 2707 bp, Homo sapiens
tggcgaattcggcacgaggggaaatggctgcgagaccctagaggctgcggctgcggagcttactccacgggaacagcctctagataatctgagttgttgaaaatacgaagcctgttactcgtgaacagtggctgacaacagtgttgttgtgagcctggctgtctgcttggacccagaggtttcgtctgccagggtttttggttgtatttaggatttcagggaaaagtgtccaagctttcagtgttggagcaggtatggacgacaaaggcgacccgagcaatgaggaggcacctaaggccatcaaacccaccagcaaagagttcaggaaaacatggggttttcgaaggaccactatcgccaagcgagagggcgcaggggacgcggaggctgacccactggagccgccacccccacagcagcagctgggcctgtccctgcggcgcagtgggaggcagcccaagcgcactgagcgcgtggagcagttcctgaccattgcgcggcgccgcggcaggaggagcatgcctgtctccctggaggattctggtgagcccacgtcctgccccgccacagacgccgagacagcctccgagggcagcgtggaaagcgcttctgagaccagaagcggcccccagtctgcttccacagctgtgaaggaacgaccagcctcttctgaaaaggtgaaaggaggggatgaccacgatgacacctccgatagtgacagcgatggcctgaccttgaaagagcttcagaatcgccttcgcaggaagcgggaacaggagcccactgagaggcccctgaaagggatccagagtcgcctgcggaagaagcgccgggaggagggtcccgccgagactgtgggctccgaggccagtgacactgtggagggcgtcctgcccagtaagcaggagcccgagaacgatcagggggttgtgtcccaggctgggaaagatgacagagagagtaagttggagggaaaggcggctcaggacatcaaagatgaggagcctggagacttgggccgaccgaagcctgaatgtgagggttacgaccccaacgccctgtattgcatttgccgccagcctcacaacaacaggtttatgatttgctgtgaccgctgtgaagaatggtttcatggcgattgtgtgggcatttctgaggctcgagggaggcttttggaaaggaatggggaagactatatctgcccaaactgcaccattctgcaagtgcaggatgagactcattcagaaacggcagatcagcaggaagctaaatggagacctggagatgctgatggcaccgattgtacaagtataggaacaatagagcagaagtctagcgaagaccaagggataaagggtagaattgagaaagctgcaaatccaagtggcaagaagaaactcaagatcttccagcctgtgatagaggcgcctggtgcctcaaaatgtattggccccgggtgctgtcacgtggcgcagcccgactcggtgtactgcagtaatgactgtatcctcaaacacgccgcagcgacaatgaagtttctaagctcaggtaaagaacagaagccaaagcctaaagaaaagatgaagatgaagccagagaagcccagtcttccgaaatgcggtgctcaggcaggtattaaaatctcttctgtgcacaagagaccagctccagaaaaaaaagagaccacagtgaagaaggcagtggtggtccctgcgcggagtgaagcactcgggaaggaagcagcttgtgagagcagcacgccgtcgtgggcgagcgatcacaattacaatgcagtaaagccagaaaagactgctgctccctcgccgtcactgttgtataaatgtatgtatcacctaggggttggcctcctggacccctcccgttctttctggatagccatcccctgggcctgtccaggactgggagttgcagctttgtgttaagctgatcacagcgggaagcagagcccatgtccaggatgcctcctgctgccctgtgtccatccctagtctgtcaggacttcctgtcactgttttccaaagctgtaaacctcactggtgaacgttcaccttaatgattgattctttaatctctgttttcactctcaggctctggtaagtattcgtattctcttcatcccagtctgattgcatagccacactgcccggcacgccacatccacccctgtctgcacatgagttgttctgacaacagcgctgtatacgcttcagtttttccacattgtccacggccagcacatgaaagcatcacttcttttttatgttgtgggaatctttgcaagttagtgttgcatctgattttcaggtgtacatttatttttgactgggcagataggggatttttttttttccatgtccgattcacacgctacacacccacatgaacacattcgaacttcgaaggccacacactcctgcttcataggccccacggtaagtgagttcacacctagaacactgtcctgaccgcaggacgcgtgccttggacttggtattctacatgtgactggctttcttgccctcgtctcttgaatgtttagactcttaagatcatatcctgccccaaatttcaaattaatgaaatgaagatatttcaaacagatctttgaaacctcagattctgtggtgcaattttaatgttttcttgtttctcagttttctgctataaaactattttcaattcagaa

SEQ ID NO: 356862 - DNA, 4817 bp, Homo sapiens
  misc_feature (1885)..(1885): n is a, c, g, or t
  misc_feature (1920)..(1920): n is a, c, g, or t
  misc_feature (4088)..(4088): n is a, c, g, or t
tggcgaattcggcacgaggggaaatggctgcgagaccctagaggctgcggctgcggagcttactccacgggaacagcctctagataatctgagttgttgaaaatacgaagcctgttactcgtgaacagtggctgacaacagtgttgttgtgagcctggctgtctgcttggacccagaggtttcgtctgccagggtttttggttgtatttaggatttcagggaaaagtgtccaagctttcagtgttggagcaggtatggacgacaaaggcgacccgagcaatgaggaggcacctaaggccatcaaacccaccagcaaagagttcaggaaaacatggggttttcgaaggaccactatcgccaagcgagagggcgcaggggacgcggaggctgacccactggagccgccacccccacagcagcagctgggcctgtccctgcggcgcagtgggaggcagcccaagcgcactgagcgcgtggagcagttcctgaccattgcgcggcgccgcggcaggaggagcatgcctgtctccctggaggattctggtgagcccacgtcctgccccgccacagacgccgagacagcctccgagggcagcgtggaaagcgcttctgagaccagaagcggcccccagtctgcttccacagctgtgaaggaacgaccagcctcttctgaaaaggtgaaaggaggggatgaccacgatgacacctccgatagtgacagcgatggcctgaccttgaaagagcttcagaatcgccttcgcaggaagcgggaacaggagcccactgagaggcccctgaaagggatccagagtcgcctgcggaagaagcgccgggaggagggtcccgccgagactgtgggctccgaggccagtgacactgtggagggcgtcctgcccagtaagcaggagcccgagaacgatcagggggttgtgtcccaggctgggaaagatgacagagagagtaagttggagggaaaggcggctcaggacatcaaagatgaggagcctggagacttgggccgaccgaagcctgaatgtgagggttacgaccccaacgccctgtattgcatttgccgccagcctcacaacaacaggtttatgatttgctgtgaccgctgtgaagaatggtttcatggcgattgtgtgggcatttctgaggctcgagggaggcttttggaaaggaatggggaagactatatctgcccaaactgcaccattctgcaagtgcaggatgagactcattcagaaacggcagatcagcaggaagctaaatggagacctggagatgctgatggcaccgattgtacaagtataggaacaatagagcagaagtctagcgaagaccaagggataaagggtagaattgagaaagctgcaaatccaagtggcaagaagaaactcaagatcttccagcctgtgatagaggcgcctggtgcctcaaaatgtattggccccgggtgctgtcacgtggcgcagcccgactcggtgtactgcagtaatgactgtatcctcaaacacgccgcagcgacaatgaagtttctaagctcaggtaaagaacagaagccaaagcctaaagaaaagatgaagatgaagccagagaagcccagtcttccgaaatgcggtgctcaggcaggtattaaaatctcttctgtgcacaagagaccagctccagaaaaaaaagagaccacagtgaagaaggcagtggtggtccctgcgcggagtgaagcactcgggaaggaagcagcttgtgagagcagcacgccgtcgtgggcgagcgatcacaattacaatgcagtaaagccagaaaagactgctgctccctcgccgtcactgttgtataaatccacgaaggaagacaggaggtccgaggagaaagcggcagccanggcagcctcaaagaaaacagcccctccaggctccncggtgggcaagcagcctgcacctagaaacctcgtgccaaagaagtcttcttttgctaatgtggcagcagccacaccagccattaaaaagccaccctcaggtttcaagggcaccatccccaagaggccatggctctccgctaccccatcgagtggtgcttcagctgccaggcaggccggaccggcacctgcagcggcgacggctgcctccaagaagttccctggctccgctgctttggtgggagccgtaaggaagccagtggtaccttctgttccaatggcctcgccagccccaggacgccttggggctatgagtgctgcaccatcgcagccaaattcacaaattcggcaaaatatcagacgctccttaaaagagattttgtggaaaagagtcaatgacagcgatgacttaatcatgacagaaaacgaagtaggaaaaattgccctccatattgagaaggagatgtttaacttgtttcaagttacagataatcgctacaagagtaaatatcgcagcatcatgttcaacctgaaggaccctaaaaatcagggactcttccatcgtgttctgcgtgaggaaatctctttggcgaaacttgtgagactgaagccagaagaacttgtatctaaagagctttccacgtggaaagagaggccagcgagatctgtgatggagtccagaactaaactgcacaatgaaagcaagaagacggcccccaggcaggaggccatccccgatctggaggactctccgccagtgtcggattcagaggaacagcaagagtcagcacgtgctgtccctgagaagagcacagcgccgcttctcgacgtcttcagcagcatgttgaaagacaccaccagtcagcaccgcgcacacctcttcgatctcaactgtaaaatttgcacaggccaggttccctccgcagaagatgagccagctccgaaaaaacaaaaattgtcagcttctgttaagaaagaagacttaaaatcaaagcatgacagctctgcacctgacccagctccggattcagctgatgaggtgatgccggaggctgtgcctgaagttgcctctgagccaggcctagaaagtgcttctcatccaaatgtggacagaacgtatttccctgggcctccaggagatggccatcccgagccctccccgctggaagacctgtccccctgcccagcctcctgtgggagcggggtggtcaccaccgtcacagtgtccggccgggaccccaggaccgctccaagcagttcatgcacagccgtggcctccgcagcatcccgcccagacagcacccacatggtggaagccagacaggatgtgccgaagcctgtcttgacttctgtgatggtgcccaagtccatactagctaagccatcctcatctcctgacccaagatacctgtcagttcctccgtcaccaaatatcagcacttcagaatcacgttcccctccagagggagacacgaccctctttttgtctcgactcagcaccatttggaaaggatttattaacatgcagagtgtggcaaaatttgtcactaaggcgtatcctgtctctgggtgttttgattacctcagtgaggatttgcctgacacaattcacattggtgggaggatcgcaccgaagacagtttgggattatgttggcaaactcaagtcttctgtgtctaaggagctctgtctgatccgcttccaccccgccacagaggaagaggaggtcgcctatatctctctctactcctatttcagcagccgtggccgctttggtgttgtagctaataacaacaggcacgtcaaggacctctacctgatcccgctgagcgcccaggaccctgttccatccaaactcttgccctttgagggaccaggtaagcgccggctttctgggtggaggtgaggcccacctgcacctgcacccctcctcccactgacatgccctgctgagtcctgaccagcccagggctctctgggagcaggagttaggagcacagacgcagcggttagcaataggattcatctttgagggcgtaggactgtggcacgagaagtacccctgattcacagcataaattgtcttaggagagttttttagagagggaaaaacccacagcctgcaaccagctcatcttggcctcaggtcagagaagactcagtgcccagnagcccaaggctcagccagaaagggaggtgacactcccagcggccctgctctttcctctagacagactcgggagccagcacacaccgggaagtggctccatcagggatcacttctctaacagggatggatttccaggagacttaacaataatgacatagaaaactatttctagaaataattattttaaaatctgcagctcaaattgtaataggttcattcatctttggcaagctattttgtgtttgcacgttccttggaaagtactgtatttaaacgattatttacaaatagcctaaaatacatctttgtcaagggttgagggtgattccaggggccacgtgctctgttagtgaccagctctttcatagccccttagaagaagctgatgtgacttcagttaggggttagtatctgatgcccaactgaagtgtctctgtagctgctcgaatggaaagggctcttttctctgaggtctttatacattagaaagctcttctgggaagaatgtttgaatccatagtgtctttctgtattcacttttaattgctttctaaattagctgagaaattctgacttgaaatattgtcaggtaagcatttcttcagttttcatgtgtgtatgtaacagtagctttgcatggaaattgtaatcagagtcaaatacagtattgaatggaatgtactgccttctcctcctaaatcaataaacatctttcatggaaaaaaaaac

SEQ ID NO: 356863 - DNA, 3847 bp, Homo sapiens
  misc_feature (1885)..(1885): n is a, c, g, or t
  misc_feature (1920)..(1920): n is a, c, g, or t
tggcgaattcggcacgaggggaaatggctgcgagaccctagaggctgcggctgcggagcttactccacgggaacagcctctagataatctgagttgttgaaaatacgaagcctgttactcgtgaacagtggctgacaacagtgttgttgtgagcctggctgtctgcttggacccagaggtttcgtctgccagggtttttggttgtatttaggatttcagggaaaagtgtccaagctttcagtgttggagcaggtatggacgacaaaggcgacccgagcaatgaggaggcacctaaggccatcaaacccaccagcaaagagttcaggaaaacatggggttttcgaaggaccactatcgccaagcgagagggcgcaggggacgcggaggctgacccactggagccgccacccccacagcagcagctgggcctgtccctgcggcgcagtgggaggcagcccaagcgcactgagcgcgtggagcagttcctgaccattgcgcggcgccgcggcaggaggagcatgcctgtctccctggaggattctggtgagcccacgtcctgccccgccacagacgccgagacagcctccgagggcagcgtggaaagcgcttctgagaccagaagcggcccccagtctgcttccacagctgtgaaggaacgaccagcctcttctgaaaaggtgaaaggaggggatgaccacgatgacacctccgatagtgacagcgatggcctgaccttgaaagagcttcagaatcgccttcgcaggaagcgggaacaggagcccactgagaggcccctgaaagggatccagagtcgcctgcggaagaagcgccgggaggagggtcccgccgagactgtgggctccgaggccagtgacactgtggagggcgtcctgcccagtaagcaggagcccgagaacgatcagggggttgtgtcccaggctgggaaagatgacagagagagtaagttggagggaaaggcggctcaggacatcaaagatgaggagcctggagacttgggccgaccgaagcctgaatgtgagggttacgaccccaacgccctgtattgcatttgccgccagcctcacaacaacaggtttatgatttgctgtgaccgctgtgaagaatggtttcatggcgattgtgtgggcatttctgaggctcgagggaggcttttggaaaggaatggggaagactatatctgcccaaactgcaccattctgcaagtgcaggatgagactcattcagaaacggcagatcagcaggaagctaaatggagacctggagatgctgatggcaccgattgtacaagtataggaacaatagagcagaagtctagcgaagaccaagggataaagggtagaattgagaaagctgcaaatccaagtggcaagaagaaactcaagatcttccagcctgtgatagaggcgcctggtgcctcaaaatgtattggccccgggtgctgtcacgtggcgcagcccgactcggtgtactgcagtaatgactgtatcctcaaacacgccgcagcgacaatgaagtttctaagctcaggtaaagaacagaagccaaagcctaaagaaaagatgaagatgaagccagagaagcccagtcttccgaaatgcggtgctcaggcaggtattaaaatctcttctgtgcacaagagaccagctccagaaaaaaaagagaccacagtgaagaaggcagtggtggtccctgcgcggagtgaagcactcgggaaggaagcagcttgtgagagcagcacgccgtcgtgggcgagcgatcacaattacaatgcagtaaagccagaaaagactgctgctccctcgccgtcactgttgtataaatccacgaaggaagacaggaggtccgaggagaaagcggcagccanggcagcctcaaagaaaacagcccctccaggctccncggtgggcaagcagcctgcacctagaaacctcgtgccaaagaagtcttcttttgctaatgtggcagcagccacaccagccattaaaaagccaccctcaggtttcaagggcaccatccccaagaggccatggctctccgctaccccatcgagtggtgcttcagctgccaggcaggccggaccggcacctgcagcggcgacggctgcctccaagaagttccctggctccgctgctttggtgggagccgtaaggaagccagtggtaccttctgttccaatggcctcgccagccccaggacgccttggggctatgagtgctgcaccatcgcagccaaattcacaaattcggcaaaatatcagacgctccttaaaagagattttgtggaaaagagtcaatgacagcgatgacttaatcatgacagaaaacgaagtaggaaaaattgccctccatattgagaaggagatgtttaacttgtttcaagttacagataatcgctacaagagtaaatatcgcagcatcatgttcaacctgaaggaccctaaaaatcagggactcttccatcgtgttctgcgtgaggaaatctctttggcgaaacttgtgagactgaagccagaagaacttgtatctaaagagctttccacgtggaaagagaggccagcgagatctgtgatggagtccagaactaaactgcacaatgaaagcaagaagacggcccccaggcaggaggccatccccgatctggaggactctccgccagtgtcggattcagaggaacagcaagagtcagcacgtgctgtccctgagaagagcacagcgccgcttctcgacgtcttcagcagcatgttgaaagacaccaccagtcagcaccgcgcacacctcttcgatctcaactgtaaaatttgcacaggccaggttccctccgcagaagatgagccagctccgaaaaaacaaaaattgtcagcttctgttaagaaagaagacttaaaatcaaagcatgacagctctgcacctgacccagctccggattcagctgatgaggtgatgccggaggctgtgcctgaagttgcctctgagccaggcctagaaagtgcttctcatccaaatgtggacagaacgtatttccctgggcctccaggagatggccatcccgagccctccccgctggaagacctgtccccctgcccagcctcctgtgggagcggggtggtcaccaccgtcacagtgtccggccgggaccccaggaccgctccaagcagttcatgcacagccgtggcctccgcagcatcccgcccagacagcacccacatggtggaagccagacaggatgtgccgaagcctgtcttgacttctgtgatggtgcccaagtccatactagctaagccatcctcatctcctgacccaagatacctgtcagttcctccgtcaccaaatatcagcacttcagaatcacgttcccctccagagggagacacgaccctctttttgtctcgactcagcaccatttggaaaggatttattaacatgcagagtgtggcaaaatttgtcactaaggcgtatcctgtctctgggtgttttgattacctcagtgaggatttgcctgacacaattcacattggtgggaggatcgcaccgaagacagtttgggattatgttggcaaactcaagtcttctgtgtctaaggagctctgtctgatccgcttccaccccgccacagaggaagaggaggtcgcctatatctctctctactcctatttcagcagccgtggccgctttggtgttgtagctaataacaacaggcacgtcaaggacctctacctgatcccgctgagcgcccaggaccctgttccatccaaactcttgccctttgagggaccagtcgtgagtcacacgtcctaatattgttggttagtctacactggaaagcctgg

SEQ ID NO: 356864 - DNA, 3025 bp, Homo sapiens
  misc_feature (1885)..(1885): n is a, c, g, or t
  misc_feature (1920)..(1920): n is a, c, g, or t
  misc_feature (2813)..(2814): n is a, c, g, or t
tggcgaattcggcacgaggggaaatggctgcgagaccctagaggctgcggctgcggagcttactccacgggaacagcctctagataatctgagttgttgaaaatacgaagcctgttactcgtgaacagtggctgacaacagtgttgttgtgagcctggctgtctgcttggacccagaggtttcgtctgccagggtttttggttgtatttaggatttcagggaaaagtgtccaagctttcagtgttggagcaggtatggacgacaaaggcgacccgagcaatgaggaggcacctaaggccatcaaacccaccagcaaagagttcaggaaaacatggggttttcgaaggaccactatcgccaagcgagagggcgcaggggacgcggaggctgacccactggagccgccacccccacagcagcagctgggcctgtccctgcggcgcagtgggaggcagcccaagcgcactgagcgcgtggagcagttcctgaccattgcgcggcgccgcggcaggaggagcatgcctgtctccctggaggattctggtgagcccacgtcctgccccgccacagacgccgagacagcctccgagggcagcgtggaaagcgcttctgagaccagaagcggcccccagtctgcttccacagctgtgaaggaacgaccagcctcttctgaaaaggtgaaaggaggggatgaccacgatgacacctccgatagtgacagcgatggcctgaccttgaaagagcttcagaatcgccttcgcaggaagcgggaacaggagcccactgagaggcccctgaaagggatccagagtcgcctgcggaagaagcgccgggaggagggtcccgccgagactgtgggctccgaggccagtgacactgtggagggcgtcctgcccagtaagcaggagcccgagaacgatcagggggttgtgtcccaggctgggaaagatgacagagagagtaagttggagggaaaggcggctcaggacatcaaagatgaggagcctggagacttgggccgaccgaagcctgaatgtgagggttacgaccccaacgccctgtattgcatttgccgccagcctcacaacaacaggtttatgatttgctgtgaccgctgtgaagaatggtttcatggcgattgtgtgggcatttctgaggctcgagggaggcttttggaaaggaatggggaagactatatctgcccaaactgcaccattctgcaagtgcaggatgagactcattcagaaacggcagatcagcaggaagctaaatggagacctggagatgctgatggcaccgattgtacaagtataggaacaatagagcagaagtctagcgaagaccaagggataaagggtagaattgagaaagctgcaaatccaagtggcaagaagaaactcaagatcttccagcctgtgatagaggcgcctggtgcctcaaaatgtattggccccgggtgctgtcacgtggcgcagcccgactcggtgtactgcagtaatgactgtatcctcaaacacgccgcagcgacaatgaagtttctaagctcaggtaaagaacagaagccaaagcctaaagaaaagatgaagatgaagccagagaagcccagtcttccgaaatgcggtgctcaggcaggtattaaaatctcttctgtgcacaagagaccagctccagaaaaaaaagagaccacagtgaagaaggcagtggtggtccctgcgcggagtgaagcactcgggaaggaagcagcttgtgagagcagcacgccgtcgtgggcgagcgatcacaattacaatgcagtaaagccagaaaagactgctgctccctcgccgtcactgttgtataaatccacgaaggaagacaggaggtccgaggagaaagcggcagccanggcagcctcaaagaaaacagcccctccaggctccncggtgggcaagcagcctgcacctagaaacctcgtgccaaagaagtcttcttttgctaatgtggcagcagccacaccagccattaaaaagccaccctcaggtttcaagggcaccatccccaagaggccatggctctccgctaccccatcgagtggtgcttcagctgccaggcaggccggaccggcacctgcagcggcgacggctgcctccaagaagttccctggctccgctgctttggtgggagccgtaaggaagccagtggtaccttctgttccaatggcctcgccagccccaggacgccttggggctatgagtgctgcaccatcgcagccaaattcacaaattcggcaaaatatcagacgctccttaaaagagattttgtggaaaagagtcaatgacagcgatgacttaatcatgacagaaaacgaagtaggaaaaattgccctccatattgagaaggagatgtttaacttgtttcaagttacagataatcgctacaagagtaaatatcgcagcatcatgttcaacctgaaggaccctaaaaatcaggtgtgtgcctggtgtcggtgcattggagtattcctgttctgttcgctgggtgctaaagggatcaaccaatattttgagatgttcgtgtcctttccaggaaagctaagacgtttctttctcctctgtgatccttctgccgcccacgtattgttgcactggcgttgagcgtcctggaaaccccttcccttccctgccttaactagggtcgcgtccgcttcctggcttccctgaagtccaccttttatcaccacattagtctcctgtaaatgttgctgtgatggtccaagccagtcgcgtcagtgggctccatagtaacgtcccgtccttcatcaaagagttgaatanngacaagtgtcttatgtagttccttttttttattctgttcagagtcaatgacagcgatgacttaatcatgacagaaaacgaagtaggaaaaatggccctccatattgagaaggagatgtttaacttgtttcaagttacagataatcgctacaagagtaaatatcgcagcatcatgttcaacctgaaggaccctaaaaatcaggtgtgtgcct

SEQ ID NO: 356865 - DNA, 1593 bp, Homo sapiens
tagcactgttcagggagttttcttgattattttcaaatgattatttagcctttgaatgacttaatttttaaggctggtccttttgaaccctcggcgttgggcacagcctcgcgcgcaggcctttcctctcatttggctcatttggttcattgccgcactcctcctgtcatcttggcagcctgtccagtggctgctgctcctgtcatcttggcaacttggcacctcatcagggttgcaggtgactctgtgccagccgcccttcacggagcacaagtggttgaagttctcagttttgcacggggaaactgcgggcccaccgcgggcccaccgaatacgcaagtgtgttgaactgctgccaagcaggcgcaggatgggtgcagggtcttcagatggcctcaggaagacattgggtccccgccttcatctctcagtgaaatgaagtgaaggtatgatttcttacctttttaatgatttggggttttactgattatccaggcaggtattaaaatctcttctgtgcacaagagaccagctccagaaaaaaaagagaccacagtgaagaaggcagtggtggtccctgcgcggagtgaagcactcgggaaggaagcagcttgtgagagcagcacgccgtcgtgggcgagcgatcacaattacaatgcagtaaagccagaaaagactgctgctccctcgccgtcactgttgtataaatgtatgtatcacctaggggttggcctcctggacccctcccgttctttctggatagccatcccctgggcctgtccaggactgggagttgcagctttgtgttaagctgatcacagacaccggctgcaccatcagcgggaagcagagcccatgtccaggatgcctcctgctgccctgtgtccatccctagtctgtcaggacttcctgtcactgttttccaaagctgtaaacctcactggtgaacgttcaccttaatgattgattctttaatctctgttttcactctcaggctctggtaagtattcgtattctcttcatcccagtctgattgcatagccacactgcccggcacgccacatccacccctgtctgcacatgagttgttctgacaacagcgctgtatacgcttcagtttttccacattgtccacggccagcacatgaaagcatcacttcttttttatgttgtgggaatctttgcaagttagtgttgcatctgattttcaggtgtacatttatttttgactgggcagataggggatttttttttttccatgtccgattcacacgctacacacccacatgaacacattcgaacttcgaaggccacacactcctgcttcataggccccacggtaagtgagttcacacctagaacactgtcctgaccgcaggacgcgtgccttggacttggtattctacatgtgactggctttcttgccctcgtctcttgaatgtttagactcttaagatcatatcctgccccaaatttcaaattaatgaaatgaagatatttcaaacagatctttgaaacctcagattctgtggtgcaattttaatgttttcttgtttctcagttttctgctataaaactattttcaattcagaa

SEQ ID NO: 356866 - DNA, 5990 bp, Homo sapiens
  misc_feature (326)..(326): n is a, c, g, or t
  misc_feature (361)..(361): n is a, c, g, or t
  misc_feature (2529)..(2529): n is a, c, g, or t
  misc_feature (3754)..(3754): n is a, c, g, or t
caagcctttaataactagagtttgctggttgaaggtaaaagatagaataataaagcattcttctttctgaaataaaatgtagtcaccgtcataaatgctgctggcggtcctcccttacactcctctgaacactaacattttacaaatccttttctctatgtgtatcctattcagtaatgccaggtgggcacttacaggtttaagggtaagtctgctttttagagtcaggtgacagcaccctgtggtgtcctcccttactcagcgcctgtgttcttctttgtagccacgaaggaagacaggaggtccgaggagaaagcggcagccanggcagcctcaaagaaaacagcccctccaggctccncggtgggcaagcagcctgcacctagaaacctcgtgccaaagaagtcttcttttgctaatgtggcagcagccacaccagccattaaaaagccaccctcaggtttcaagggcaccatccccaagaggccatggctctccgctaccccatcgagtggtgcttcagctgccaggcaggccggaccggcacctgcagcggcgacggctgcctccaagaagttccctggctccgctgctttggtgggagccgtaaggaagccagtggtaccttctgttccaatggcctcgccagccccaggacgccttggggctatgagtgctgcaccatcgcagccaaattcacaaattcggcaaaatatcagacgctccttaaaagagattttgtggaaaagagtcaatgacagcgatgacttaatcatgacagaaaacgaagtaggaaaaattgccctccatattgagaaggagatgtttaacttgtttcaagttacagataatcgctacaagagtaaatatcgcagcatcatgttcaacctgaaggaccctaaaaatcagggactcttccatcgtgttctgcgtgaggaaatctctttggcgaaacttgtgagactgaagccagaagaacttgtatctaaagagctttccacgtggaaagagaggccagcgagatctgtgatggagtccagaactaaactgcacaatgaaagcaagaagacggcccccaggcaggaggccatccccgatctggaggactctccgccagtgtcggattcagaggaacagcaagagtcagcacgtgctgtccctgagaagagcacagcgccgcttctcgacgtcttcagcagcatgttgaaagacaccaccagtcagcaccgcgcacacctcttcgatctcaactgtaaaatttgcacaggccaggttccctccgcagaagatgagccagctccgaaaaaacaaaaattgtcagcttctgttaagaaagaagacttaaaatcaaagcatgacagctctgcacctgacccagctccggattcagctgatgaggtgatgccggaggctgtgcctgaagttgcctctgagccaggcctagaaagtgcttctcatccaaatgtggacagaacgtatttccctgggcctccaggagatggccatcccgagccctccccgctggaagacctgtccccctgcccagcctcctgtgggagcggggtggtcaccaccgtcacagtgtccggccgggaccccaggaccgctccaagcagttcatgcacagccgtggcctccgcagcatcccgcccagacagcacccacatggtggaagccagacaggatgtgccgaagcctgtcttgacttctgtgatggtgcccaagtccatactagctaagccatcctcatctcctgacccaagatacctgtcagttcctccgtcaccaaatatcagcacttcagaatcacgttcccctccagagggagacacgaccctctttttgtctcgactcagcaccatttggaaaggatttattaacatgcagagtgtggcaaaatttgtcactaaggcgtatcctgtctctgggtgttttgattacctcagtgaggatttgcctgacacaattcacattggtgggaggatcgcaccgaagacagtttgggattatgttggcaaactcaagtcttctgtgtctaaggagctctgtctgatccgcttccaccccgccacagaggaagaggaggtcgcctatatctctctctactcctatttcagcagccgtggccgctttggtgttgtagctaataacaacaggcacgtcaaggacctctacctgatcccgctgagcgcccaggaccctgttccatccaaactcttgccctttgagggaccaggtaagcgccggctttctgggtggaggtgaggcccacctgcacctgcacccctcctcccactgacatgccctgctgagtcctgaccagcccagggctctctgggagcaggagttaggagcacagacgcagcggttagcaataggattcatctttgagggcgtaggactgtggcacgagaagtacccctgattcacagcataaattgtcttaggagagttttttagagagggaaaaacccacagcctgcaaccagctcatcttggcctcaggtcagagaagactcagtgcccagnagcccaaggctcagccagaaagggaggtgacactcccagcggccctgctctttcctctagacagactcgggagccagcacacaccgggaagtggctccatcagggatcacttctctaacagggatggatttccaggagacttaacaataatgacatagaaaactatttctagaaataattattttaaaatctgcagctcaaattgtaataggttcattcatctttggcaagctattttgtgtttgcacgttccttggaaagtactgtatttaaacgattatttacaaatagcctaaaatacatctttgtcaagggttgagggtgattccaggggccacgtgctctgttagtgaccagctctttcatagccccttagaagaagctgatgtgacttcagttaggggttagtatctgatgcccaactgaagtgtctccgtggccatgcagtccccagaggattggtgttctctcaaagcgggtgtgtggatcacacagtgtcctctgaagtgcttcgtcataaaggcaggtgctgtctggaccctgtgcctcagtgccctctgtccctgtcaccaggcctcggcgggtgttcctgccatagctgtgcagggtgttcccacccacacccctcatgccgcaccctagctagctggggtcctgtaggggccactccacatcttgggcgggacttctgtcgccccaggcacagcccacgttcctactggagcccattcttcacagctggagtgggctcagcctatgcctgtgttgtggaattatatgtccataaagggattggttggtatcagtaatttcagggttaaatatttgctggcgtggtgcattaaattattttagtgccagataaatttttaaaagcaaagtgctttagtgtgtcccctcaaatcctacttgggataaagagatgccacctaatgggtggcagaaaggaccctggtagaggttcttggtgttgcttgtgaagagctctggccagctccacgtgaccagggagaggaaaagcccggccctcctggaggtgaagaccgagaagctggcctctccgcacctgtgaagacccactggtcagttgcaagtgcgacagtgtgtgcactcagtgcagacactgcagcacctcagcacctccctaccggggtggaaagagcactttttctttacagaaacatgattcttagatagcgagcctcccctttttaaaacaattgangcgatatttcatcctttcttgagcttctctccctgctcatctccaaacttggagctgtcaggtgagcacaggttgtagggtgttgagcgagccccggcgcatgccgggcaccgggttccccacactgggcagtgacggggcccagggaggccaccagaggagcggcgcctccattctccccacagcaagggctggctgtgcaggtgcagccccggggcagagggaaaggacaggtctcccagcacctcccggatggcaccgggacaaggagggctgggctggggtcactcaccttgtctgctgagtgcgatggcaccaaccacccacactgtcagctccgcgaccagctgggggaacgtcacactcgcccaccaaggcacttgctgaggccacgacgccgcctgacggggacacacaaaagccccagggactttgatccacgataaagagcagaggcgtctgggtaaagtaacacagggcaagggactttagaaaagtaacagctagtgaaacctttccatacacttcagaaatgttttaacttaagacttcagtataatgttaacttctcctgatgtccttgttgacatgaatgcgtgtgcgtgaaatctcacacacttccatggtcactaaacagccttcaccccgggccaggccatcgggtactcggcccgcttcacgtactgattacttgacttggcgttttctagatataaacatgtacatgtgtgtcctggctttgtggtgtaaatgtgtagtgcgtgtgcatgtgcgcgcgtgtgtgtgtgtaaggctaggtcctggcacgtttcccctgtctcagcggaccctgtcctcacggagatagcccagaagcccttggacagcacaggccacacctgagggtgctgatggtggtgactccacagagctgtggtcaggggtgagcgtgtgctgcgcagcttggagtcacgcccccagaagtgctgggtgagggtctgcaggacccagctccattccacagcctcagttctctgcggcacatgcagcacaggcctgaaggagacctggcgccccagccttgagctgcccgtctgcatcagggcactgatgtgggagcatcttcccctggggatgttaaggagaaggtcctgttgggggtagagattcacgcagaaaagagtgactgactcgtccatgtgcctcagtttataccacacaattgcaggtgtccatgcctcccacacatggggacctagtgggttttgacagcgtggtgtccagtcctagccccctcagtgcttgctgttcacacttaagcaagtgaaggcctgaaggtgcccagctgtgccctcaggggaaacttaagtcacccgccctgtcagcacttggcccttgtcgggcagtgagagtggagctgcccccgcagcaccctcaggagccatgcagttcacagcagtagctggatctccctgaggacatttgtccttgcatatcttaatgatttgtccacagaaacaccgggttgtcttcctctgcccctctgccccgcagtgggggcactctctgtaactcagcatcacggtggggggcagctgggaggcctggttccaggtgaccttctccacctagatgttcaccccactcagttccagctttaccaacagggccccccgcagggacttggggtcgcagagtcccggcctgtctcagggccttgttcatggaagggagatgagtcaggttgaaagctcatcgtgtagggttctgtgcagggcccttacaggactggaccgcagccaagatgcctgcctgttaaccatgcccagcccccgtcatttccgcgtgaagccgcaggcctcggagccttggtctgaaatgcctgtggagtaacctcggtccataaacatgggtgcacagtctgttctccccaagtacagggcaggaggaaacaccgccctctgtagctgctcgaatggaaagggctcttttctctgaggtctttatacattagaaagctcttctgggaagaatgtttgaatccatagtgtctttctgtattcacttttaattgctttctaaattagctgagaaattctgacttgaaatattgtcaggtaagcatttcttcagttttcatgtgtgtatgtaacagtagctttgcatggaaattgtaatcagagtcaaatacagtattgaatggaatgtactgccttctcctcctaaatcaataaacatctttcatggaaaaaaaaac

SEQ ID NO: 356867 - DNA, 1004 bp, Homo sapiens
cctgggtccgtatttccggatcttgtgagagcagcacgccgtcgtgggcgagcgatcacaattacaatgcagtaaagccagaaaagactgctgctccctcgccgtcactgttgtataaatgtatgtatcacctaggggttggcctcctggacccctcccgttctttctggatagccatcccctgggcctgtccaggactgggagttgcagctttgtgttaagctgatcacagacaccggctgcaccatcagcgggaagcagagcccatgtccaggatgcctcctgctgccctgtgtccatccctagtctgtcaggacttcctgtcactgttttccaaagctgtaaacctcactggtgaacgttcaccttaatgattgattctttaatctctgttttcactctcaggctctggtaagtattcgtattctcttcatcccagtctgattgcatagccacactgcccggcacgccacatccacccctgtctgcacatgagttgttctgacaacagcgctgtatacgcttcagtttttccacattgtccacggccagcacatgaaagcatcacttcttttttatgttgtgggaatctttgcaagttagtgttgcatctgattttcaggtgtacatttatttttgactgggcagataggggatttttttttttccatgtccgattcacacgctacacacccacatgaacacattcgaacttcgaaggccacacactcctgcttcataggccccacggtaagtgagttcacacctagaacactgtcctgaccgcaggacgcgtgccttggacttggtattctacatgtgactggctttcttgccctcgtctcttgaatgtttagactcttaagatcatatcctgccccaaatttcaaattaatgaaatgaagatatttcaaacagatctttgaaacctcagattctgtggtgcaattttaatgttttcttgtttctcagttttctgctataaaactattttcaattcagaa

SEQ ID NO: 356868 - DNA, 966 bp, Homo sapiens
  misc_feature (554)..(554): n is a, c, g, or t
  misc_feature (558)..(558): n is a, c, g, or t
gcttgatgtggttttcactgggagagttggtgacttacgactaatactcaccctgccacccagcccctcccttagcctgactggccagccaggccctctcccaggcatggtgtgggtctcctgtagcccccgagccccctccactctgtcctgggccagcctctcctttttggctcctccaagtgggcagtaattggctgggctccagctgggagcctgggttatggttgacacacatttcccacatgaacacattcgaacttcgaaggccacacactcctgcttcataggccccacggtaagtgagttcacacctagaacactgtcctgaccgcaggacgcgtgccttggacttggtattctacatgtgactggctttcttgccctcgtctcttgaatgtttagactcttaagatcatatcctgccccaaatttcaaattaatgaaatgaagatatttcaaacagatctttgaaacctcagattctgtggtgcaattttaatgttttcttgtttctcagttttctgctataaaactattttcaattcagaaantaangccttctgtctatagtgcattttgtgctttttttaaaaagcaccgaaaggttaaatagtctcaattcaaagatgatcacagagtgccccactttcccgtcgtcagactttgagcagattccctaagggaaggcactcatgcaggcaagcagacctatgctaggtctggtgtgccttacaaaaaagacactttttttttttttttttttttttttttgagacaagagtcttgctctgtcacccaggctggagtgcagtggcatgatctcggctcactgcaagctccacctccgggttcaaatgattctcctacctcagcctcccaagtagctgggattacaggcccgtgccaccatgcctggctaatttttgtatttttagtagagacggggtttcaccatgttggtca

SEQ ID NO: 356869 - DNA, 412 bp, Homo sapiens
cagggtttttggttgtatttaggatttcagggaaaagtgtccaagctttcagtgttggagcaggtaaggtatcaacactgttagtagcaacaaaattttaacttaataagtctgtatttgctatttataaagtggcatttgtaaagaaactgatagtagaatgtagtattcgtattcatttgaaatacattcagccatttgtatcagcagtctctatagcagcagattctgcatctgtggattcaaccagctgcagattggaaatatttgggggacaaacaataaataataatctgacaataaaaaataataaaaatgttataaaacagtgtagtacagcaactgtttctatgatgtaatctagagatgatctaaatatttgagaggttttgcataggtcatgtgcaaatag

SEQ ID NO: 356870 - DNA, 521 bp, Homo sapiens
gggcggcagtccaggggtctcctcacactcctgccccctgcagggcatgacgggcagtgacagtgtgaatgccttacctggctttttcatagcttgaatcaacaaaatgtttattcatattaaaagtactgttagtatctcattttgaaactgtggccttggtactataaatggtgattttacaaaacacacacttaactgcttaaaattggcaagtacattgtttgaagtcatctgttttgttctgcaggtgatagaggcgcctggtgcctcaaaatgtattggccccgggtgctgtcacgtggcgcagcccgactcggtgtactgcagtaatgactgtatcctcaaacacgccgcagcgacaatgaagtttctaagctcaggtaaagaacagaagccaaagcctaaagaaaagatgaagatgaagccagagaagcccagtcttccgaaatgcggtgctcaggtgagtggaccaggaccagccgcccaggcagtggacgcacaggcgtgagagcgtttgt

SEQ ID NO: 356871 - DNA, 478 bp, Homo sapiens
tgttcaaaaagtttaatatacacaagtgtcttatgtagttccttttttttattctgttcagagtcaatgacagcgatgacttaatcatgacagaaaacgaagtaggaaaaattgccctccatattgagaaggagatgtttaacttgtttcaagttacagataatcgctacaagagtaaatatcgcagcatcatgttcaacctgaaggaccctaaaaatcaggtgtgtgcctggtgtcggtgcattggagtattcctgttctgttcgctgggtgctaaagggatcaaccaatattttgagatgttcgtgtcctttccaggaaagctaagacgtttctttctcctctgtgatccttctgccgcccacgtattgttgcactggcgttgagcgtcctggaaaccccttcccttccctgccttaactagggtcgcgtccgcttcctggcttccctgaagtccaccttttatcaccacattagt

SEQ ID NO: 356872 - DNA, 2978 bp, Homo sapiens
ggggagcgggagggcaggcgcaccggaggccgcccctcagcacctctcgcgacagcaagagagcgcgagagcgcgagccgatgaccaatgaagcgcccccgcgagggggcggggcggacggcctcccggaagcgcggaacctcagcttccgtacttgcgcagaactcccctcgcggcgaccacgcactacgggttggcgccagagtcaaaaggcgtcggccctctggcaagatggctgctgcggaggcgttggagcgcggaaatctggaaccgggatggcgacgtctacactgagtcggaggcgaaggagcttactccacgggaacagcctctagataatctgagttgttgaaaatacgaagcctgttactcgtgaacagtggctgacaacagtgttgttgtgagcctggctgtctgcttggacccagaggtttcgtctgccagggtttttggttgtatttaggatttcagggaaaagtgtccaagctttcagtgttggagcaggtatggacgacaaaggcgacccgagcaatgaggaggcacctaaggccatcaaacccaccagcaaagagttcaggaaaacatggggttttcgaaggaccactatcgccaagcgagagggcgcaggggacgcggaggctgacccactggagccgccacccccacagcagcagctgggcctgtccctgcggcgcagtgggaggcagcccaagcgcactgagcgcgtggagcagttcctgaccattgcgcggcgccgcggcaggaggagcatgcctgtctccctggaggattctggtgagcccacgtcctgccccgccacagacgccgagacagcctccgagggcagcgtggaaagcgcttctgagaccagaagcggcccccagtctgcttccacagctgtgaaggaacgaccagcctcttctgaaaaggtgaaaggaggggatgaccacgatgacacctccgatagtgacagcgatggcctgaccttgaaagagcttcagaatcgccttcgcaggaagcgggaacaggagcccactgagaggcccctgaaagggatccagagtcgcctgcggaagaagcgccgggaggagggtcccgccgagactgtgggctccgaggccagtgacactgtggagggcgtcctgcccagtaagcaggagcccgagaacgatcagggggttgtgtcccaggctgggaaagatgacagagagagtaagttggagggaaaggcggctcaggacatcaaagatgaggagcctggagacttgggccgaccgaagcctgaatgtgagggttacgaccccaacgccctgtattgcatttgccgccagcctcacaacaacaggtttatgatttgctgtgaccgctgtgaagaatggtttcatggcgattgtgtgggcatttctgaggctcgagggaggcttttggaaaggaatggggaagactatatctgcccaaactgcaccattctgcaagtgcaggatgagactcattcagaaacggcagatcagcaggaagctaaatggagacctggagatgctgatggcaccgattgtacaagtataggaacaatagagcagaagtctagcgaagaccaagggataaagggtagaattgagaaagctgcaaatccaagtggcaagaagaaactcaagatcttccagcctgtgatagaggcgcctggtgcctcaaaatgtattggccccgggtgctgtcacgtggcgcagcccgactcggtgtactgcagtaatgactgtatcctcaaacacgccgcagcgacaatgaagtttctaagctcaggtaaagaacagaagccaaagcctaaagaaaagatgaagatgaagccagagaagcccagtcttccgaaatgcggtgctcaggcaggtattaaaatctcttctgtgcacaagagaccagctccagaaaaaaaagagaccacagtgaagaaggcagtggtggtccctgcgcggagtgaagcactcgggaaggaagcagcttgtgagagcagcacgccgtcgtgggcgagcgatcacaattacaatgcagtaaagccagaaaagactgctgctccctcgccgtcactgttgtataaatgtatgtatcacctaggggttggcctcctggacccctcccgttctttctggatagccatcccctgggcctgtccaggactgggagttgcagctttgtgttaagctgatcacagacaccggctgcaccatcagcgggaagcagagcccatgtccaggatgcctcctgctgccctgtgtccatccctagtctgtcaggacttcctgtcactgttttccaaagctgtaaacctcactggtgaacgttcaccttaatgattgattctttaatctctgttttcactctcaggctctggtaagtattcgtattctcttcatcccagtctgattgcatagccacactgcccggcacgccacatccacccctgtctgcacatgagttgttctgacaacagcgctgtatacgcttcagtttttccacattgtccacggccagcacatgaaagcatcacttcttttttatgttgtgggaatctttgcaagttagtgttgcatctgattttcaggtgtacatttatttttgactgggcagataggggatttttttttttccatgtccgattcacacgctacacacccacatgaacacattcgaacttcgaaggccacacactcctgcttcataggccccacggtaagtgagttcacacctagaacactgtcctgaccgcaggacgcgtgccttggacttggtattctacatgtgactggctttcttgccctcgtctcttgaatgtttagactcttaagatcatatcctgccccaaatttcaaattaatgaaatgaagatatttcaaacagatctttgaaacctcagattctgtggtgcaattttaatgttttcttgtttctcagttttctgctataaaactattttcaattcagaa

SEQ ID NO: 356873 - DNA, 1147 bp, Homo sapiens
  misc_feature (902)..(902): n is a, c, g, or t
ggggagcgggagggcaggcgcaccggaggccgcccctcagcacctctcgcgacagcaagagagcgcgagagcgcgagccgatgaccaatgaagcgcccccgcgagggggcggggcggacggcctcccggaagcgcggaacctcagcttccgtacttgcgcagaactcccctcgcggcgaccacgcactacgggttggcgccagagtcaaaaggcgtcggccctctggcaagatggctgctgcggaggcgttggagcgcggaaatctggaaccgggatggcgacgtctacactgagtcggaggcgaaggagcttactccacgggaacagcctctagataatctgagttgttgaaaatacgaagcctgttactcgtgaacagtggctgacaacagtgttgttgtgagcctggctgtctgcttggacccagaggtttcgtctgccagggtttttggttgtatttaggatttcagggaaaagtgtccaagctttcagtgttggagcaggtatggacgacaaaggcgacccgagcaatgaggaggcacctaaggccatcaaacccaccagcaaagagttcaggaaaacatggggttttcgaaggaccactatcgccaagcgagagggcgcaggggacgcggaggctgacccactggagccgccacccccacagcagcagctgggcctgtccctgcggcgcagtgggaggcagcccaagcgcactgagcgcgtggagcagttcctgaccattgcgcggcgccgcggcaggaggagcatgcctgtctccctggaggattctggtgagcccacgtcctgccccgccacagacgccgagacagcctccgagggcagcgtggaaagcgcttctgagaccagaagcggcccccagtctgcttccacaggtganaggaggggatgacacgatgacactctggacctccgttctttctgtagcatccctgggctgtcagactgggttgagttggtgaggtgtccagacacggtgcatcaggggaaggagcctgtcggagcccgggcgggcacccaggggggagcgtcggtcagggaccggtggggccaggggttacgggccgggggtgtttcccgggggaggggggcccgcgggtgtaggggtttttgccctatgggggt

SEQ ID NO: 356874 - DNA, 3140 bp, Homo sapiens
  misc_feature (2728)..(2728): n is a, c, g, or t
  misc_feature (2732)..(2732): n is a, c, g, or t
tggcgaattcggcacgaggggaaatggctgcgagaccctagaggctgcggctgcggagcttactccacgggaacagcctctagataatctgagttgttgaaaatacgaagcctgttactcgtgaacagtggctgacaacagtgttgttgtgagcctggctgtctgcttggacccagaggtttcgtctgccagggtttttggttgtatttaggatttcagggaaaagtgtccaagctttcagtgttggagcaggtatggacgacaaaggcgacccgagcaatgaggaggcacctaaggccatcaaacccaccagcaaagagttcaggaaaacatggggttttcgaaggaccactatcgccaagcgagagggcgcaggggacgcggaggctgacccactggagccgccacccccacagcagcagctgggcctgtccctgcggcgcagtgggaggcagcccaagcgcactgagcgcgtggagcagttcctgaccattgcgcggcgccgcggcaggaggagcatgcctgtctccctggaggattctggtgagcccacgtcctgccccgccacagacgccgagacagcctccgagggcagcgtggaaagcgcttctgagaccagaagcggcccccagtctgcttccacagctgtgaaggaacgaccagcctcttctgaaaaggtgaaaggaggggatgaccacgatgacacctccgatagtgacagcgatggcctgaccttgaaagagcttcagaatcgccttcgcaggaagcgggaacaggagcccactgagaggcccctgaaagggatccagagtcgcctgcggaagaagcgccgggaggagggtcccgccgagactgtgggctccgaggccagtgacactgtggagggcgtcctgcccagtaagcaggagcccgagaacgatcagggggttgtgtcccaggctgggaaagatgacagagagagtaagttggagggaaaggcggctcaggacatcaaagatgaggagcctggagacttgggccgaccgaagcctgaatgtgagggttacgaccccaacgccctgtattgcatttgccgccagcctcacaacaacaggtttatgatttgctgtgaccgctgtgaagaatggtttcatggcgattgtgtgggcatttctgaggctcgagggaggcttttggaaaggaatggggaagactatatctgcccaaactgcaccattctgcaagtgcaggatgagactcattcagaaacggcagatcagcaggaagctaaatggagacctggagatgctgatggcaccgattgtacaagtataggaacaatagagcagaagtctagcgaagaccaagggataaagggtagaattgagaaagctgcaaatccaagtggcaagaagaaactcaagatcttccagcctgtgatagaggcgcctggtgcctcaaaatgtattggccccgggtgctgtcacgtggcgcagcccgactcggtgtactgcagtaatgactgtatcctcaaacacgccgcagcgacaatgaagtttctaagctcaggtaaagaacagaagccaaagcctaaagaaaagatgaagatgaagccagagaagcccagtcttccgaaatgcggtgctcaggcaggtattaaaatctcttctgtgcacaagagaccagctccagaaaaaaaagagaccacagtgaagaaggcagtggtggtccctgcgcggagtgaagcactcgggaaggaagcagcttgtgagagcagcacgccgtcgtgggcgagcgatcacaattacaatgcagtaaagccagaaaagactgctgctccctcgccgtcactgttgtataaatgtatgtatcacctaggggttggcctcctggacccctcccgttctttctggatagccatcccctgggcctgtccaggactgggagttgcagctttgtgttaagctgatcacagacaccggctgcaccatcagcgggaagcagagcccatgtccaggatgcctcctgctgccctgtgtccatccctagtctgtcaggacttcctgtcactgttttccaaagctgtaaacctcactggtgaacgttcaccttaatgattgattctttaatctctgttttcactctcaggctctggtaagtattcgtattctcttcatcccagtctgattgcatagccacactgcccggcacgccacatccacccctgtctgcacatgagttgttctgacaacagcgctgtatacgcttcagtttttccacattgtccacggccagcacatgaaagcatcacttcttttttatgttgtgggaatctttgcaagttagtgttgcatctgattttcaggtgtacatttatttttgactgggcagataggggatttttttttttccatgtccgattcacacgctacacacccacatgaacacattcgaacttcgaaggccacacactcctgcttcataggccccacggtaagtgagttcacacctagaacactgtcctgaccgcaggacgcgtgccttggacttggtattctacatgtgactggctttcttgccctcgtctcttgaatgtttagactcttaagatcatatcctgccccaaatttcaaattaatgaaatgaagatatttcaaacagatctttgaaacctcagattctgtggtgcaattttaatgttttcttgtttctcagttttctgctataaaactattttcaattcagaaantaangccttctgtctatagtgcattttgtgctttttttaaaaagcaccgaaaggttaaatagtctcaattcaaagatgatcacagagtgccccactttcccgtcgtcagactttgagcagattccctaagggaaggcactcatgcaggcaagcagacctatgctaggtctggtgtgccttacaaaaaagacactttttttttttttttttttttttttttgagacaagagtcttgctctgtcacccaggctggagtgcagtggcatgatctcggctcactgcaagctccacctccgggttcaaatgattctcctacctcagcctcccaagtagctgggattacaggcccgtgccaccatgcctggctaatttttgtatttttagtagagacggggtttcaccatgttggtca

SEQ ID NO: 356875 - DNA, 2668 bp, Homo sapiens
tggcgaattcggcacgaggggaaatggctgcgagaccctagaggctgcggctgcggagcttactccacgggaacagcctctagataatctgagttgttgaaaatacgaagcctgttactcgtgaacagtggctgacaacagtgttgttgtgagcctggctgtctgcttggacccagaggtttcgtctgccagggtttttggttgtatttaggatttcagggaaaagtgtccaagctttcagtgttggagcaggtatggacgacaaaggcgacccgagcaatgaggaggcacctaaggccatcaaacccaccagcaaagagttcaggaaaacatggggttttcgaaggaccactatcgccaagcgagagggcgcaggggacgcggaggctgacccactggagccgccacccccacagcagcagctgggcctgtccctgcggcgcagtgggaggcagcccaagcgcactgagcgcgtggagcagttcctgaccattgcgcggcgccgcggcaggaggagcatgcctgtctccctggaggattctggtgagcccacgtcctgccccgccacagacgccgagacagcctccgagggcagcgtggaaagcgcttctgagaccagaagcggcccccagtctgcttccacagctgtgaaggaacgaccagcctcttctgaaaaggtgaaaggaggggatgaccacgatgacacctccgatagtgacagcgatggcctgaccttgaaagagcttcagaatcgccttcgcaggaagcgggaacaggagcccactgagaggcccctgaaagggatccagagtcgcctgcggaagaagcgccgggaggagggtcccgccgagactgtgggctccgaggccagtgacactgtggagggcgtcctgcccagtaagcaggagcccgagaacgatcagggggttgtgtcccaggctgggaaagatgacagagagagtaagttggagggaaaggcggctcaggacatcaaagatgaggagcctggagacttgggccgaccgaagcctgaatgtgagggttacgaccccaacgccctgtattgcatttgccgccagcctcacaacaacaggtttatgatttgctgtgaccgctgtgaagaatggtttcatggcgattgtgtgggcatttctgaggctcgagggaggcttttggaaaggaatggggaagactatatctgcccaaactgcaccattctgcaagtgcaggatgagactcattcagaaacggcagatcagcaggaagctaaatggagacctggagatgctgatggcaccgattgtacaagtataggaacaatagagcagaagtctagcgaagaccaagggataaagggtagaattgagaaagctgcaaatccaagtggcaagaagaaactcaagatcttccagcctgtgatagaggcgcctggtgcctcaaaatgtattggccccgggtgctgtcacgtggcgcagcccgactcggtgtactgcagtaatgactgtatcctcaaacacgccgcagcgacaatgaagtttctaagctcaggtaaagaacagaagccaaagcctaaagaaaagatgaagatgaagccagagaagcccagtcttccgaaatgcggtgctcaggcaggtattaaaatctcttctgtgcacaagagaccagctccagaaaaaaaagagaccacagtgaagaaggcagtggtggtccctgcgcggagtgaagcactcgggaaggaagcagcttgtgagagcagcacgccgtcgtgggcgagcgatcacaattacaatgcagtaaagccagaaaagactgctgctccctcgccgtcactgttgtataaatgtatgtatcacctaggggttggcctcctggacccctcccgttctttctggatagccatcccctgggcctgtccaggactgggagttgcagctttgtgttaagctgatcacagacaccggctgcaccatcagcgggaagcagagcccatgtccaggatgcctcctgctgccctgtgtccatccctagtctgtcaggacttcctgtcactgttttccaaagctgtaaacctcactggtgaacgttcaccttaatgattgattctttaatctctgttttcactctcaggctctggtaagtattcgtattctcttcatcccagtctgattgcatagccacactgcccggcacgccacatccacccctgtctgcacatgagttgttctgacaacagcgctgtatacgcttcagtttttccacattgtccacggccagcacatgaaagcatcacttcttttttatgttgtgggaatctttgcaagttagtgttttccatgtccgattcacacgctacacacccacatgaacacattcgaacttcgaaggccacacactcctgcttcataggccccacggtaagtgagttcacacctagaacactgtcctgaccgcaggacgcgtgccttggacttggtattctacatgtgactggctttcttgccctcgtctcttgaatgtttagactcttaagatcatatcctgccccaaatttcaaattaatgaaatgaagatatttcaaacagatctttgaaacctcagattctgtggtgcaattttaatgttttcttgtttctcagttttctgctataaaactattttcaattcagaa

SEQ ID NO: 356876 - DNA, 2060 bp, Homo sapiens
ggggagcgggagggcaggcgcaccggaggccgcccctcagcacctctcgcgacagcaagagagcgcgagagcgcgagccgatgaccaatgaagcgcccccgcgagggggcggggcggacggcctcccggaagcgcggaacctcagcttccgtacttgcgcagaactcccctcgcggcgaccacgcactacgggttggcgccagagtcaaaaggcgtcggccctctggcaagatggctgctgcggaggcgttggagcgcggaaatctggaaccgggatggcgacgtctacactgagtcggaggcgaaggagcttactccacgggaacagcctctagataatctgagttgttgaaaatacgaagcctgaatgtgagggttacgaccccaacgccctgtattgcatttgccgccagcctcacaacaacaggtttatgatttgctgtgaccgctgtgaagaatggtttcatggcgattgtgtgggcatttctgaggctcgagggaggcttttggaaaggaatggggaagactatatctgcccaaactgcaccattctgcaagtgcaggatgagactcattcagaaacggcagatcagcaggaagctaaatggagacctggagatgctgatggcaccgattgtacaagtataggaacaatagagcagaagtctagcgaagaccaagggataaagggtagaattgagaaagctgcaaatccaagtggcaagaagaaactcaagatcttccagcctgtgatagaggcgcctggtgcctcaaaatgtattggccccgggtgctgtcacgtggcgcagcccgactcggtgtactgcagtaatgactgtatcctcaaacacgccgcagcgacaatgaagtttctaagctcaggtaaagaacagaagccaaagcctaaagaaaagatgaagatgaagccagagaagcccagtcttccgaaatgcggtgctcaggcaggtattaaaatctcttctgtgcacaagagaccagctccagaaaaaaaagagaccacagtgaagaaggcagtggtggtccctgcgcggagtgaagcactcgggaaggaagcagcttgtgagagcagcacgccgtcgtgggcgagcgatcacaattacaatgcagtaaagccagaaaagactgctgctccctcgccgtcactgttgtataaatgtatgtatcacctaggggttggcctcctggacccctcccgttctttctggatagccatcccctgggcctgtccaggactgggagttgcagctttgtgttaagctgatcacagacaccggctgcaccatcagcgggaagcagagcccatgtccaggatgcctcctgctgccctgtgtccatccctagtctgtcaggacttcctgtcactgttttccaaagctgtaaacctcactggtgaacgttcaccttaatgattgattctttaatctctgttttcactctcaggctctggtaagtattcgtattctcttcatcccagtctgattgcatagccacactgcccggcacgccacatccacccctgtctgcacatgagttgttctgacaacagcgctgtatacgcttcagtttttccacattgtccacggccagcacatgaaagcatcacttcttttttatgttgtgggaatctttgcaagttagtgttgcatctgattttcaggtgtacatttatttttgactgggcagataggggatttttttttttccatgtccgattcacacgctacacacccacatgaacacattcgaacttcgaaggccacacactcctgcttcataggccccacggtaagtgagttcacacctagaacactgtcctgaccgcaggacgcgtgccttggacttggtattctacatgtgactggctttcttgccctcgtctcttgaatgtttagactcttaagatcatatcctgccccaaatttcaaattaatgaaatgaagatatttcaaacagatctttgaaacctcagattctgtggtgcaattttaatgttttcttgtttctcagttttctgctataaaactattttcaattcagaa

SEQ ID NO: 356877 - DNA, 4237 bp, Homo sapiens
  misc_feature (1885)..(1885): n is a, c, g, or t
  misc_feature (1920)..(1920): n is a, c, g, or t
tggcgaattcggcacgaggggaaatggctgcgagaccctagaggctgcggctgcggagcttactccacgggaacagcctctagataatctgagttgttgaaaatacgaagcctgttactcgtgaacagtggctgacaacagtgttgttgtgagcctggctgtctgcttggacccagaggtttcgtctgccagggtttttggttgtatttaggatttcagggaaaagtgtccaagctttcagtgttggagcaggtatggacgacaaaggcgacccgagcaatgaggaggcacctaaggccatcaaacccaccagcaaagagttcaggaaaacatggggttttcgaaggaccactatcgccaagcgagagggcgcaggggacgcggaggctgacccactggagccgccacccccacagcagcagctgggcctgtccctgcggcgcagtgggaggcagcccaagcgcactgagcgcgtggagcagttcctgaccattgcgcggcgccgcggcaggaggagcatgcctgtctccctggaggattctggtgagcccacgtcctgccccgccacagacgccgagacagcctccgagggcagcgtggaaagcgcttctgagaccagaagcggcccccagtctgcttccacagctgtgaaggaacgaccagcctcttctgaaaaggtgaaaggaggggatgaccacgatgacacctccgatagtgacagcgatggcctgaccttgaaagagcttcagaatcgccttcgcaggaagcgggaacaggagcccactgagaggcccctgaaagggatccagagtcgcctgcggaagaagcgccgggaggagggtcccgccgagactgtgggctccgaggccagtgacactgtggagggcgtcctgcccagtaagcaggagcccgagaacgatcagggggttgtgtcccaggctgggaaagatgacagagagagtaagttggagggaaaggcggctcaggacatcaaagatgaggagcctggagacttgggccgaccgaagcctgaatgtgagggttacgaccccaacgccctgtattgcatttgccgccagcctcacaacaacaggtttatgatttgctgtgaccgctgtgaagaatggtttcatggcgattgtgtgggcatttctgaggctcgagggaggcttttggaaaggaatggggaagactatatctgcccaaactgcaccattctgcaagtgcaggatgagactcattcagaaacggcagatcagcaggaagctaaatggagacctggagatgctgatggcaccgattgtacaagtataggaacaatagagcagaagtctagcgaagaccaagggataaagggtagaattgagaaagctgcaaatccaagtggcaagaagaaactcaagatcttccagcctgtgatagaggcgcctggtgcctcaaaatgtattggccccgggtgctgtcacgtggcgcagcccgactcggtgtactgcagtaatgactgtatcctcaaacacgccgcagcgacaatgaagtttctaagctcaggtaaagaacagaagccaaagcctaaagaaaagatgaagatgaagccagagaagcccagtcttccgaaatgcggtgctcaggcaggtattaaaatctcttctgtgcacaagagaccagctccagaaaaaaaagagaccacagtgaagaaggcagtggtggtccctgcgcggagtgaagcactcgggaaggaagcagcttgtgagagcagcacgccgtcgtgggcgagcgatcacaattacaatgcagtaaagccagaaaagactgctgctccctcgccgtcactgttgtataaatccacgaaggaagacaggaggtccgaggagaaagcggcagccanggcagcctcaaagaaaacagcccctccaggctccncggtgggcaagcagcctgcacctagaaacctcgtgccaaagaagtcttcttttgctaatgtggcagcagccacaccagccattaaaaagccaccctcaggtttcaagggcaccatccccaagaggccatggctctccgctaccccatcgagtggtgcttcagctgccaggcaggccggaccggcacctgcagcggcgacggctgcctccaagaagttccctggctccgctgctttggtgggagccgtaaggaagccagtggtaccttctgttccaatggcctcgccagccccaggacgccttggggctatgagtgctgcaccatcgcagccaaattcacaaattcggcaaaatatcagacgctccttaaaagagattttgtggaaaagagtcaatgacagcgatgacttaatcatgacagaaaacgaagtaggaaaaattgccctccatattgagaaggagatgtttaacttgtttcaagttacagataatcgctacaagagtaaatatcgcagcatcatgttcaacctgaaggaccctaaaaatcagggactcttccatcgtgttctgcgtgaggaaatctctttggcgaaacttgtgagactgaagccagaagaacttgtatctaaagagctttccacgtggaaagagaggccagcgagatctgtgatggagtccagaactaaactgcacaatgaaagcaagaagacggcccccaggcaggaggccatccccgatctggaggactctccgccagtgtcggattcagaggaacagcaagagtcagcacgtgctgtccctgagaagagcacagcgccgcttctcgacgtcttcagcagcatgttgaaagacaccaccagtcagcaccgcgcacacctcttcgatctcaactgtaaaatttgcacaggccaggttccctccgcagaagatgagccagctccgaaaaaacaaaaattgtcagcttctgttaagaaagaagacttaaaatcaaagcatgacagctctgcacctgacccagctccggattcagctgatgaggtgatgccggaggctgtgcctgaagttgcctctgagccaggcctagaaagtgcttctcatccaaatgtggacagaacgtatttccctgggcctccaggagatggccatcccgagccctccccgctggaagacctgtccccctgcccagcctcctgtgggagcggggtggtcaccaccgtcacagtgtccggccgggaccccaggaccgctccaagcagttcatgcacagccgtggcctccgcagcatcccgcccagacagcacccacatggtggaagccagacaggatgtgccgaagcctgtcttgacttctgtgatggtgcccaagtccatactagctaagccatcctcatctcctgacccaagatacctgtcagttcctccgtcaccaaatatcagcacttcagaatcacgttcccctccagagggagacacgaccctctttttgtctcgactcagcaccatttggaaaggatttattaacatgcagagtgtggcaaaatttgtcactaaggcgtatcctgtctctgggtgttttgattacctcagtgaggatttgcctgacacaattcacattggtgggaggatcgcaccgaagacagtttgggattatgttggcaaactcaagtcttctgtgtctaaggagctctgtctgatccgcttccaccccgccacagaggaagaggaggtcgcctatatctctctctactcctatttcagcagccgtggccgctttggtgttgtagctaataacaacaggcacgtcaaggacctctacctgatcccgctgagcgcccaggaccctgttccatccaaactcttgccctttgagggaccaggtcttgagtcaccacgtccgaatataattcttgggttagtaatctgccaaaaaatcaaacgtcccgcaaacagtggagagttagacaagatggacgaaaagcggacccgacttcaaccggaagaagcggacgttccggcctatccaaaagtagccacagtcccgcagtcggaaaagaagccctccaagtatccactctgctctgcagacgcggctgtcagcaccacacctcctgggtcgccgccgcctccgccccctcttccagaaccaccggtgctaaaagtgctgtcatccctcaaacctgcagcccccagcccagccacagcagccacaacagcagcggcagcctccacggcagcttcctccaccgcttcgtctgcttccaaaacagcatcaccgctggagcacatcctgcagactctctttggaaagaagaaatcatt

SEQ ID NO: 356878 - DNA, 1146 bp, Homo sapiens
cttcccgctgatggtgcagccggtgactgtgatcagcttaacacaaagctgcaactcccagtcctgcagaggcacaagagaccagctccagaaaaaaaagagaccacagtgaagaaggcagtggtggtccctgcgcggagtgaagcactcgggaaggaagcagcttgtgagagcagcacgccgtcgtgggcgagcgatcacaattacaatgcagtaaagccagaaaagactgctgctccctcgccgtcactgttgtataaatgtatgtatcacctaggggttggcctcctggacccctcccgttctttctggatagccatcccctgggcctgtccaggactgggagttgcagctttgtgttaagctgatcacagacaccggctgcaccatcagcgggaagcagagcccatgtccaggatgcctcctgctgccctgtgtccatccctagtctgtcaggacttcctgtcactgttttccaaagctgtaaacctcactggtgaacgttcaccttaatgattgattctttaatctctgttttcactctcaggctctggtaagtattcgtattctcttcatcccagtctgattgcatagccacactgcccggcacgccacatccacccctgtctgcacatgagttgttctgacaacagcgctgtatacgcttcagtttttccacattgtccacggccagcacatgaaagcatcacttcttttttatgttgtgggaatctttgcaagttagtgttgcatctgattttcaggtgtacatttatttttgactgggcagataggggatttttttttttccatgtccgattcacacgctacacacccacatgaacacattcgaacttcgaaggccacacactcctgcttcataggccccacggtaagtgagttcacacctagaacactgtcctgaccgcaggacgcgtgccttggacttggtattctacatgtgactggctttcttgccctcgtctcttgaatgtttagactcttaagatcatatcctgccccaaatttcaaattaatgaaatgaagatatttcaaacagatctttgaaacctcagattctgtggtgcaattttaatgttttcttgtttctcagttttctgctataaaactattttcaattcagaa

SEQ ID NO: 356879 - DNA, 1948 bp, Homo sapiens
tggcgaattcggcacgaggggaaatggctgcgagaccctagaggctgcggctgcggagcttactccacgggaacagcctctagataatctgagttgttgaaaatacgaagcctgttactcgtgaacagtggctgacaacagtgttgttgtgagcctggctgtctgcttggacccagaggtttcgtctgccagggtttttggttgtatttaggatttcagggaaaagtgtccaagctttcagtgttggagcaggtatggacgacaaaggcgacccgagcaatgaggaggcacctaaggccatcaaacccaccagcaaagagttcaggaaaacatggggttttcgaaggaccactatcgccaagcgagagggcgcaggggacgcggaggctgacccactggagccgccacccccacagcagcagctgggcctgtccctgcggcgcagtgggaggcagcccaagcgcactgagcgcgtggagcagttcctgaccattgcgcggcgccgcggcaggaggagcatgcctgtctccctggaggattctggtgagcccacgtcctgccccgccacagacgccgagacagcctccgagggcagcgtggaaagcgcttctgagaccagaagcggcccccagtctgcttccacagctgtgaaggaacgaccagcctcttctgaaaaggtgaaaggaggggatgaccacgatgacacctccgatagtgacagcgatggcctgaccttgaaagagcttcagaatcgccttcgcaggaagcgggaacaggagcccactgagaggcccctgaaagggatccagagtcgcctgcggaagaagcgccgggaggagggtcccgccgagactgtgggctccgaggccagtgacactgtggagggcgtcctgcccagtaagcaggagcccgagaacgatcagggggttgtgtcccaggctgggaaagatgacagagagagtaagttggagggaaaggcggctcaggacatcaaagatgaggagcctggagacttgggccgaccgaagcctgaatgtgagggttacgaccccaacgccctgtattgcatttgccgccagcctcacaacaacaggtttatgatttgctgtgaccgctgtgaagaatggtttcatggcgattgtgtgggcatttctgaggctcgagggaggcttttggaaaggaatggggaagactatatctgcccaaactgcaccattctgcaagtgcaggatgagactcattcagaaacggcagatcagcaggaagctaaatggagacctggagatgctgatggcaccgattgtacaagtataggaacaatagagcagaagtctagcgaagaccaagggataaagggtagaattgagaaagctgcaaatccaagtggcaagaagaaactcaagatcttccagcctgtgatagaggcgcctggtgcctcaaaatgtattggccccgggtgctgtcacgtggcgcagcccgactcggtgtactgcagtaatgactgtatcctcaaacacgccgcagcgacaatgaagtttctaagctcaggtaaagaacagaagccaaagcctaaagaaaagatgaagatgaagccagagaagcccagtcttccgaaatgcggtgctcaggtgagtggaccaggaccagccgcccaggcagtggacgcacaggcgtgagagcgtttgtcgcagaactgttggtttgtagaccgtgtgggggtggcaggtgtaggggggcgcacacgtggtgtcgccttgacctttgtcttccaccttcccaccagttttcccttctctgcccgttagctgaggggttaattaacacaagtgcagtaaagcaaatgctgacaatggcagtgtacggggggcataagacttcaggacacaccctgctgtcttgtgagaagagttggtaaccacccggtggagtttgtagagcgtagacttgc

SEQ ID NO: 356880 - DNA, 1302 bp, Homo sapiens
tggcgaattcggcacgagggggagacggacgttgagagaacgaggaggaaggagagaaaatggcgtccacggattacagtacctatagccaagctgcagcgcagcagggctacagtgcttacaccgcccagcccactcaaggatatgcacagaccacccaggcatatgggcaacaaagctatggaacctatggacagcccactgatgtcagctatacccaggctcagaccactgcaacctatgggcagaccgcctatgcaacttcttatggacagcctcccactggttatactactccaactgccccccaggcatacagccagcctgtccaggggtatggcactggtgcttatgataccaccactgctacagtcaccaccacccaggcctcctatgcagctcagtctgcatatggcactcagcctgcttatccagcctatgggcagcagccagcagccactgcacctacaagaccgcaggatggaaacaagcccactgagactagtcaacctcaatctagcacagggggttacaaccagcccagcctaggatatggacagagtaactacagttatccccaggtacctgggagctaccccatgcagccagtcactgcacctccatcctaccctcctaccagctattcctctacacagccgactagttatgatcagagcagttactctcagcagaacacctatgggcaaccgagcagctatggacagcagagtagctatggtcaacaaagcagctatgggcagcagcctcccactagttacccaccccaaactggatcctacagccaagctccaagtcaatatagccaacagagcagcagctacgggcagcagagttcattccgacaggaccaccccagtagcatgggtgtttatgggcaggagtctggaggattttccggaccaggagagaaccggagcatgagtggccctgataaccggggcaggggaagagggggatttgatcgtggaggcatgagcagaggtgggcggggaggaggacgcggtggaatggggttacaaagtgagagccttgtatacacttcaatacttaaaaagtacccgtactcagtactcagccggcagcataatgaaaagtgggactagacacggtgtccatatggagaggaaaaatatacatagaatatttttaacaaaatgtattcattgtataaatggaatccttctgtaactttggtaactgcatacttgttgtttggtaatgaaccagaggaggtataatactctagaattgtgtaacattaaagtgtaaacttttgtgttt

SEQ ID NO: 356881 - DNA, 569 bp, Homo sapiens
caagcttcgccttgcacccagaagagcccgtgttcctggcacagaccaatggcaactacctggcccttttctccactgtgtggccctaccggatgagcagacggcggcgctatgaagggcacaaggtggagggctactcagtgggctgcgagtgctccccaggcggtgacttgctggtgacgggcagcgccgatggccgggtcctgatgtacagcttccgcacagccagccgagcatgcacactgcaggggcacacacaggcctgtgtcggcaccacctaccaccccatgctgccctctgcccttcccactcagatctagatcctgctttcatttctggctagtgaagtagacttttgtgtttttgaggtttattagcaggtctgctcaggaaccaaactaatgagtagctttatattgggccaccccaatatatggctttgggggctgaaaaagcagatgtagaccccctccctcggatccttattggtgtgccctttagcactccgcagactctgcggggtgaacaggagtgatgataaaatttttcattctaacatattgaggctt

SEQ ID NO: 356882 - DNA, 187 bp, Homo sapiens
cgagctcggtacccccgcccagccacgggccgcccccgggtggtgatcgtggcagaggtggccctggtggcatgcggggaggaagaggtggcctcatggatcgtggtggtcccggtggaatgttcagaggtggccgtggtggagacagaggtggctgctactcggggggggatcctactagagtcac

SEQ ID NO: 356883 - DNA, 246 bp, Homo sapiens
tttattatatatatttgttcattcgttttaactattaagttttttttagtacgcacacacggccctactagatgcagagaccccgcagagctgcattgactaccagatttattttttaaaccagaaaatgttttaaatttataattccatatttataatgttggccacaacattatgattattccttgtctgtactttagtatttttcaccatttgtgaagaaacattaaaacaagttaaatggta

SEQ ID NO: 356884 - DNA, 3817 bp, Homo sapiens
gggcctactctgccgccgccgccgcccgcccgctccagccgccgccgccgccgccaccgccctccaggctccgggacccggcccgcgccaccgcccccgtgcgcgccccgccgccgccgccttcgccttcgccttttgtttcctccgctccggcgcccccgccccggctcgcgctttgcaggggacgcagcgcgcgcccccagcgggcccgggaaaagccgcggcgcgcgcgcgcgcctgcgcggcggacccctccttctcctccccgcgtgcgcgtgcccttcttggctgcgcgccggcgccgcctggcgggcgggaggggaggtggcaggcgcgtttgcaggaggggcgcacctcttcgctcgcgcacccccccggaaggtagaccgggaaggggaggcgggcgggcggagaggagagagtggcgcgcagtccagcgagggcgggggttggctatgtggggggtggtgcaccccgcagtctagacagtctgatccgggctgggggcgtgtacactcggcgcacctgcgagactacagagcctcgggccggcacgtgtggggagtgtggacacgtctgctgcgccccgcttctcgctgctgaggggaagggagggggcgggcaggtgcagcggccgggctagtgggagggggcggcggccatggagcgggtgaacgacgcttcgtgcggcccgtctggctgctacacataccaggtgagcagacacagcacggagatgctgcacaacctgaaccagcagcgcaaaaacggcgggcgcttctgcgacgtgctcttgcgggtaggcgacgagagcttcccagcgcaccgcgccgtgctggccgcctgcagcgagtactttgagtcggtgttcagcgcccagttgggcgacggcggagctgcggacgggggtccggctgatgtagggggcgcgacggcagcaccaggcggcggggccgggggcagccgggagctggagatgcacactatcagctccaaggtatttggggacattctggacttcgcctacacttcccgcatcgtggtgcgcttggagagctttcccgaactcatgacggccgccaagttcctgctgatgaggtcggttatcgagatctgccaggaagtcatcaaacagtccaacgtacagatcctggtaccccctgcccgcgccgatataatgctctttcgcccccctgggacctcggacttgggcttccctttggacatgaccaacggggcagccttggcagccaacagcaatggcatcgccggcagcatgcagccagaggaggaggcagctcgggcggctggtgcagccattgcaggccaagcctctttgcctgtgttacctggggtggaccgcttgcccatggtggctggacccctatccccccaactgctgacttccccattccccagtgtggcatccagtgcccctcccctgactggcaagcgaggccggggccgcccaaggaaggccaacctgctggactcaatgtttgggtccccagggggcctgagggaggcaggcatccttccatgcggtctatgtggtaaggtgttcactgatgccaaccggctccggcagcacgaggcccagcacggtgtcaccagcctccagctgggctacatcgaccttcctcctccgaggctgggtgagaatgggctacccatctctgaagaccccgacggcccccgaaagaggagccggaccaggaagcaggtggcttgtgagatctgcggcaagatcttccgtgatgtgtatcatcttaaccggcacaagctgtcccactctggggagaagccctactcctgccctgtgtgtgggttgcggttcaagagaaaagaccgcatgtcctaccatgtgcggtcccatgatgggtccgtgggcaagccttacatctgccagagctgtgggaaaggcttctccaggcctgatcacttgaacggacatatcaagcaggtgcacacttctgagcggcctcacaagtgtcagacctgcaatgcttcttttgccacccgagaccgtctgcgctcccacctggcctgtcatgaagacaaggtgccctgccaggtgtgtgggaagtacttgcgggcagcatacatggcagaccacctgaagaagcacagcgaggggcccagcaacttctgcagtatctgtaaccgaggtttctcctctgcctcctacttaaaggtccatgttaaaacccaccacggtgttccccttccccaggtctccaggcaccaggagcccatcctgaatgggggagcagcgttccactgcgccaggacctatggcaacaaagaaggccagaaatgctcacatcaggatccgattgagagctctgactcctatggtgacctctcagatgccagcgacctgaagacgccagagaagcagagtgccaatggctctttctcctgcgacatggcagtccccaaaaacaaaatggagtctgatggggagaagaagtacccatgccctgaatgtgggagcttcttccgctctaagtcctacttgaacaaacacatccagaaggtgcatgtccgggctctcgggggccccctgggggacctgggccctgcccttggctcacctttctctcctcagcagaacatgtctctcctcgagtcctttgggtttcagattgttcagtcggcatttgcgtcatctttagtagatcctgaggttgaccagcagcccatggggcctgaagggaaatgaggcagctgctgtgtccccacggaaacaaccatctggggactgctgggaaatgctgtgaatgcggagggaagtgatgtttgggttctgtagctgagagatttttattcatttttaactgccccccaaccccactccaactccttctccaccacccattctcccaatggtctttagaaatagattttcatctgatattctgcagaaatatcaatgagacttggtatgggacaggggcagaaaacactacataggcctccaaggcaaaaccagtcccagtttctttaatgggaagaagctggaattcctggtgctcaattcttagtgaccccaatcctatacccaaatctatgatattctgggacctcagtgattttggtcccctcccacttctctagttcgtcatcctcccttcccatatccttcaaaagaaccacactagggtctccacctacttatacaatgcggatgcccaactgtttttaaggaagccagaagcatcccatggaccatggggtgagtgtcctccaagagccccctgagctcagccctctgcctggagggctccagacctttctgagccctgcttggaggcgagcattttcactgctaggacaagctcagctgttgaggacacccccaccccaaatttcagttcttacgtgattttaaccattcaacatgctgttgggttttaattctctaattattattattattgttattattttttaggaccagttgtagtgaattgctactgaaagctatcccaggtgatacagagctctttgtaaaccgcagtcacacattagggttagtattaaactttgtttagatgtaccataattaacttggctagttgattgtttgaagtctatggaagaaatagttttatgcaaaattttaaaaaatgccagtctggtcagggaagtagggggtttcaatgctgttgggaaccaggaaggtgggacagccggcaggtagggacattgtgtacctcagttgtgtcacatgtgagcaagcccaggttgaccttgtgatgtgaattgatctgatcagactgtattaaaaatgttagtacattactctatctgc

SEQ ID NO: 356885 - DNA, 3752 bp, Homo sapiens
gggcctactctgccgccgccgccgcccgcccgctccagccgccgccgccgccgccaccgccctccaggctccgggacccggcccgcgccaccgcccccgtgcgcgccccgccgccgccgccttcgccttcgccttttgtttcctccgctccggcgcccccgccccggctcgcgctttgcaggggacgcagcgcgcgcccccagcgggcccgggaaaagccgcggcgcgcgcgcgcgcctgcgcggcggacccctccttctcctccccgcgtgcgcgtgcccttcttggctgcgcgccggcgccgcctggcgggcgggaggggaggtggcaggcgcgtttgcaggaggggcgcacctcttcgctcgcgcacccccccggaaggtagaccgggaaggggaggcgggcgggcggagaggagagagtggcgcgcagtccagcgagggcgggggttggctatgtggggggtggtgcaccccgcagtctagacagtctgatccgggctgggggcgtgtacactcggcgcacctgcgagactacagagcctcgggccggcacgtgtggggagtgtggacacgtctgctgcgccccgcttctcgctgctgaggggaagggagggggcgggcaggtgcagcggccgggctagtgggagggggcggcggccatggagcgggtgaacgacgcttcgtgcggcccgtctggctgctacacataccaggtgagcagacacagcacggagatgctgcacaacctgaaccagcagcgcaaaaacggcgggcgcttctgcgacgtgctcttgcgggtaggcgacgagagcttcccagcgcaccgcgccgtgctggccgcctgcagcgagtactttgagtcggtgttcagcgcccagttgggcgacggcggagctgcggacgggggtccggctgatgtagggggcgcgacggcagcaccaggcggcggggccgggggcagccgggagctggagatgcacactatcagctccaaggtatttggggacattctggacttcgcctacacttcccgcatcgtggtgcgcttggagagctttcccgaactcatgacggccgccaagttcctgctgatgaggtcggttatcgagatctgccaggaagtcatcaaacagtccaacgtacagatcctggtaccccctgcccgcgccgatataatgctctttcgcccccctgggacctcggacttgggcttccctttggacatgaccaacggggcagccttggcagccaacagcaatggcatcgccggcagcatgcagccagaggaggaggcagctcgggcggctggtgcagccattgcaggccaagcctctttgcctgtgttacctggggtggaccgcttgcccatggtggctggacccctatccccccaactgctgacttccccattccccagtgtggcatccagtgcccctcccctgactggcaagcgaggccggggccgcccaaggaaggccaacctgctggactcaatgtttgggtccccagggggcctgagggaggcaggcatccttccatgcggtctatgtggtaaggtgttcactgatgccaaccggctccggcagcacgaggcccagcacggtgtcaccagcctccagctgggctacatcgaccttcctcctccgaggctgggtgagaatgggctacccatctctgaagaccccgacggcccccgaaagaggagccggaccaggaagcaggtggcttgtgagatctgcggcaagatcttccgtgatgtgtatcatcttaaccggcacaagctgtcccactctggggagaagccctactcctgccctgtgtgtgggttgcggttcaagagaaaagaccgcatgtcctaccatgtgcggtcccatgatgggtccgtgggcaagccttacatctgccagagctgtgggaaaggcttctccaggcctgatcacttgaacggacatatcaagcaggtgcacacttctgagcggcctcacaagtgtcagacctgcaatgcttcttttgccacccgagaccgtctgcgctcccacctggcctgtcatgaagacaaggtgccctgccaggtgtgtgggaagtacttgcgggcagcatacatggcagaccacctgaagaagcacagcgaggggcccagcaacttctgcagtatctgtaaccgaggtctccaggcaccaggagcccatcctgaatgggggagcagcgttccactgcgccaggacctatggcaacaaagaaggccagaaatgctcacatcaggatccgattgagagctctgactcctatggtgacctctcagatgccagcgacctgaagacgccagagaagcagagtgccaatggctctttctcctgcgacatggcagtccccaaaaacaaaatggagtctgatggggagaagaagtacccatgccctgaatgtgggagcttcttccgctctaagtcctacttgaacaaacacatccagaaggtgcatgtccgggctctcgggggccccctgggggacctgggccctgcccttggctcacctttctctcctcagcagaacatgtctctcctcgagtcctttgggtttcagattgttcagtcggcatttgcgtcatctttagtagatcctgaggttgaccagcagcccatggggcctgaagggaaatgaggcagctgctgtgtccccacggaaacaaccatctggggactgctgggaaatgctgtgaatgcggagggaagtgatgtttgggttctgtagctgagagatttttattcatttttaactgccccccaaccccactccaactccttctccaccacccattctcccaatggtctttagaaatagattttcatctgatattctgcagaaatatcaatgagacttggtatgggacaggggcagaaaacactacataggcctccaaggcaaaaccagtcccagtttctttaatgggaagaagctggaattcctggtgctcaattcttagtgaccccaatcctatacccaaatctatgatattctgggacctcagtgattttggtcccctcccacttctctagttcgtcatcctcccttcccatatccttcaaaagaaccacactagggtctccacctacttatacaatgcggatgcccaactgtttttaaggaagccagaagcatcccatggaccatggggtgagtgtcctccaagagccccctgagctcagccctctgcctggagggctccagacctttctgagccctgcttggaggcgagcattttcactgctaggacaagctcagctgttgaggacacccccaccccaaatttcagttcttacgtgattttaaccattcaacatgctgttgggttttaattctctaattattattattattgttattattttttaggaccagttgtagtgaattgctactgaaagctatcccaggtgatacagagctctttgtaaaccgcagtcacacattagggttagtattaaactttgtttagatgtaccataattaacttggctagttgattgtttgaagtctatggaagaaatagttttatgcaaaattttaaaaaatgccagtctggtcagggaagtagggggtttcaatgctgttgggaaccaggaaggtgggacagccggcaggtagggacattgtgtacctcagttgtgtcacatgtgagcaagcccaggttgaccttgtgatgtgaattgatctgatcagactgtattaaaaatgttagtacattactctatctgc

SEQ ID NO: 356886 - DNA, 1121 bp, Homo sapiens
gtggcgggagaggctgggggaggggattgctgagtttctaaggggctttagtctggacaatgaatcacatatcccctcctggaaaggctgcagtgaggcagctctgtttcattctactgccaccgcctctggtcctagaaaacactgagtttctggtggggagaattgagggagtggggaggcaaaatcagagacaaatgcccatttctcttcccccctccagagaaaaccagggcagagaggcctgggcctgtggagccagaactgggtggtgactttgtctttgtcatgctggggttggggagagggagtcctttccagcagtgagtgtgtgtgtgtgtgtacacacgtatgcatatgtgcctgtgtggtggggtctggccaagtttctaaagtccctcttggttctctcttttccaggcctgatcacttgaacggacatatcaagcaggtgcacacttctgagcggcctcacaagtgtcagacctgcaatgcttcttttgccacccgagaccgtctgcgctcccacctggcctgtcatgaagacaaggtgccctgccaggtgtgtgggaagtacttgcgggcagcatacatggcagaccacctgaagaagcacagcgaggggcccagcaacttctgcagtatctgtaaccgaggtaatctgcccactgtttcctcacttccagaggatgggcctgagcgtgtatgggaggcctaggggtgtctcaatcaccctgcctcagactccactctttgcacagccaccccctacttcccactgaatgataaacaccttcatcacccaactagctatttgctacctcttccttcccaagaagcttggggtgcttagaatgggaagtcccaggagaccagcaggtcaaaacagaaggagagaggttcttcccaagcttgggcccataactctcacctgctactcagatggcaggatggatgcattttgcagacaccactgaaccactgaggttggtgggggagttagtaggtcccaaagtgagagaaaaagaggttggtccggcttgagagcttttgctggttgattcactggcatatgaaattcagcagccagggaaggaggttgagtctgaaggcagtctgga

SEQ ID NO: 356887 - DNA, 2385 bp, Homo sapiens
tggcgaattcggcacgagggggagacggacgttgagagaacgaggaggaaggagagaaaatggcgtccacggattacagtacctatagccaagctgcagcgcagcagggctacagtgcttacaccgcccagcccactcaaggatatgcacagaccacccaggcatatgggcaacaaagctatggaacctatggacagcccactgatgtcagctatacccaggctcagaccactgcaacctatgggcagaccgcctatgcaacttcttatggacagcctcccactggttatactactccaactgccccccaggcatacagccagcctgtccaggggtatggcactggtgcttatgataccaccactgctacagtcaccaccacccaggcctcctatgcagctcagtctgcatatggcactcagcctgcttatccagcctatgggcagcagccagcagccactgcacctacaagaccgcaggatggaaacaagcccactgagactagtcaacctcaatctagcacagggggttacaaccagcccagcctaggatatggacagagtaactacagttatccccaggtacctgggagctaccccatgcagccagtcactgcacctccatcctaccctcctaccagctattcctctacacagccgactagttatgatcagagcagttactctcagcagaacacctatgggcaaccgagcagctatggacagcagagtagctatggtcaacaaagcagctatgggcagcagcctcccactagttacccaccccaaactggatcctacagccaagctccaagtcaatatagccaacagagcagcagctacgggcagcagagttcattccgacaggaccaccccagtagcatgggtgtttatgggcaggagtctggaggattttccggaccaggagagaaccggagcatgagtggccctgataaccggggcaggggaagagggggatttgatcgtggaggcatgagcagaggtgggcggggaggaggacgcggtggaatgggcagcgctggagagcgaggtggcttcaataagcctggtggacccatggatgaaggaccagatcttgatctaggcccacctgtagatccagatgaagactctgacaacagtgcaatttatgtacaaggattaaatgacagtgtgactctagatgatctggcagacttctttaagcagtgtggggttgttaagatgaacaagagaactgggcaacccatgatccacatctacctggacaaggaaacaggaaagcccaaaggcgatgccacagtgtcctatgaagacccacccactgccaaggctgccgtggaatggtttgatgggaaagattttcaagggagcaaacttaaagtctcccttgctcggaagaagcctccaatgaacagtatgcggggtggtctgccaccccgtgagggcagaggcatgccaccaccactccgtggaggtccaggaggcccaggaggtcctgggggacccatgggtcgcatgggaggccgtggaggagatagaggaggcttccctccaagaggaccccggggttcccgagggaacccctctggaggaggaaacgtccagcaccgagctggagactggcagtgtcccaatccgggttgtggaaaccagaacttcgcctggagaacagagtgcaaccagtgtaaggccccaaagcctgaaggcttcctcccgccaccctttccgcccccgggtggtgatcgtggcagaggtggccctggtggcatgcggggaggaagaggtggcctcatggatcgtggtggtcccggtggaatgttcagaggtggccgtggtggagacagaggtggcttccgtggtggccggggcatggaccgaggtggctttggtggaggaagacgaggtggccctggggggccccctggacctttgatggaacagatgggaggaagaagaggaggacgtggaggacctggaaaaatggataaaggcgagcaccgtcaggagcgcagagatcggccctactagatgcagagaccccgcagagctgcattgactaccagatttattttttaaaccagaaaatgttttaaatttataattccatatttataatgttggccacaacattatgattattccttgtctgtactttagtatttttcaccatttgtgaagaaacattaaaacaagttaaatggtagtgtgcggagtttttttttcttccttcttttaaaaatggttgtttaagactttaacaatgggaaccccttgtgagcatgctcagtatcattgtggagaaccaagagggcctcttaactgtaacaatgttcatggttgtgatgttttttttttttttaaaataaaattccaaatgtttaat

SEQ ID NO: 356888 - DNA, 2385 bp, Homo sapiens
tggcgaattcggcacgagggggagacggacgttgagagaacgaggaggaaggagagaaaatggcgtccacggattacagtacctatagccaagctgcagcgcagcagggctacagtgcttacaccgcccagcccactcaaggatatgcacagaccacccaggcatatgggcaacaaagctatggaacctatggacagcccactgatgtcagctatacccaggctcagaccactgcaacctatgggcagaccgcctatgcaacttcttatggacagcctcccactggttatactactccaactgccccccaggcatacagccagcctgtccaggggtatggcactggtgcttatgataccaccactgctacagtcaccaccacccaggcctcctatgcagctcagtctgcatatggcactcagcctgcttatccagcctatgggcagcagccagcagccactgcacctacaagaccgcaggatggaaacaagcccactgagactagtcaacctcaatctagcacagggggttacaaccagcccagcctaggatatggacagagtaactacagttatccccaggtacctgggagctaccccatgcagccagtcactgcacctccatcctaccctcctaccagctattcctctacacagccgactagttatgatcagagcagttactctcagcagaacacctatgggcaaccgagcagctatggacagcagagtagctatggtcaacaaagcagctatgggcagcagcctcccactagttacccaccccaaactggatcctacagccaagctccaagtcaatatagccaacagagcagcagctacgggcagcagagttcattccgacaggaccaccccagtagcatgggtgtttatgggcaggagtctggaggattttccggaccaggagagaaccggagcatgagtggccctgataaccggggcaggggaagagggggatttgatcgtggaggcatgagcagaggtgggcggggaggaggacgcggtggaatgggcagcgctggagagcgaggtggcttcaataagcctggtggacccatggatgaaggaccagatcttgatctaggcccacctgtagatccagatgaagactctgacaacagtgcaatttatgtacaaggattaaatgacagtgtgactctagatgatctggcagacttctttaagcagtgtggggttgttaagatgaacaagagaactgggcaacccatgatccacatctacctggacaaggaaacaggaaagcccaaaggcgatgccacagtgtcctatgaagacccacccactgccaaggctgccgtggaatggtttgatgggaaagattttcaagggagcaaacttaaagtctcccttgctcggaagaagcctccaatgaacagtatgcggggtggtctgccaccccgtgagggcagaggcatgccaccaccactccgtggaggtccaggaggcccaggaggtcctgggggacccatgggtcgcatgggaggccgtggaggagatagaggaggcttccctccaagaggaccccggggttcccgagggaacccctctggaggaggaaacgtccagcaccgagctggagactggcagtgtcccaatccgggttgtggaaaccagaacttcgcctggagaacagagtgcaaccagtgtaaggccccaaagcctgaaggcttcctcccgccaccctttccgcccccgggtggtgatcgtggcagaggtggccctggtggcatgcggggaggaagaggtggcctcatggatcgtggtggtcccggtggaatgttcagaggtggccgtggtggagacagaggtggcttccgtggtggccggggcatggaccgaggtggctttggtggaggaagacgaggtggccctggggggccccctggacctttgatggaacagatgggaggaagaagaggaggacgtggaggacctggaaaaatggataaaggcgagcaccgtcaggagcgcagagatcggccctactagatgcagagaccccgcagagctgcattgactaccagatttattttttaaaccagaaaatgttttaaatttataattccatatttataatgttggccacaacattatgattattccttgtctgtactttagtatttttcaccatttgtgaagaaacattaaaacaagttaaatggtagtgtgcggagtttttttttcttccttcttttaaaaatggttgtttaagactttaacaatgggaaccccttgtgagcatgctcagtatcattgtggagaaccaagagggcctcttaactgtaacaatgttcatggttgtgatgttttttttttttttttaaataaaattccaaatgtttat

SEQ ID NO: 356889 - DNA, 3354 bp, Homo sapiens
tggcgaattcggcacgagggggagacggacgttgagagaacgaggaggaaggagagaaaatggcgtccacggattacagtacctatagccaagctgcagcgcagcagggctacagtgcttacaccgcccagcccactcaaggatatgcacagaccacccaggcatatgggcaacaaagctatggaacctatggacagcccactgatgtcagctatacccaggctcagaccactgcaacctatgggcagaccgcctatgcaacttcttatggacagcctcccactggttatactactccaactgccccccaggcatacagccagcctgtccaggggtatggcactggtgcttatgataccaccactgctacagtcaccaccacccaggcctcctatgcagctcagtctgcatatggcactcagcctgcttatccagcctatgggcagcagccagcagccactgcacctacaagaccgcaggatggaaacaagcccactgagactagtcaacctcaatctagcacagggggttacaaccagcccagcctaggatatggacagagtaactacagttatccccaggtacctgggagctaccccatgcagccagtcactgcacctccatcctaccctcctaccagctattcctctacacagccgactagttatgatcagagcagttactctcagcagaacacctatgggcaaccgagcagctatggacagcagagtagctatggtcaacaaagcagctatgggcagcagcctcccactagttacccaccccaaactggatcctacagccaagctccaagtcaatatagccaacagagcagcagctacgggcagcagagttcattccgacaggaccaccccagtagcatgggtgtttatgggcaggagtctggaggattttccggaccaggagagaaccggagcatgagtggccctgataaccggggcaggggaagagggggatttgatcgtggaggcatgagcagaggtgggcggggaggaggacgcggtggaatggggttacaaagtgagagccttgtatacacttcaatacttaaaaagtacccgtactcagtactcagccggcagcataatgaaaagtgggactagacacggtgtccatatggagaggaaaaatatacatagaatatttttaacaaaatgtattcattgtataaatggaatccttctgtaactttggtaactgcatacttgttgtttggtaatgaaccagaggaggtataatactctagaattgtgtaacattaaagtgtaaacttttgtgtttaaagagagagaacattttatggtgtgtacttttaaaaaggaaacaaagctgcatgcaacagcttgaaattgtatattcaggtattaaaggtgcaatactggttagaaaaaactcagggcctcccactggggagctgcctttatttaattttaaagaaaacaaaatctaacccaaaaagtccaattcatatttccctctcccctctttaagtaattttacatggccatagtcattattctaactgatatgtctataaagttgcacccccagtccgttgagccttggtatttgttgtaaattctcctttcacagcgattgttaaatctattcgtgccctgagatgtatggctttatgctgaagattggctggatgcgtcctctgatgtgtgttgtaggaatttaatgtggttgtctcctgcttttattatactgtgacttgttaggaaaccctgggcctcatttggctctcccttgggagaggttgagggtgcacctttatgaacatggaaaggtttatcacagcagttaacccccacttgctcctcccctctataccaagctcttctggtttttcacctgacggggtgggtgtttgggatctattttttcttgctaatttgccaagtattgcactattaataccagcccccgaaatgaaaggaaccaaccacactggtgtgtacaatcagacaagcaaggttgtatattgaggaaatttgagcaagctgccctgaagaaaggcatagtgacaagatgagagagatgcattgtttggagatgtgtttagccagtgcccttcttccccacgagcccccccaaggctcagagcggtactggcttttaaagggaaaggccttcatttcttcgtttatccccccagcagcgctggagagcgaggtggcttcaataagcctggtggacccatggatgaaggaccagatcttgatctaggcccacctgtagatccagatgaagactctgacaacagtgcaatttatgtacaaggattaaatgacagtgtgactctagatgatctggcagacttctttaagcagtgtggggttgttaagatgaacaagagaactgggcaacccatgatccacatctacctggacaaggaaacaggaaagcccaaaggcgatgccacagtgtcctatgaagacccacccactgccaaggctgccgtggaatggtttgatgggaaagattttcaagggagcaaacttaaagtctcccttgctcggaagaagcctccaatgaacagtatgcggggtggtctgccaccccgtgagggcagaggcatgccaccaccactccgtggaggtccaggaggcccaggaggtcctgggggacccatgggtcgcatgggaggccgtggaggagatagaggaggcttccctccaagaggaccccggggttcccgagggaacccctctggaggaggaaacgtccagcaccgagctggagactggcagtgtcccaatccgggttgtggaaaccagaacttcgcctggagaacagagtgcaaccagtgtaaggccccaaagcctgaaggcttcctcccgccaccctttccgcccccgggtggtgatcgtggcagaggtggccctggtggcatgcggggaggaagaggtggcctcatggatcgtggtggtcccggtggaatgttcagaggtggccgtggtggagacagaggtggcttccgtggtggccggggcatggaccgaggtggctttggtggaggaagacgaggtggccctggggggccccctggacctttgatggaacagatgggaggaagaagaggaggacgtggaggacctggaaaaatggataaaggcgagcaccgtcaggagcgcagagatcggccctactagatgcagagaccccgcagagctgcattgactaccagatttattttttaaaccagaaaatgttttaaatttataattccatatttataatgttggccacaacattatgattattccttgtctgtactttagtatttttcaccatttgtgaagaaacattaaaacaagttaaatggta

SEQ ID NO: 356890 - DNA, 3837 bp, Homo sapiens
tggcgaattcggcacgagggggagacggacgttgagagaacgaggaggaaggagagaaaatggcgtccacggattacagtacctatagccaagctgcagcgcagcagggctacagtgcttacaccgcccagcccactcaaggatatgcacagaccacccaggcatatgggcaacaaagctatggaacctatggacagcccactgatgtcagctatacccaggctcagaccactgcaacctatgggcagaccgcctatgcaacttcttatggacagcctcccactggttatactactccaactgccccccaggcatacagccagcctgtccaggggtatggcactggtgcttatgataccaccactgctacagtcaccaccacccaggcctcctatgcagctcagtctgcatatggcactcagcctgcttatccagcctatgggcagcagccagcagccactgcacctacaagaccgcaggatggaaacaagcccactgagactagtcaacctcaatctagcacagggggttacaaccagcccagcctaggatatggacagagtaactacagttatccccaggtacctgggagctaccccatgcagccagtcactgcacctccatcctaccctcctaccagctattcctctacacagccgactagttatgatcagagcagttactctcagcagaacacctatgggcaaccgagcagctatggacagcagagtagctatggtcaacaaagcagctatgggcagcagcctcccactagttacccaccccaaactggatcctacagccaagctccaagtcaatatagccaacagagcagcagctacgggcagcagagttcattccgacaggaccaccccagtagcatgggtgtttatgggcaggagtctggaggattttccggaccaggagagaaccggagcatgagtggccctgataaccggggcaggggaagagggggatttgatcgtggaggcatgagcagaggtgggcggggaggaggacgcggtggaatggggttacaaagtgagagccttgtatacacttcaatacttaaaaagtacccgtactcagtactcagccggcagcataatgaaaagtgggactagacacggtgtccatatggagaggaaaaatatacatagaatatttttaacaaaatgtattcattgtataaatggaatccttctgtaactttggtaactgcatacttgttgtttggtaatgaaccagaggaggtataatactctagaattgtgtaacattaaagtgtaaacttttgtgtttaaagagagagaacattttatggtgtgtacttttaaaaaggaaacaaagctgcatgcaacagcttgaaattgtatattcaggtattaaaggtgcaatactggttagaaaaaactcagggcctcccactggggagctgcctttatttaattttaaagaaaacaaaatctaacccaaaaagtccaattcatatttccctctcccctctttaagtaattttacatggccatagtcattattctaactgatatgtctataaagttgcacccccagtccgttgagccttggtatttgttgtaaattctcctttcacagcgattgttaaatctattcgtgccctgagatgtatggctttatgctgaagattggctggatgcgtcctctgatgtgtgttgtaggaatttaatgtggttgtctcctgcttttattatactgtgacttgttaggaaaccctgggcctcatttggctctcccttgggagaggttgagggtgcacctttatgaacatggaaaggtttatcacagcagttaacccccacttgctcctcccctctataccaagctcttctggtttttcacctgacggggtgggtgtttgggatctattttttcttgctaatttgccaagtattgcactattaataccagcccccgaaatgaaaggaaccaaccacactggtgtgtacaatcagacaagcaaggttgtatattgaggaaatttgagcaagctgccctgaagaaaggcatagtgacaagatgagagagatgcattgtttggagatgtgtttagccagtgcccttcttccccacgagcccccccaaggctcagagcggtactggcttttaaagggaaaggccttcatttcttcgtttatccccccagcagcgctggagagcgaggtggcttcaataagcctggtggtaagtttttgagtattaccatagatagtgtttaaaaaaaaatgcagtcagtttttagaaaactataatttttttattagtttcataagtggtttaaaaatgatctatacaaaagagactaatgggtactgccggcattgtcttaggggttaataaggttaacctatggttacaaaacaaagggtaacttgaagtattgagtaactgcttctgtaatatgggggagaataaatttttaaatttggtttatttagaggaaaaattttgacttaaatttaacactgatttggcacataagcattgagagtgtatttggttaatggtttagaagcaaaccagcaaaggaatagcagtgcgggtcattttgagtttaatgaatccccatcaaatggtggtatagtagatagctatgtgtgtttgtaaggtttgtagcttgcaagacgtgcactaataatattttatatgatctttcctggttggcaggacccatggatgaaggaccagatcttgatctaggcccacctgtagatccagatgaagactctgacaacagtgcaatttatgtacaaggattaaatgacagtgtgactctagatgatctggcagacttctttaagcagtgtggggttgttaagatgaacaagagaactgggcaacccatgatccacatctacctggacaaggaaacaggaaagcccaaaggcgatgccacagtgtcctatgaagacccacccactgccaaggctgccgtggaatggtttgatgggaaagattttcaagggagcaaacttaaagtctcccttgctcggaagaagcctccaatgaacagtatgcggggtggtctgccaccccgtgagggcagaggcatgccaccaccactccgtggaggtccaggaggcccaggaggtcctgggggacccatgggtcgcatgggaggccgtggaggagatagaggaggcttccctccaagaggaccccggggttcccgagggaacccctctggaggaggaaacgtccagcaccgagctggagactggcagtgtcccaatccgggttgtggaaaccagaacttcgcctggagaacagagtgcaaccagtgtaaggccccaaagcctgaaggcttcctcccgccaccctttccgcccccgggtggtgatcgtggcagaggtggccctggtggcatgcggggaggaagaggtggcctcatggatcgtggtggtcccggtggaatgttcagaggtggccgtggtggagacagaggtggcttccgtggtggccggggcatggaccgaggtggctttggtggaggaagacgaggtggccctggggggccccctggacctttgatggaacagatgggaggaagaagaggaggacgtggaggacctggaaaaatggataaaggcgagcaccgtcaggagcgcagagatcggccctactagatgcagagaccccgcagagctgcattgactaccagatttattttttaaaccagaaaatgttttaaatttataattccatatttataatgttggccacaacattatgattattccttgtctgtactttagtatttttcaccatttgtgaagaaacattaaaacaagttaaatggta

SEQ ID NO: 356891 - DNA, 2453 bp, Homo sapiens
tggcgaattcggcacgagggggagacggacgttgagagaacgaggaggaaggagagaaaatggcgtccacggattacagtacctatagccaagctgcagcgcagcagggctacagtgcttacaccgcccagcccactcaaggatatgcacagaccacccaggcatatgggcaacaaagctatggaacctatggacagcccactgatgtcagctatacccaggctcagaccactgcaacctatgggcagaccgcctatgcaacttcttatggacagcctcccactggttatactactccaactgccccccaggcatacagccagcctgtccaggggtatggcactggtgcttatgataccaccactgctacagtcaccaccacccaggcctcctatgcagctcagtctgcatatggcactcagcctgcttatccagcctatgggcagcagccagcagccactgcacctacaagaccgcaggatggaaacaagcccactgagactagtcaacctcaatctagcacagggggttacaaccagcccagcctaggatatggacagagtaactacagttatccccaggtacctgggagctaccccatgcagccagtcactgcacctccatcctaccctcctaccagctattcctctacacagccgactagttatgatcagagcagttactctcagcagaacacctatgggcaaccgagcagctatggacagcagagtagctatggtcaacaaagcagctatgggcagcagcctcccactagttacccaccccaaactggatcctacagccaagctccaagtcaatatagccaacagagcagcagctacgggcagcagagttcattccgacaggaccaccccagtagcatgggtgtttatgggcaggagtctggaggattttccggaccaggagagaaccggagcatgagtggccctgataaccggggcaggggaagagggggatttgatcgtggaggcatgagcagaggtgggcggggaggaggacgcggtggaatgggcagcgctggagagcgaggtggcttcaataagcctggtggacccatggatgaaggaccagatcttgatctaggcccacctgtagatccagatgaagactctgacaacagtgcaatttatgtacaaggattaaatgacagtgtgactctagatgatctggcagacttctttaagcagtgtggggttgttaagatgaacaagagaactgggcaacccatgatccacatctacctggacaaggaaacaggaaagcccaaaggcgatgccacagtgtcctatgaagacccacccactgccaaggctgccgtggaatggtttgatgggaaagattttcaagggagcaaacttaaagtctcccttgctcggaagaagcctccaatgaacagtatgcggggtggtctgccaccccgtgagggcagaggcatgccaccaccactccgtggaggtccaggaggcccaggaggtcctgggggacccatgggtcgcatgggaggccgtggaggagatagaggaggcttccctccaagaggaccccggggttcccgagggaacccctctggaggaggaaacgtccagcaccgagctggagactggcagtgtcccaatccgggttgtggaaaccagaacttcgcctggagaacagagtgcaaccagtgtaaggccccaaagcctgaaggcttcctcccgccaccctttccgcccccgggtggtgatcgtggcagaggtggccctggtggcatgcggggaggaagaggtggcctcatggatcgtggtggtcccggtggaatgttcagaggtggccgtggtggagacagaggtggcttccgtggtggccggggcatggaccgaggtggctttggtggaggaagacgaggtggccctggggggccccctggacctttgatggaacagatgggaggaagaagaggaggacgtggaggacctggaaaaatggataaaggcgagcaccgtcaggagcgcagagatcggccctactagatgcagagaccccgcagagctgcattgactaccagatttattttttaaaccagaaaatgttttaaatttataattccatatttataatgttggccacaacattatgattattccttgtctgtactttagtatttttcaccatttgtgaagaaacattaaaacaagttaaatggtagtgtgcggagtttttttttcttccttcttttaaaaatggttgtttaagactttaacaatgggaaccccttgtgagcatgctcagtatcattgtggagaaccaagagggcctcttaactgtaacaatgttcatggttgtgatgtttttttttttttttaaataaaattccaaatgtttataaaaaacagccctcagtcaacacgacacagaaacccacgcctcaagcagccccgccaacgaaactttgg

SEQ ID NO: 356892 - DNA, 2726 bp, Homo sapiens
tggcgaattcggcacgagggggagacggacgttgagagaacgaggaggaaggagagaaaatggcgtccacggattacagtacctatagccaagctgcagcgcagcagggctacagtgcttacaccgcccagcccactcaaggatatgcacagaccacccaggcatatgggcaacaaagctatggaacctatggacagcccactgatgtcagctatacccaggctcagaccactgcaacctatgggcagaccgcctatgcaacttcttatggacagcctcccactggttatactactccaactgccccccaggcatacagccagcctgtccaggggtatggcactggtgcttatgataccaccactgctacagtcaccaccacccaggcctcctatgcagctcagtctgcatatggcactcagcctgcttatccagcctatgggcagcagccagcagccactgcacctacaagaccgcaggatggaaacaagcccactgagactagtcaacctcaatctagcacagggggttacaaccagcccagcctaggatatggacagagtaactacagttatccccaggtacctgggagctaccccatgcagccagtcactgcacctccatcctaccctcctaccagctattcctctacacagccgactagttatgatcagagcagttactctcagcagaacacctatgggcaaccgagcagctatggacagcagagtagctatggtcaacaaagcagctatgggcagcagcctcccactagttacccaccccaaactggatcctacagccaagctccaagtcaatatagccaacagagcagcagctacgggcagcagagttcattccgacaggaccaccccagtagcatgggtgtttatgggcaggagtctggaggattttccggaccaggagagaaccggagcatgagtggccctgataaccggggcaggggaagagggggatttgatcgtggaggcatgagcagaggtgggcggggaggaggacgcggtggaatgggcagcgctggagagcgaggtggcttcaataagcctggtggacccatggatgaaggaccagatcttgatctaggcccacctgtagatccagatgaagactctgacaacagtgcaatttatgtacaaggattaaatgacagtgtgactctagatgatctggcagacttctttaagcagtgtggggttgttaagatgaacaagagaactgggcaacccatgatccacatctacctggacaaggaaacaggaaagcccaaaggcgatgccacagtgtcctatgaagacccacccactgccaaggctgccgtggaatggtttgatgggaaagattttcaagggagcaaacttaaagtctcccttgctcggaagaagcctccaatgaacagtatgcggggtggtctgccaccccgtgagggcagaggcatgccaccaccactccgtggaggtccaggaggcccaggaggtcctgggggacccatgggtcgcatgggaggccgtggaggagatagaggaggcttccctccaagaggaccccggggttcccgagggaacccctctggaggaggaaacgtccagcaccgagctggagactggcagtgtcccaatccgggttgtggaaaccagaacttcgcctggagaacagagtgcaaccagtgtaaggccccaaagcctgaaggcttcctcccgccaccctttccgcccccgggtggtgatcgtggcagaggtggccctggtggcatgcggggaggaagaggtggcctcatggatcgtggtggtcccggtggaatgttcagaggtggccgtggtggagacagaggtggcttccgtggtggccggggcatggaccgaggtggctttggtggaggaagacgaggtggccctggggggccccctggacctttgatggaacagatgggaggaagaagaggaggacgtggaggacctggaaaaatggataaaggcgagcaccgtcaggagcgcagagatcggccctactagatgcagagaccccgcagagctgcattgactaccagatttattttttaaaccagaaaatgttttaaatttataattccatatttataatgttggccacaacattatgattattccttgtctgtactttagtatttttcaccatttgtgaagaaacattaaaacaagttaaatggtagtgtgcggagtttttttttcttccttcttttaaaaatggttgtttaagactttaacaatgggaaccccttgtgagcatgctcagtatcattgtggagaaccaagagggcctcttaactgtaacaatgttcatgggtggtgactgtcggcgaggcgttaaaattaaaatttcgcaatggttgataagaaaataacacacagagcaaaaaaaaaggaggggcccgaataaaaaatatcccacgggggccaaggataaggtaaacccggagttcggctgcacacgggggcccaccaaagacgaacgttataaggcgacgaccgagcccgagttacacacgcgcgcgcgggaaacacgggccgcgggggccatccgaggggcggccacacacgggggggaaaccaacgtgcacaaaccccccaggatatagagcccagcgaggaaaaaacacgaggaacgcggaccaccccgcacgagcacagccgaaaaggtccggacagtgaggaatagcgcggacgcaacac

SEQ ID NO: 356893 - DNA, 2480 bp, Homo sapiens
tggcgaattcggcacgagggggagacggacgttgagagaacgaggaggaaggagagaaaatggcgtccacggattacagtacctatagccaagctgcagcgcagcagggctacagtgcttacaccgcccagcccactcaaggatatgcacagaccacccaggcatatgggcaacaaagctatggaacctatggacagcccactgatgtcagctatacccaggctcagaccactgcaacctatgggcagaccgcctatgcaacttcttatggacagcctcccactggttatactactccaactgccccccaggcatacagccagcctgtccaggggtatggcactggtgcttatgataccaccactgctacagtcaccaccacccaggcctcctatgcagctcagtctgcatatggcactcagcctgcttatccagcctatgggcagcagccagcagccactgcacctacaagaccgcaggatggaaacaagcccactgagactagtcaacctcaatctagcacagggggttacaaccagcccagcctaggatatggacagagtaactacagttatccccaggtacctgggagctaccccatgcagccagtcactgcacctccatcctaccctcctaccagctattcctctacacagccgactagttatgatcagagcagttactctcagcagaacacctatgggcaaccgagcagctatggacagcagagtagctatggtcaacaaagcagctatgggcagcagcctcccactagttacccaccccaaactggatcctacagccaagctccaagtcaatatagccaacagagcagcagctacgggcagcagagttcattccgacaggaccaccccagtagcatgggtgtttatgggcaggagtctggaggattttccggaccaggagagaaccggagcatgagtggccctgataaccggggcaggggaagagggggatttgatcgtggaggcatgagcagaggtgggcggggaggaggacgcggtggaatgggcagcgctggagagcgaggtggcttcaataagcctggtggacccatggatgaaggaccagatcttgatctaggcccacctgtagatccagatgaagactctgacaacagtgcaatttatgtacaaggattaaatgacagtgtgactctagatgatctggcagacttctttaagcagtgtggggttgttaagatgaacaagagaactgggcaacccatgatccacatctacctggacaaggaaacaggaaagcccaaaggcgatgccacagtgtcctatgaagacccacccactgccaaggctgccgtggaatggtttgatgggaaagattttcaagggagcaaacttaaagtctcccttgctcggaagaagcctccaatgaacagtatgcggggtggtctgccaccccgtgagggcagaggcatgccaccaccactccgtggaggtccaggaggcccaggaggtcctgggggacccatgggtcgcatgggaggccgtggaggagatagaggaggcttccctccaagaggaccccggggttcccgagggaacccctctggaggaggaaacgtccagcaccgagctggagactggcagtgtcccaatccgggttgtggaaaccagaacttcgcctggagaacagagtgcaaccagtgtaaggccccaaagcctgaaggcttcctcccgccaccctttccgcccccgggtggtgatcgtggcagaggtggccctggtggcatgcggggaggaagaggtggcctcatggatcgtggtggtcccggtggaatgttcagaggtggccgtggtggagacagaggtggcttccgtggtggccggggcatggaccgaggtggctttggtggaggaagacgaggtggccctggggggccccctggacctttgatggaacagatgggaggaagaagaggaggacgtggaggacctggaaaaatggataaaggcgagcaccgtcaggagcgcagagatcggccctactagatgcagagaccccgcagagctgcattgactaccagatttattttttaaaccagaaaatgttttaaatttataattccatatttataatgttggccacaacattatgattattccttgtctgtactttagtatttttcaccatttgtgaagaaacattaaaacaagttaaatggtaaaaaaaaaaaaaaaaaaaaaaaaaaaaaaatatttatattataatattaaaataaaatatataaaattttaaatctttttttaaaatataaaaattaataaataaaatggctaataaaataaaataattattaaagcgggctcatatttgtcccttttggggcaatttcccttatggggggttttaaaaataaagtggggccctgtttaaaaactcgaggaggggaaactcggggttccccatatggcgtggtatcccttttttcccggggggat

SEQ ID NO: 356894 - DNA, 2590 bp, Homo sapiens
  misc_feature (2393)..(2393): n is a, c, g, or t
tggcgaattcggcacgagggggagacggacgttgagagaacgaggaggaaggagagaaaatggcgtccacggattacagtacctatagccaagctgcagcgcagcagggctacagtgcttacaccgcccagcccactcaaggatatgcacagaccacccaggcatatgggcaacaaagctatggaacctatggacagcccactgatgtcagctatacccaggctcagaccactgcaacctatgggcagaccgcctatgcaacttcttatggacagcctcccactggttatactactccaactgccccccaggcatacagccagcctgtccaggggtatggcactggtgcttatgataccaccactgctacagtcaccaccacccaggcctcctatgcagctcagtctgcatatggcactcagcctgcttatccagcctatgggcagcagccagcagccactgcacctacaagaccgcaggatggaaacaagcccactgagactagtcaacctcaatctagcacagggggttacaaccagcccagcctaggatatggacagagtaactacagttatccccaggtacctgggagctaccccatgcagccagtcactgcacctccatcctaccctcctaccagctattcctctacacagccgactagttatgatcagagcagttactctcagcagaacacctatgggcaaccgagcagctatggacagcagagtagctatggtcaacaaagcagctatgggcagcagcctcccactagttacccaccccaaactggatcctacagccaagctccaagtcaatatagccaacagagcagcagctacgggcagcagagttcattccgacaggaccaccccagtagcatgggtgtttatgggcaggagtctggaggattttccggaccaggagagaaccggagcatgagtggccctgataaccggggcaggggaagagggggatttgatcgtggaggcatgagcagaggtgggcggggaggaggacgcggtggaatgggcagcgctggagagcgaggtggcttcaataagcctggtggacccatggatgaaggaccagatcttgatctaggcccacctgtagatccagatgaagactctgacaacagtgcaatttatgtacaaggattaaatgacagtgtgactctagatgatctggcagacttctttaagcagtgtggggttgttaagatgaacaagagaactgggcaacccatgatccacatctacctggacaaggaaacaggaaagcccaaaggcgatgccacagtgtcctatgaagacccacccactgccaaggctgccgtggaatggtttgatgggaaagattttcaagggagcaaacttaaagtctcccttgctcggaagaagcctccaatgaacagtatgcggggtggtctgccaccccgtgagggcagaggcatgccaccaccactccgtggaggtccaggaggcccaggaggtcctgggggacccatgggtcgcatgggaggccgtggaggagatagaggaggcttccctccaagaggaccccggggttcccgagggaacccctctggaggaggaaacgtccagcaccgagctggagactggcagtgtcccaatccgggttgtggaaaccagaacttcgcctggagaacagagtgcaaccagtgtaaggccccaaagcctgaaggcttcctcccgccaccctttccgcccccgggtggtgatcgtggcagaggtggccctggtggcatgcggggaggaagaggtggcctcatggatcgtggtggtcccggtggaatgttcagaggtggccgtggtggagacagaggtggcttccgtggtggccggggcatggaccgaggtggctttggtggaggaagacgaggtggccctggggggccccctggacctttgatggaacagatgggaggaagaagaggaggacgtggaggacctggaaaaatggataaaggcgagcaccgtcaggagcgcagagatcggccctactagatgcagagaccccgcagagctgcattgactaccagatttattttttaaaccagaaaatgttttaaatttataattccatatttataatgttggccacaacattatgattattccttgtctgtactttagtatttttcaccatttgtgaagaaacattaaaacaagttaaatggtaaaaaaaaagtcatttactctaccatgtttgcaggcacactcattacagcgctaagctcgcactgatttttttacctgagtaggcctagaaataaacatgctagcttttattccaggtctaaccaaaaaaataaaccctcgttccacagaagctgtcatcaagtatttcctcacgcaagcaaccgcatncataatccttctaatagctatcctctataacaatatactctgcggacaatgaaccataaccaatactaccaatcaatactcatcattaataatcataatggctatagcaataaaactaggaatagccccctttcacttttgagtccagaattaacccaggcacccctctgcaacccggctgctttttgtacatggca

SEQ ID NO: 356895 - DNA, 2512 bp, Homo sapiens
  misc_feature (2341)..(2341): n is a, c, g, or t
tggcgaattcggcacgagggggagacggacgttgagagaacgaggaggaaggagagaaaatggcgtccacggattacagtacctatagccaagctgcagcgcagcagggctacagtgcttacaccgcccagcccactcaaggatatgcacagaccacccaggcatatgggcaacaaagctatggaacctatggacagcccactgatgtcagctatacccaggctcagaccactgcaacctatgggcagaccgcctatgcaacttcttatggacagcctcccactggttatactactccaactgccccccaggcatacagccagcctgtccaggggtatggcactggtgcttatgataccaccactgctacagtcaccaccacccaggcctcctatgcagctcagtctgcatatggcactcagcctgcttatccagcctatgggcagcagccagcagccactgcacctacaagaccgcaggatggaaacaagcccactgagactagtcaacctcaatctagcacagggggttacaaccagcccagcctaggatatggacagagtaactacagttatccccaggtacctgggagctaccccatgcagccagtcactgcacctccatcctaccctcctaccagctattcctctacacagccgactagttatgatcagagcagttactctcagcagaacacctatgggcaaccgagcagctatggacagcagagtagctatggtcaacaaagcagctatgggcagcagcctcccactagttacccaccccaaactggatcctacagccaagctccaagtcaatatagccaacagagcagcagctacgggcagcagagttcattccgacaggaccaccccagtagcatgggtgtttatgggcaggagtctggaggattttccggaccaggagagaaccggagcatgagtggccctgataaccggggcaggggaagagggggatttgatcgtggaggcatgagcagaggtgggcggggaggaggacgcggtggaatgggcagcgctggagagcgaggtggcttcaataagcctggtggacccatggatgaaggaccagatcttgatctaggcccacctgtagatccagatgaagactctgacaacagtgcaatttatgtacaaggattaaatgacagtgtgactctagatgatctggcagacttctttaagcagtgtggggttgttaagatgaacaagagaactgggcaacccatgatccacatctacctggacaaggaaacaggaaagcccaaaggcgatgccacagtgtcctatgaagacccacccactgccaaggctgccgtggaatggtttgatgggaaagattttcaagggagcaaacttaaagtctcccttgctcggaagaagcctccaatgaacagtatgcggggtggtctgccaccccgtgagggcagaggcatgccaccaccactccgtggaggtccaggaggcccaggaggtcctgggggacccatgggtcgcatgggaggccgtggaggagatagaggaggcttccctccaagaggaccccggggttcccgagggaacccctctggaggaggaaacgtccagcaccgagctggagactggcagtgtcccaatccgggttgtggaaaccagaacttcgcctggagaacagagtgcaaccagtgtaaggccccaaagcctgaaggcttcctcccgccaccctttccgcccccgggtggtgatcgtggcagaggtggccctggtggcatgcggggaggaagaggtggcctcatggatcgtggtggtcccggtggaatgttcagaggtggccgtggtggagacagaggtggcttccgtggtggccggggcatggaccgaggtggctttggtggaggaagacgaggtggccctggggggccccctggacctttgatggaacagatgggaggaagaagaggaggacgtggaggacctggaaaaatggataaaggcgagcaccgtcaggagcgcagagatcggccctactagatgcagagaccccgcagagctgcattgactaccagatttattttttaaaccagaaaatgttttaaatttataattccatatttataatgttggccacaacattatgattattccttgtctgtactttagtatttttcaccatttgtgaagaaacattaaaacaagttaaatggtaaaaaaaaaaaaaaaaaaaaaaaaaaaataaaaaaaaaaaaaaaaaaaaaaaaaaaaaaaaaaaaaaaaaaaaaaaaaaaaaaaaaaaaaaaaaattccccccacattttcattcattttccaaattcccttcaatntggcccatttcaaattaataggcccgggttttaaaaacactgggactggaaaaaacactggggtacccaaataaacccgctttggggctcccttttcccgagctgggtaaattttaaataggccctgacaaatccgcttttccaaacgtgtggccccttttgcgcgggccc

SEQ ID NO: 356896 - DNA, 2244 bp, Homo sapiens
tggcgaattcggcacgagggggagacggacgttgagagaacgaggaggaaggagagaaaatggcgtccacggattacagtacctatagccaagctgcagcgcagcagggctacagtgcttacaccgcccagcccactcaaggatatgcacagaccacccaggcatatgggcaacaaagctatggaacctatggacagcccactgatgtcagctatacccaggctcagaccactgcaacctatgggcagaccgcctatgcaacttcttatggacagcctcccactggttatactactccaactgccccccaggcatacagccagcctgtccaggggtatggcactggtgcttatgataccaccactgctacagtcaccaccacccaggcctcctatgcagctcagtctgcatatggcactcagcctgcttatccagcctatgggcagcagccagcagccactgcacctacaagaccgcaggatggaaacaagcccactgagactagtcaacctcaatctagcacagggggttacaaccagcccagcctaggatatggacagagtaactacagttatccccaggtacctgggagctaccccatgcagccagtcactgcacctccatcctaccctcctaccagctattcctctacacagccgactagttatgatcagagcagttactctcagcagaacacctatgggcaaccgagcagctatggacagcagagtagctatggtcaacaaagcagctatgggcagcagcctcccactagttacccaccccaaactggatcctacagccaagctccaagtcaatatagccaacagagcagcagctacgggcagcagagttcattccgacaggaccaccccagtagcatgggtgtttatgggcaggagtctggaggattttccggaccaggagagaaccggagcatgagtggccctgataaccggggcaggggaagagggggatttgatcgtggaggcatgagcagaggtgggcggggaggaggacgcggtggaatgggcagcgctggagagcgaggtggcttcaataagcctggtggacccatggatgaaggaccagatcttgatctaggcccacctgtagatccagatgaagactctgacaacagtgcaatttatgtacaaggattaaatgacagtgtgactctagatgatctggcagacttctttaagcagtgtggggttgttaagatgaacaagagaactgggcaacccatgatccacatctacctggacaaggaaacaggaaagcccaaaggcgatgccacagtgtcctatgaagacccacccactgccaaggctgccgtggaatggtttgatgggaaagattttcaagggagcaaacttaaagtctcccttgctcggaagaagcctccaatgaacagtatgcggggtggtctgccaccccgtgagggcagaggcatgccaccaccactccgtggaggtccaggaggcccaggaggtcctgggggacccatgggtcgcatgggaggccgtggaggagatagaggaggcttccctccaagaggaccccggggttcccgagggaacccctctggaggaggaaacgtccagcaccgagctggagactggcagtgtcccaatccttcaattggtgatttctgctgtgatgtaattgtatgcaggggttgtggaaaccagaacttcgcctggagaacagagtgcaaccagtgtaaggccccaaagcctgaaggcttcctcccgccaccctttccgcccccgggtggtgatcgtggcagaggtggccctggtggcatgcggggaggaagaggtggcctcatggatcgtggtggtcccggtggaatgttcagaggtggccgtggtggagacagaggtggcttccgtggtggccggggcatggaccgaggtggctttggtggaggaagacgaggtggccctggggggccccctggacctttgatggaacagatgggaggaagaagaggaggacgtggaggacctggaaaaatggataaaggcgagcaccgtcaggagcgcagagatcggccctactagatgcagagaccccgcagagctgcattgactaccagatttattttttaaaccagaaaatgttttaaatttataattccatatttataatgttggccacaacattatgattattccttgtctgtactttagtatttttcaccatttgtgaagaaacattaaaacaagttaaatggta

SEQ ID NO: 356897 - DNA, 2471 bp, Homo sapiens
tggcgaattcggcacgagggggagacggacgttgagagaacgaggaggaaggagagaaaatggcgtccacggattacagtacctatagccaagctgcagcgcagcagggctacagtgcttacaccgcccagcccactcaaggatatgcacagaccacccaggcatatgggcaacaaagctatggaacctatggacagcccactgatgtcagctatacccaggctcagaccactgcaacctatgggcagaccgcctatgcaacttcttatggacagcctcccactggttatactactccaactgccccccaggcatacagccagcctgtccaggggtatggcactggtgcttatgataccaccactgctacagtcaccaccacccaggcctcctatgcagctcagtctgcatatggcactcagcctgcttatccagcctatgggcagcagccagcagccactgcacctacaagaccgcaggatggaaacaagcccactgagactagtcaacctcaatctagcacagggggttacaaccagcccagcctaggatatggacagagtaactacagttatccccaggtacctgggagctaccccatgcagccagtcactgcacctccatcctaccctcctaccagctattcctctacacagccgactagttatgatcagagcagttactctcagcagaacacctatgggcaaccgagcagctatggacagcagagtagctatggtcaacaaagcagctatgggcagcagcctcccactagttacccaccccaaactggatcctacagccaagctccaagtcaatatagccaacagagcagcagctacgggcagcagagttcattccgacaggaccaccccagtagcatgggtgtttatgggcaggagtctggaggattttccggaccaggagagaaccggagcatgagtggccctgataaccggggcaggggaagagggggatttgatcgtggaggcatgagcagaggtgggcggggaggaggacgcggtggaatgggcagcgctggagagcgaggtggcttcaataagcctggtggacccatggatgaaggaccagatcttgatctaggcccacctgtagatccagatgaagactctgacaacagtgcaatttatgtacaaggattaaatgacagtgtgactctagatgatctggcagacttctttaagcagtgtggggttgttaagatgaacaagagaactgggcaacccatgatccacatctacctggacaaggaaacaggaaagcccaaaggcgatgccacagtgtcctatgaagacccacccactgccaaggctgccgtggaatggtttgatgggaaagattttcaagggagcaaacttaaagtctcccttgctcggaagaagcctccaatgaacagtatgcggggtggtctgccaccccgtgagggcagaggcatgccaccaccactccgtggaggtccaggaggcccaggaggtcctgggggacccatgggtcgcatgggaggccgtggaggagatagaggaggcttccctccaagaggaccccggggttcccgagggaacccctctggaggaggaaacgtccagcaccgagctggagactggcagtgtcccaatccgggttgtggaaaccagaacttcgcctggagaacagagtgcaaccagtgtaaggccccaaagcctgaaggcttcctcccgccaccctttccgcccccgggtaggtgcaggtttcatgagtgtcccctcagcttcctggtgctaaacctcttttcttatttgtgggcttggtaaactgcagttgccctctgcttaacaactttgagttgtcgtgtcctcatttctaaattgtcagcccgatgccgagattgagtgaagtgtctggtttgttctgctgtgagagaaggaagcagagcagcttccacagtgtccacagggcctctgcagccacccactgactgctttcgccctgctattctcaccttaggggtgatcgtggcagaggtggccctggtggcatgcggggaggaagaggtggcctcatggatcgtggtggtcccggtggaatgttcagaggtggccgtggtggagacagaggtggcttccgtggtggccggggcatggaccgaggtggctttggtggaggaagacgaggtggccctggggggccccctggacctttgatggaacagatgggaggaagaagaggaggacgtggaggacctggaaaaatggataaaggcgagcaccgtcaggagcgcagagatcggccctactagatgcagagaccccgcagagctgcattgactaccagatttattttttaaaccagaaaatgttttaaatttataattccatatttataatgttggccacaacattatgattattccttgtctgtactttagtatttttcaccatttgtgaagaaacattaaaacaagttaaatggta

SEQ ID NO: 356898 - DNA, 2543 bp, Homo sapiens
tggcgaattcggcacgagggggagacggacgttgagagaacgaggaggaaggagagaaaatggcgtccacggattacagtacctatagccaagctgcagcgcagcagggctacagtgcttacaccgcccagcccactcaaggatatgcacagaccacccaggcatatgggcaacaaagctatggaacctatggacagcccactgatgtcagctatacccaggctcagaccactgcaacctatgggcagaccgcctatgcaacttcttatggacagcctcccactggttatactactccaactgccccccaggcatacagccagcctgtccaggggtatggcactggtgcttatgataccaccactgctacagtcaccaccacccaggcctcctatgcagctcagtctgcatatggcactcagcctgcttatccagcctatgggcagcagccagcagccactgcacctacaagaccgcaggatggaaacaagcccactgagactagtcaacctcaatctagcacagggggttacaaccagcccagcctaggatatggacagagtaactacagttatccccaggtacctgggagctaccccatgcagccagtcactgcacctccatcctaccctcctaccagctattcctctacacagccgactagttatgatcagagcagttactctcagcagaacacctatgggcaaccgagcagctatggacagcagagtagctatggtcaacaaagcagctatgggcagcagcctcccactagttacccaccccaaactggatcctacagccaagctccaagtcaatatagccaacagagcagcagctacgggcagcagagttcattccgacaggaccaccccagtagcatgggtgtttatgggcaggagtctggaggattttccggaccaggagagaaccggagcatgagtggccctgataaccggggcaggggaagagggggatttgatcgtggaggcatgagcagaggtgggcggggaggaggacgcggtggaatgggcagcgctggagagcgaggtggcttcaataagcctggtggacccatggatgaaggaccagatcttgatctaggcccacctgtagatccagatgaagactctgacaacagtgcaatttatgtacaaggattaaatgacagtgtgactctagatgatctggcagacttctttaagcagtgtggggttgttaagatgaacaagagaactgggcaacccatgatccacatctacctggacaaggaaacaggaaagcccaaaggcgatgccacagtgtcctatgaagacccacccactgccaaggctgccgtggaatggtttgatgggaaagattttcaagggagcaaacttaaagtctcccttgctcggaagaagcctccaatgaacagtatgcggggtggtctgccaccccgtgagggcagaggcatgccaccaccactccgtggaggtccaggaggcccaggaggtcctgggggacccatgggtcgcatgggaggccgtggaggagatagaggaggcttccctccaagaggaccccggggttcccgagggaacccctctggaggaggaaacgtccagcaccgagctggagactggcagtgtcccaatccgtatgtacttgtcttggcaaattgataccctacgagtgaagccacccttccctcaccccatccccactctagagtggattgctctgtctagaggaacagaatgatgaccctgatggctggttagggacactagtcagccattcactggacgcttcagagccttctgaagattgatttgacctgtcctgtgggtgcaatgctgcctgaggctgtgccctaaagcatgggtgtacatagatcctcttgatagtgagtgtgtacctgttcacacaccacctttccttgtttatcttccttagttcaattggtgatttctgctgtgatgtaattgtatgcaggggttgtggaaaccagaacttcgcctggagaacagagtgcaaccagtgtaaggccccaaagcctgaaggcttcctcccgccaccctttccgcccccgggtggtgatcgtggcagaggtggccctggtggcatgcggggaggaagaggtggcctcatggatcgtggtggtcccggtggaatgttcagaggtggccgtggtggagacagaggtggcttccgtggtggccggggcatggaccgaggtggctttggtggaggaagacgaggtggccctggggggccccctggacctttgatggaacagatgggaggaagaagaggaggacgtggaggacctggaaaaatggataaaggcgagcaccgtcaggagcgcagagatcggccctactagatgcagagaccccgcagagctgcattgactaccagatttattttttaaaccagaaaatgttttaaatttataattccatatttataatgttggccacaacattatgattattccttgtctgtactttagtatttttcaccatttgtgaagaaacattaaaacaagttaaatggta

SEQ ID NO: 356899 - DNA, 2334 bp, Homo sapiens
tggcgaattcggcacgagggggagacggacgttgagagaacgaggaggaaggagagaaaatggcgtccacggattacagtacctatagccaagctgcagcgcagcagggctacagtgcttacaccgcccagcccactcaaggatatgcacagaccacccaggcatatgggcaacaaagctatggaacctatggacagcccactgatgtcagctatacccaggctcagaccactgcaacctatgggcagaccgcctatgcaacttcttatggacagcctcccactggttatactactccaactgccccccaggcatacagccagcctgtccaggggtatggcactggtgcttatgataccaccactgctacagtcaccaccacccaggcctcctatgcagctcagtctgcatatggcactcagcctgcttatccagcctatgggcagcagccagcagccactgcacctacaagaccgcaggatggaaacaagcccactgagactagtcaacctcaatctagcacagggggttacaaccagcccagcctaggatatggacagagtaactacagttatccccaggtacctgggagctaccccatgcagccagtcactgcacctccatcctaccctcctaccagctattcctctacacagccgactagttatgatcagagcagttactctcagcagaacacctatgggcaaccgagcagctatggacagcagagtagctatggtcaacaaagcagctatgggcagcagcctcccactagttacccaccccaaactggatcctacagccaagctccaagtcaatatagccaacagagcagcagctacgggcagcagagttcattccgacaggaccaccccagtagcatgggtgtttatgggcaggagtctggaggattttccggaccaggagagaaccggagcatgagtggccctgataaccggggcaggggaagagggggatttgatcgtggaggcatgagcagaggtgggcggggaggaggacgcggtggaatgggcagcgctggagagcgaggtggcttcaataagcctggtggacccatggatgaaggaccagatcttgatctaggcccacctgtagatccagatgaagactctgacaacagtgcaatttatgtacaaggattaaatgacagtgtgactctagatgatctggcagacttctttaagcagtgtggggttgttaagatgaacaagagaactgggcaacccatgatccacatctacctggacaaggaaacaggaaagcccaaaggcgatgccacagtgtcctatgaagacccacccactgccaaggctgccgtggaatggtttgatgggaaagattttcaagggagcaaacttaaagtctcccttgctcggaagaagcctccaatgaacagtatgcggggtggtctgccaccccgtgagggcagaggcatgccaccaccactccgtggaggtccaggaggcccaggaggtcctgggggacccatgggtcgcatgggaggccgtggaggagatagaggaggcttccctccaagaggaccccggggttcccgagggaacccctctggaggaggaaacgtccagcaccgagctggagactggcagtgtcccaatccgggttgtggaaaccagaacttcgcctggagaacagagtgcaaccagtgtggtgatcgtggcagaggtggccctggtggcatgcggggaggaagaggtggcctcatggatcgtggtggtcccggtggaatgttcagaggtggccgtggtggagacagaggtggcttccgtggtggccggggcatggaccgaggtggctttggtggaggaagacgaggtggccctggggggccccctggacctttgatggaacagatgggaggaagaagaggaggacgtggaggacctggaaaaatggataaaggcgagcaccgtcaggagcgcagagatcggccctactagatgcagagaccccgcagagctgcattgactaccagatttattttttaaaccagaaaatgttttaaatttataattccatatttataatgttggccacaacattatgattattccttgtctgtactttagtatttttcaccatttgtgaagaaacattaaaacaagttaaatggtagtgtgcggagtttttttttcttccttcttttaaaaatggttgtttaagactttaacaatgggaaccccttgtgagcatgctcagtatcattgtggagaaccaagagggcctcttaactgtaacaatgttcatggttgtgatgttttttttttttttttaaataaaattccaaatgtttat

SEQ ID NO: 356900 - DNA, 2373 bp, Homo sapiens
tggcgaattcggcacgagggggagacggacgttgagagaacgaggaggaaggagagaaaatggcgtccacggattacagtacctatagccaagctgcagcgcagcagggctacagtgcttacaccgcccagcccactcaaggatatgcacagaccacccaggcatatgggcaacaaagctatggaacctatggacagcccactgatgtcagctatacccaggctcagaccactgcaacctatgggcagaccgcctatgcaacttcttatggacagcctcccactggttatactactccaactgccccccaggcatacagccagcctgtccaggggtatggcactggtgcttatgataccaccactgctacagtcaccaccacccaggcctcctatgcagctcagtctgcatatggcactcagcctgcttatccagcctatgggcagcagccagcagccactgcacctacaagaccgcaggatggaaacaagcccactgagactagtcaacctcaatctagcacagggggttacaaccagcccagcctaggatatggacagagtaactacagttatccccaggtacctgggagctaccccatgcagccagtcactgcacctccatcctaccctcctaccagctattcctctacacagccgactagttatgatcagagcagttactctcagcagaacacctatgggcaaccgagcagctatggacagcagagtagctatggtcaacaaagcagctatgggcagcagcctcccactagttacccaccccaaactggatcctacagccaagctccaagtcaatatagccaacagagcagcagctacgggcagcagagttcattccgacaggaccaccccagtagcatgggtgtttatgggcaggagtctggaggattttccggaccaggagagaaccggagcatgagtggccctgataaccggggcaggggaagagggggatttgatcgtggaggcatgagcagaggtgggcggggaggaggacgcggtggaatgggcagcgctggagagcgaggtggcttcaataagcctggtggacccatggatgaaggaccagatcttgatctaggcccacctgtagatccagatgaagactctgacaacagtgcaatttatgtacaaggattaaatgacagtgtgactctagatgatctggcagacttctttaagcagtgtggggttgttaagatgaacaagagaactgggcaacccatgatccacatctacctggacaaggaaacaggaaagcccaaaggcgatgccacagtgtcctatgaagacccacccactgccaaggctgccgtggaatggtttgatgggaaagattttcaagggagcaaacttaaagtctcccttgctcggaagaagcctccaatgaacagtatgcggggtggtctgccaccccgtgagggcagaggcatgccaccaccactccgtggaggtccaggaggcccaggaggtcctgggggacccatgggtcgcatgggaggccgtggaggagatagaggaggcttccctccaagaggaccccggggttcccgagggaacccctctggaggaggaaacgtccagcaccgagctggagactggcagtgtcccaatccttcaattggtgatttctgctgtgatgtaattgtatgcaggggttgtggaaaccagaacttcgcctggagaacagagtgcaaccagtgtggtgatcgtggcagaggtggccctggtggcatgcggggaggaagaggtggcctcatggatcgtggtggtcccggtggaatgttcagaggtggccgtggtggagacagaggtggcttccgtggtggccggggcatggaccgaggtggctttggtggaggaagacgaggtggccctggggggccccctggacctttgatggaacagatgggaggaagaagaggaggacgtggaggacctggaaaaatggataaaggcgagcaccgtcaggagcgcagagatcggccctactagatgcagagaccccgcagagctgcattgactaccagatttattttttaaaccagaaaatgttttaaatttataattccatatttataatgttggccacaacattatgattattccttgtctgtactttagtatttttcaccatttgtgaagaaacattaaaacaagttaaatggtagtgtgcggagtttttttttcttccttcttttaaaaatggttgtttaagactttaacaatgggaaccccttgtgagcatgctcagtatcattgtggagaaccaagagggcctcttaactgtaacaatgttcatggttgtgatgttttttttttttttttaaataaaattccaaatgtttat

SEQ ID NO: 356901 - DNA, 2471 bp, Homo sapiens
tggcgaattcggcacgagggggagacggacgttgagagaacgaggaggaaggagagaaaatggcgtccacggattacagtacctatagccaagctgcagcgcagcagggctacagtgcttacaccgcccagcccactcaaggatatgcacagaccacccaggcatatgggcaacaaagctatggaacctatggacagcccactgatgtcagctatacccaggctcagaccactgcaacctatgggcagaccgcctatgcaacttcttatggacagcctcccactggttatactactccaactgccccccaggcatacagccagcctgtccaggggtatggcactggtgcttatgataccaccactgctacagtcaccaccacccaggcctcctatgcagctcagtctgcatatggcactcagcctgcttatccagcctatgggcagcagccagcagccactgcacctacaagaccgcaggatggaaacaagcccactgagactagtcaacctcaatctagcacagggggttacaaccagcccagcctaggatatggacagagtaactacagttatccccaggtacctgggagctaccccatgcagccagtcactgcacctccatcctaccctcctaccagctattcctctacacagccgactagttatgatcagagcagttactctcagcagaacacctatgggcaaccgagcagctatggacagcagagtagctatggtcaacaaagcagctatgggcagcagcctcccactagttacccaccccaaactggatcctacagccaagctccaagtcaatatagccaacagagcagcagctacgggcagcagagttcattccgacaggaccaccccagtagcatgggtgtttatgggcaggagtctggaggattttccggaccaggagagaaccggagcatgagtggccctgataaccggggcaggggaagagggggatttgatcgtggaggcatgagcagaggtgggcggggaggaggacgcggtggaatgggcagcgctggagagcgaggtggcttcaataagcctggtggacccatggatgaaggaccagatcttgatctaggcccacctgtagatccagatgaagactctgacaacagtgcaatttatgtacaaggattaaatgacagtgtgactctagatgatctggcagacttctttaagcagtgtggggttgttaagatgaacaagagaactgggcaacccatgatccacatctacctggacaaggaaacaggaaagcccaaaggcgatgccacagtgtcctatgaagacccacccactgccaaggctgccgtggaatggtttgatgggaaagattttcaagggagcaaacttaaagtctcccttgctcggaagaagcctccaatgaacagtatgcggggtggtctgccaccccgtgagggcagaggcatgccaccaccactccgtggaggtccaggaggcccaggaggtcctgggggacccatgggtcgcatgggaggccgtggaggagatagaggaggcttccctccaagaggaccccggggttcccgagggaacccctctggaggaggaaacgtccagcaccgagctggagactggcagtgtcccaatccgtatgtacttgtcttggcaaattgataccctacgagtgaagccacccttccctcaccccatccccactctagagtggattgctctgtctagaggaacagaatgatgaccctgatggctggttagggacactagtcagccattcactggacgcttcagagccttctgaagattgatttgacctgtcctgtgggtgcaatgctgcctgaggctgtgccctaaagcatgggtgtacatagatcctcttgatagtgagtgtgtacctgttcacacaccacctttccttgtttatcttccttagttcaattggtgatttctgctgtgatgtaattgtatgcaggggttgtggaaaccagaacttcgcctggggtgatcgtggcagaggtggccctggtggcatgcggggaggaagaggtggcctcatggatcgtggtggtcccggtggaatgttcagaggtggccgtggtggagacagaggtggcttccgtggtggccggggcatggaccgaggtggctttggtggaggaagacgaggtggccctggggggccccctggacctttgatggaacagatgggaggaagaagaggaggacgtggaggacctggaaaaatggataaaggcgagcaccgtcaggagcgcagagatcggccctactagatgcagagaccccgcagagctgcattgactaccagatttattttttaaaccagaaaatgttttaaatttataattccatatttataatgttggccacaacattatgattattccttgtctgtactttagtatttttcaccatttgtgaagaaacattaaaacaagttaaatggta

SEQ ID NO: 356902 - DNA, 2833 bp, Homo sapiens
tggcgaattcggcacgagggggagacggacgttgagagaacgaggaggaaggagagaaaatggcgtccacggattacagtacctatagccaagctgcagcgcagcagggctacagtgcttacaccgcccagcccactcaaggatatgcacagaccacccaggcatatgggcaacaaagctatggaacctatggacagcccactgatgtcagctatacccaggctcagaccactgcaacctatgggcagaccgcctatgcaacttcttatggacagcctcccactggttatactactccaactgccccccaggcatacagccagcctgtccaggggtatggcactggtgcttatgataccaccactgctacagtcaccaccacccaggcctcctatgcagctcagtctgcatatggcactcagcctgcttatccagcctatgggcagcagccagcagccactgcacctacaagaccgcaggatggaaacaagcccactgagactagtcaacctcaatctagcacagggggttacaaccagcccagcctaggatatggacagagtaactacagttatccccaggtacctgggagctaccccatgcagccagtcactgcacctccatcctaccctcctaccagctattcctctacacagccgactagttatgatcagagcagttactctcagcagaacacctatgggcaaccgagcagctatggacagcagagtagctatggtcaacaaagcagctatgggcagcagcctcccactagttacccaccccaaactggatcctacagccaagctccaagtcaatatagccaacagagcagcagctacgggcagcagagttcattccgacaggaccaccccagtagcatgggtgtttatgggcaggagtctggaggattttccggaccaggagagaaccggagcatgagtggccctgataaccggggcaggggaagagggggatttgatcgtggaggcatgagcagaggtgggcggggaggaggacgcggtggaatgggcagcgctggagagcgaggtggcttcaataagcctggtggacccatggatgaaggaccagatcttgatctaggcccacctgtagatccagatgaagactctgacaacagtgcaatttatgtacaaggattaaatgacagtgtgactctagatgatctggcagacttctttaagcagtgtggggttgttaagatgaacaagagaactgggcaacccatgatccacatctacctggacaaggaaacaggaaagcccaaaggcgatgccacagtgtcctatgaagacccacccactgccaaggctgccgtggaatggtttgatgggaaagattttcaagggagcaaacttaaagtctcccttgctcggaagaagcctccaatgaacagtatgcggggtggtctgccaccccgtgagggcagaggcatgccaccaccactccgtggaggtccaggaggcccaggaggtcctgggggacccatgggtcgcatgggaggccgtggaggagatagaggaggcttccctccaagaggaccccggggttcccgagggaacccctctggaggaggaaacgtccagcaccgagctggagactggcagtgtcccaatccgggttgtggaaaccagaacttcgcctggagaacagagtgcaaccagtgtaaggccccaaagcctgaaggcttcctcccgccaccctttccgcccccgggtaggtgcaggtttcatgagtgtcccctcagcttcctggtgctaaacctcttttcttatttgtgggcttggtaaactgcagttgccctctgcttaacaactttgagttgtcgtgtcctcatttctaaattgtcagcccgatgccgagattgagtgaagtgtctggtttgttctgctgtgagagaaggaagcagagcagcttccacagtgtccacagggcctctgcagccacccactgactgctttcgccctgctattctcaccttaggcctcctatgcagctcagtctgcatatggcactcagcctgcttatccagcctatgggcagcagccagcagccactgcacctacaagaccgcaggatggaaacaagcccactgagactagtcaacctcaatctagcacagggggttacaaccagcccagcctaggatatggacagagtaactacagttatccccaggtacctgggagctaccccatgcagccagtcactgcacctccatcctaccctcctaccagctattcctctacacagccgactagttatgatcagagcagttactctcagcagaacactatgggcaaccgaggtggctttggtggaggaagacgaggtggccctggggggccccctggacctttgatggaacagatgggaggaagaagaggaggacgtggaggacctggaaaaatggataaaggcgagcaccgtcaggagcgcagagatcggccctactagatgcagagaccccgcagagctgcattgactaccagatttattttttaaaccagaaaatgttttaaatttataattccatatttataatgttggccacaacattatgattattccttgtctgtactttagtatttttcaccatttgtgaagaaacattaaaacaagttaaatggtagtgtgcggagtttttttttcttccttcttttaaaaatggttgtttaagactttaacaatgggaaccccttgtgagcatgctcagtatcattgtggagaaccaagagggcctcttaactgtaacaatgttcatggttgtgatgttttttttttttttttaaataaaattccaaatgtttat

SEQ ID NO: 356903 - DNA, 2156 bp, Homo sapiens
tggcgaattcggcacgagggggagacggacgttgagagaacgaggaggaaggagagaaaatggcgtccacggattacagtacctatagccaagctgcagcgcagcagggctacagtgcttacaccgcccagcccactcaaggatatgcacagaccacccaggcatatgggcaacaaagctatggaacctatggacagcccactgatgtcagctatacccaggctcagaccactgcaacctatgggcagaccgcctatgcaacttcttatggacagcctcccactggttatactactccaactgccccccaggcatacagccagcctgtccaggggtatggcactggtgcttatgataccaccactgctacagtcaccaccacccaggcctcctatgcagctcagtctgcatatggcactcagcctgcttatccagcctatgggcagcagccagcagccactgcacctacaagaccgcaggatggaaacaagcccactgagactagtcaacctcaatctagcacagggggttacaaccagcccagcctaggatatggacagagtaactacagttatccccaggtacctgggagctaccccatgcagccagtcactgcacctccatcctaccctcctaccagctattcctctacacagccgactagttatgatcagagcagttactctcagcagaacacctatgggcaaccgagcagctatggacagcagagtagctatggtcaacaaagcagctatgggcagcagcctcccactagttacccaccccaaactggatcctacagccaagctccaagtcaatatagccaacagagcagcagctacgggcagcagagttcattccgacaggaccaccccagtagcatgggtgtttatgggcaggagtctggaggattttccggaccaggagagaaccggagcatgagtggccctgataaccggggcaggggaagagggggatttgatcgtggaggcatgagcagaggtgggcggggaggaggacgcggtggaatgggcagcgctggagagcgaggtggcttcaataagcctggtggacccatggatgaaggaccagatcttgatctaggcccacctgtagatccagatgaagactctgacaacagtgcaatttatgtacaaggattaaatgacagtgtgactctagatgatctggcagacttctttaagcagtgtggggttgttaagatgaacaagagaactgggcaacccatgatccacatctacctggacaaggaaacaggaaagcccaaaggcgatgccacagtgtcctatgaagacccacccactgccaaggctgccgtggaatggtttgatgggaaagattttcaagggagcaaacttaaagtctcccttgctcggaagaagcctccaatgaacagtatgcggggtggtctgccaccccgtgagggcagaggcatgccaccaccactccgtggaggtccaggaggcccaggaggtcctgggggacccatgggtcgcatgggaggccgtggaggagatagaggaggcttccctccaagaggaccccggggttcccgagggaacccctctggaggaggaaacgtccagcaccgagctggagactggcagtgtcccaatccgggttgtggaaaccagaacttcgcctggagaacagagtgcaaccagtgtggccccctggacctttgatggaacagatgggaggaagaagaggaggacgtggaggacctggaaaaatggataaaggcgagcaccgtcaggagcgcagagatcggccctactagatgcagagaccccgcagagctgcattgactaccagatttattttttaaaccagaaaatgttttaaatttataattccatatttataatgttggccacaacattatgattattccttgtctgtactttagtatttttcaccatttgtgaagaaacattaaaacaagttaaatggtagtgtgcggagtttttttttcttccttcttttaaaaatggttgtttaagactttaacaatgggaaccccttgtgagcatgctcagtatcattgtggagaaccaagagggcctcttaactgtaacaatgttcatggttgtgatgttttttttttttttttaaataaaattccaaatgtttat

SEQ ID NO: 356904 - DNA, 3293 bp, Homo sapiens
tggcgaattcggcacgagggggagacggacgttgagagaacgaggaggaaggagagaaaatggcgtccacggattacagtacctatagccaagctgcagcgcagcagggctacagtgcttacaccgcccagcccactcaaggatatgcacagaccacccaggcatatgggcaacaaagctatggaacctatggacagcccactgatgtcagctatacccaggctcagaccactgcaacctatgggcagaccgcctatgcaacttcttatggacagcctcccactggttatactactccaactgccccccaggcatacagccagcctgtccaggggtatggcactggtgcttatgataccaccactgctacagtcaccaccacccaggcctcctatgcagctcagtctgcatatggcactcagcctgcttatccagcctatgggcagcagccagcagccactgcacctacaagaccgcaggatggaaacaagcccactgagactagtcaacctcaatctagcacagggggttacaaccagcccagcctaggatatggacagagtaactacagttatccccaggtacctgggagctaccccatgcagccagtcactgcacctccatcctaccctcctaccagctattcctctacacagccgactagttatgatcagagcagttactctcagcagaacacctatgggcaaccgagcagctatggacagcagagtagctatggtcaacaaagcagctatgggcagcagcctcccactagttacccaccccaaactggatcctacagccaagctccaagtcaatatagccaacagagcagcagctacgggcagcagagttcattccgacaggaccaccccagtagcatgggtgtttatgggcaggagtctggaggattttccggaccaggagagaaccggagcatgagtggccctgataaccggggcaggggaagagggggatttgatcgtggaggcatgagcagaggtgggcggggaggaggacgcggtggaatgggtgtggcatccagtgcccctcccctgactggcaagcgaggccggggccgcccaaggaaggccaacctgctggactcaatgtttgggtccccagggggcctgagggaggcaggcatccttccatgcggtctatgtggtaaggtgttcactgatgccaaccggctccggcagcacgaggcccagcacggtgtcaccagcctccagctgggctacatcgaccttcctcctccgaggctgggtgagaatgggctacccatctctgaagaccccgacggcccccgaaagaggagccggaccaggaagcaggtggcttgtgagatctgcggcaagatcttccgtgatgtgtatcatcttaaccggcacaagctgtcccactctggggagaagccctactcctgccctgtgtgtgggttgcggttcaagagaaaagaccgcatgtcctaccatgtgcggtcccatgatgggtccgtgggcaagccttacatctgccagagctgtgggaaaggcttctccaggcctgatcacttgaacggacatatcaagcaggtgcacacttctgagcggcctcacaagtgtcagacctgcaatgcttcttttgccacccgagaccgtctgcgctcccacctggcctgtcatgaagacaaggtgccctgccaggtgtgtgggaagtacttgcgggcagcatacatggcagaccacctgaagaagcacagcgaggggcccagcaacttctgcagtatctgtaaccgagaaggccagaaatgctcacatcaggatccgattgagagctctgactcctatggtgacctctcagatgccagcgacctgaagacgccagagaagcagagtgccaatggctctttctcctgcgacatggcagtccccaaaaacaaaatggagtctgatggggagaagaagtacccatgccctgaatgtgggagcttcttccgctctaagtcctacttgaacaaacacatccagaaggtgcatgtccgggctctcgggggccccctgggggacctgggccctgcccttggctcacctttctctcctcagcagaacatgtctctcctcgagtcctttgggtttcagattgttcagtcggcatttgcgtcatctttagtagatcctgaggttgaccagcagcccatggggcctgaagggaaatgaggcagctgctgtgtccccacggaaacaaccatctggggactgctgggaaatgctgtgaatgcggagggaagtgatgtttgggttctgtagctgagagatttttattcatttttaactgccccccaaccccactccaactccttctccaccacccattctcccaatggtctttagaaatagattttcatctgatattctgcagaaatatcaatgagacttggtatgggacaggggcagaaaacactacataggcctccaaggcaaaaccagtcccagtttctttaatgggaagaagctggaattcctggtgctcaattcttagtgaccccaatcctatacccaaatctatgatattctgggacctcagtgattttggtcccctcccacttctctagttcgtcatcctcccttcccatatccttcaaaagaaccacactagggtctccacctacttatacaatgcggatgcccaactgtttttaaggaagccagaagcatcccatggaccatggggtgagtgtcctccaagagccccctgagctcagccctctgcctggagggctccagacctttctgagccctgcttggaggcgagcattttcactgctaggacaagctcagctgttgaggacacccccaccccaaatttcagttcttacgtgattttaaccattcaacatgctgttgggttttaattctctaattattattattattgttattattttttaggaccagttgtagtgaattgctactgaaagctatcccaggtgatacagagctctttgtaaaccgcagtcacacattagggttagtattaaactttgtttagatgtaccataattaacttggctagttgattgtttgaagtctatggaagaaatagttttatgcaaaattttaaaaaatgccagtctggtcagggaagtagggggtttcaatgctgttgggaaccaggaaggtgggacagccggcaggtagggacattgtgtacctcagttgtgtcacatgtgagcaagcccaggttgaccttgtgatgtgaattgatctgatcagactgtattaaaaatgttagtacattactctatctgc

SEQ ID NO: 356905 - DNA, 2628 bp, Homo sapiens
tggcgaattcggcacgagggggagacggacgttgagagaacgaggaggaaggagagaaaatggcgtccacggattacagtacctatagccaagctgcagcgcagcagggctacagtgcttacaccgcccagcccactcaaggatatgcacagaccacccaggcatatgggcaacaaagctatggaacctatggacagcccactgatgtcagctatacccaggctcagaccactgcaacctatgggcagaccgcctatgcaacttcttatggacagcctcccactggttatactactccaactgccccccaggcatacagccagcctgtccaggggtatggcactggtgcttatgataccaccactgctacagtcaccaccacccaggcctcctatgcagctcagtctgcatatggcactcagcctgcttatccagcctatgggcagcagccagcagccactgcacctacaagaccgcaggatggaaacaagcccactgagactagtcaacctcaatctagcacagggggttacaaccagcccagcctaggatatggacagagtaactacagttatccccaggtacctgggagctaccccatgcagccagtcactgcacctccatcctaccctcctaccagctattcctctacacagccgactagttatgatcagagcagttactctcagcagaacacctatgggcaaccgagcagctatggacagcagagtagctatggtcaacaaagcagctatgggcagcagcctcccactagttacccaccccaaactggatcctacagccaagctccaagtcaatatagccaacagagcagcagctacgggcagcagagttcattccgacaggaccaccccagtagcatgggtgtttatgggcaggagtctggaggattttccggaccaggagagaaccggagcatgagtggccctgataaccggggcaggggaagagggggatttgatcgtggaggcatgagcagaggtgggcggggaggaggacgcggtggaatgggtgtggcatccagtgcccctcccctgactggcaagcgaggccggggccgcccaaggaaggccaacctgctggactcaatgtttgggtccccagggggcctgagggaggcaggcatccttccatgcggtctatgtggtaaggtgttcactgatgccaaccggctccggcagcacgaggcccagcacggtgtcaccagcctccagctgggctacatcgaccttcctcctccgaggctgggtgagaatgggctacccatctctgaagaccccgacggcccccgaaagaggagccggaccaggaagcaggtggcttgtgagatctgcggcaagatcttccgtgatgtgtatcatcttaaccggcacaagctgtcccactctggggagaagccctactcctgccctgtgtgtgggttgcggttcaagagaaaagaccgcatgtcctaccatgtgcggtcccatgatgggtccgtgggcaagccttacatctgccagagctgtgggaaaggcttctccaggcctgatcacttgaacggacatatcaagcaggtgcacacttctgagcggcctcacaagtgtcaggtgtgggttgggagcagcagcggcctgccgcccctggaacctcttcctagcgacctgccatcatgggactttgcccagcctgctttgtggaggtcgtcccattcggttcctgacaccgccttttccctttctctaaaaaaatcattcccagcccttgaaaacctgggcccagcacactccagcaacactctcttctgcccagccccgccgggatatctgaggcagggctggaccaccccagagggcagcagggcctttacccagtggcctgttggctagcctgggcctccctggagagggttgacagtggaagggaacaggaggggcatttggcctgagacccctgcttttgggagaggctagcagggtggttcctgcccagcatgcccagctcctccctgggtgactcggagtctttcccatgtcagagcccccaaatgggggtagcaaggagcacctttctggaaccccctatagcatccaagtttctttctgggctctcttgccttttcccccctttcacagatggcacccctgggcatctgtccttgcctaggtgattttggaggttggtgccttcctgggaactagccaccagcttatctgcttcccttcccctggcatcacttcccataggcctggggtttctagactggggcctggccacccctttccccactccacgagtgagtcggcctccagagaagactggcacaattccaactagagtcaacccatgctgccctctgcccttcccactcagatctagatcctgctttcatttctggctagtgaagtagacttttgtgtttttgaggtttattagcaggtctgctcaggaaccaaactaatgagtagctttatattgggccaccccaatatatggctttgggggctgaaaaagcagatgtagaccccctccctcggatccttattggtgtgccctttagcactccgcagactctgcggggtgaacaggagtgatgataaaatttttcattctaacatattgaggctt

SEQ ID NO: 356906 - DNA, 2352 bp, Homo sapiens
tggcgaattcggcacgagggggagacggacgttgagagaacgaggaggaaggagagaaaatggcgtccacggattacagtacctatagccaagctgcagcgcagcagggctacagtgcttacaccgcccagcccactcaaggatatgcacagaccacccaggcatatgggcaacaaagctatggaacctatggacagcccactgatgtcagctatacccaggctcagaccactgcaacctatgggcagaccgcctatgcaacttcttatggacagcctcccactggttatactactccaactgccccccaggcatacagccagcctgtccaggggtatggcactggtgcttatgataccaccactgctacagtcaccaccacccaggcctcctatgcagctcagtctgcatatggcactcagcctgcttatccagcctatgggcagcagccagcagccactgcacctacaagaccgcaggatggaaacaagcccactgagactagtcaacctcaatctagcacagggggttacaaccagcccagcctaggatatggacagagtaactacagttatccccaggtacctgggagctaccccatgcagccagtcactgcacctccatcctaccctcctaccagctattcctctacacagccgactagttatgatcagagcagttactctcagcagaacacctatgggcaaccgagcagctatggacagcagagtagctatggtcaacaaagcagctatgggcagcagcctcccactagttacccaccccaaactggatcctacagccaagctccaagtcaatatagccaacagagcagcagctacgggcagcagagttcattccgacaggaccaccccagtagcatgggtgtttatgggcaggagtctggaggattttccggaccaggagagaaccggagcatgagtggccctgataaccggggcaggggaagagggggatttgatcgtggaggcatgagcagaggtgggcggggaggaggacgcggtggaatggggttacaaagtgagagccttgtatacacttcaatacttaaaaagtacccgtactcagtactcagccggcagcataatgaaaagtgggactagacacggtgtccatatggagaggaaaaatatacatagaatatttttaacaaaatgtattcattgtataaatggaatccttctgtaactttggtaactgcatacttgttgtttggtaatgaaccagaggaggtataatactctagaattgtgtaacattaaagtgtaaacttttgtgtttaaagagagagaacattttatggtgtgtacttttaaaaaggaaacaaagctgcatgcaacagcttgaaattgtatattcaggtattaaaggtgcaatactggttagaaaaaactcagggcctcccactggggagctgcctttatttaattttaaagaaaacaaaatctaacccaaaaagtccaattcatatttccctctcccctctttaagtaattttacatggccatagtcattattctaactgatatgtctataaagttgcacccccagtccgttgagccttggtatttgttgtaaattctcctttcacagcgattgttaaatctattcgtgccctgagatgtatggctttatgctgaagattggctggatgcgtcctctgatgtgtgttgtaggaatttaatgtggttgtctcctgcttttattatactgtgacttgttaggaaaccctgggcctcatggatcgtggtggtcccggtggaatgttcagaggtggccgtggtggagacagaggtggcttccgtggtggccggggcatggaccgaggtggctttggtggaggaagacgaggtggccctggggggccccctggacctttgatggaacagatgggaggaagaagaggaggacgtggaggacctggaaaaatggataaaggcgagcaccgtcaggagcgcagagatcggccctactagatgcagagaccccgcagagctgcattgactaccagatttattttttaaaccagaaaatgttttaaatttataattccatatttataatgttggccacaacattatgattattccttgtctgtactttagtatttttcaccatttgtgaagaaacattaaaacaagttaaatggtagtgtgcggagtttttttttcttccttcttttaaaaatggttgtttaagactttaacaatgggaaccccttgtgagcatgctcagtatcattgtggagaaccaagagggcctcttaactgtaacaatgttcatggttgtgatgttttttttttttttttaaataaaattccaaatgtttat

SEQ ID NO: 356907 - DNA, 3431 bp, Homo sapiens
tggcgaattcggcacgagggggagacggacgttgagagaacgaggaggaaggagagaaaatggcgtccacggattacagtacctatagccaagctgcagcgcagcagggctacagtgcttacaccgcccagcccactcaaggatatgcacagaccacccaggcatatgggcaacaaagctatggaacctatggacagcccactgatgtcagctatacccaggctcagaccactgcaacctatgggcagaccgcctatgcaacttcttatggacagcctcccactggttatactactccaactgccccccaggcatacagccagcctgtccaggggtatggcactggtgcttatgataccaccactgctacagtcaccaccacccaggcctcctatgcagctcagtctgcatatggcactcagcctgcttatccagcctatgggcagcagccagcagccactgcacctacaagaccgcaggatggaaacaagcccactgagactagtcaacctcaatctagcacagggggttacaaccagcccagcctaggatatggacagagtaactacagttatccccaggtacctgggagctaccccatgcagccagtcactgcacctccatcctaccctcctaccagctattcctctacacagccgactagttatgatcagagcagttactctcagcagaacacctatgggcaaccgagcagctatggacagcagagtagctatggtcaacaaagcagctatgggcagcagcctcccactagttacccaccccaaactggatcctacagccaagctccaagtcaatatagccaacagagcagcagctacgggcagcagagttcattccgacaggaccaccccagtagcatgggtgtttatgggcaggagtctggaggattttccggaccaggagagaaccggagcatgagtggccctgataaccggggcaggggaagagggggatttgatcgtggaggcatgagcagaggtgggcggggaggaggacgcggtggaatgggtgtggcatccagtgcccctcccctgactggcaagcgaggccggggccgcccaaggaaggccaacctgctggactcaatgtttgggtccccagggggcctgagggaggcaggcatccttccatgcggtctatgtggtaaggtgttcactgatgccaaccggctccggcagcacgaggcccagcacggtgtcaccagcctccagctgggctacatcgaccttcctcctccgaggctgggtgagaatgggctacccatctctgaagaccccgacggcccccgaaagaggagccggaccaggaagcaggtggcttgtgagatctgcggcaagatcttccgtgatgtgtatcatcttaaccggcacaagctgtcccactctggggagaagccctactcctgccctgtgtgtgggttgcggttcaagagaaaagaccgcatgtcctaccatgtgcggtcccatgatgggtccgtgggcaagccttacatctgccagagctgtgggaaaggcttctccaggcctgatcacttgaacggacatatcaagcaggtgcacacttctgagcggcctcacaagtgtcagacctgcaatgcttcttttgccacccgagaccgtctgcgctcccacctggcctgtcatgaagacaaggtgccctgccaggtgtgtgggaagtacttgcgggcagcatacatggcagaccacctgaagaagcacagcgaggggcccagcaacttctgcagtatctgtaaccgaggtttctcctctgcctcctacttaaaggtccatgttaaaacccaccacggtgttccccttccccaggtctccaggcaccaggagcccatcctgaatgggggagcagcgttccactgcgccaggacctatggcaacaaagaaggccagaaatgctcacatcaggatccgattgagagctctgactcctatggtgacctctcagatgccagcgacctgaagacgccagagaagcagagtgccaatggctctttctcctgcgacatggcagtccccaaaaacaaaatggagtctgatggggagaagaagtacccatgccctgaatgtgggagcttcttccgctctaagtcctacttgaacaaacacatccagaaggtgcatgtccgggctctcgggggccccctgggggacctgggccctgcccttggctcacctttctctcctcagcagaacatgtctctcctcgagtcctttgggtttcagattgttcagtcggcatttgcgtcatctttagtagatcctgaggttgaccagcagcccatggggcctgaagggaaatgaggcagctgctgtgtccccacggaaacaaccatctggggactgctgggaaatgctgtgaatgcggagggaagtgatgtttgggttctgtagctgagagatttttattcatttttaactgccccccaaccccactccaactccttctccaccacccattctcccaatggtctttagaaatagattttcatctgatattctgcagaaatatcaatgagacttggtatgggacaggggcagaaaacactacataggcctccaaggcaaaaccagtcccagtttctttaatgggaagaagctggaattcctggtgctcaattcttagtgaccccaatcctatacccaaatctatgatattctgggacctcagtgattttggtcccctcccacttctctagttcgtcatcctcccttcccatatccttcaaaagaaccacactagggtctccacctacttatacaatgcggatgcccaactgtttttaaggaagccagaagcatcccatggaccatggggtgagtgtcctccaagagccccctgagctcagccctctgcctggagggctccagacctttctgagccctgcttggaggcgagcattttcactgctaggacaagctcagctgttgaggacacccccaccccaaatttcagttcttacgtgattttaaccattcaacatgctgttgggttttaattctctaattattattattattgttattattttttaggaccagttgtagtgaattgctactgaaagctatcccaggtgatacagagctctttgtaaaccgcagtcacacattagggttagtattaaactttgtttagatgtaccataattaacttggctagttgattgtttgaagtctatggaagaaatagttttatgcaaaattttaaaaaatgccagtctggtcagggaagtagggggtttcaatgctgttgggaaccaggaaggtgggacagccggcaggtagggacattgtgtacctcagttgtgtcacatgtgagcaagcccaggttgaccttgtgatgtgaattgatctgatcagactgtattaaaaatgttagtacattactctatctgc

SEQ ID NO: 356908 - DNA, 2172 bp, Homo sapiens
tggcgaattcggcacgagggggagacggacgttgagagaacgaggaggaaggagagaaaatggcgtccacggattacagtacctatagccaagctgcagcgcagcagggctacagtgcttacaccgcccagcccactcaaggatatgcacagaccacccaggcatatgggcaacaaagctatggaacctatggacagcccactgatgtcagctatacccaggctcagaccactgcaacctatgggcagaccgcctatgcaacttcttatggacagcctcccactggttatactactccaactgccccccaggcatacagccagcctgtccaggggtatggcactggtgcttatgataccaccactgctacagtcaccaccacccaggcctcctatgcagctcagtctgcatatggcactcagcctgcttatccagcctatgggcagcagccagcagccactgcacctacaagaccgcaggatggaaacaagcccactgagactagtcaacctcaatctagcacagggggttacaaccagcccagcctaggatatggacagagtaactacagttatccccaggtacctgggagctaccccatgcagccagtcactgcacctccatcctaccctcctaccagctattcctctacacagccgactagttatgatcagagcagttactctcagcagaacacctatgggcaaccgagcagctatggacagcagagtagctatggtcaacaaagcagctatgggcagcagcctcccactagttacccaccccaaactggatcctacagccaagctccaagtcaatatagccaacagagcagcagctacgggcagcagagttcattccgacaggaccaccccagtagcatgggtgtttatgggcaggagtctggaggattttccggaccaggagagaaccggagcatgagtggccctgataaccggggcaggggaagagggggatttgatcgtggaggcatgagcagaggtgggcggggaggaggacgcggtggaatggggttacaaagtgagagccttgtatacacttcaatacttaaaaagtacccgtactcagtactcagccggcagcataatgaaaagtgggactagacacggtgtccatatggagaggaaaaatatacatagaatatttttaacaaaatgtattcattgtataaatggaatccttctgtaactttggtaactgcatacttgttgtttggtaatgaaccagaggaggtataatactctagaattgtgtaacattaaagtgtaaacttttgtgtttaaagagagagaacattttatggtgtgtacttttaaaaaggaaacaaagctgcatgcaacagcttgaaattgtatattcaggtattaaaggtgcaatactggttagaaaaaactcagggcctcccactggggagctgcctttatttaattttaaagaaaacaaaatctaacccaaaaagtccaattcatatttccctctcccctctttaagtaattttacatggccatagtcattattctaactgatatgtctataaagttgcacccccagtccgttgagccttggtatttgttgtaaattctcctttcacagcgattgttaaatctattcgtgccctgagatgtatggctttatgctgaagattggctggatgcgtcctctgatgtgtgttgtaggaatttaatgtggttgtctcctgcttttattatactgtgacttgttaggaaaccctgggcctcatggatcgtggtggtcccggtggaatgttcagaggtggccgtggtggagacagaggtggcttccgtggtggccggggcatggaccgaggtggctttggtggaggaagacgaggtggccctggggggccccctggacctttgatggaacagatgggaggaagaagaggaggacgtggaggacctggaaaaatggataaaggcgagcaccgtcaggagcgcagagatcggccctactagatgcagagaccccgcagagctgcattgactaccagatttattttttaaaccagaaaatgttttaaatttataattccatatttataatgttggccacaacattatgattattccttgtctgtactttagtatttttcaccatttgtgaagaaacattaaaacaagttaaatggta

SEQ ID NO: 356909 - DNA, 1987 bp, Homo sapiens
tggcgaattcggcacgagggggagacggacgttgagagaacgaggaggaaggagagaaaatggcgtccacggattacagtacctatagccaagctgcagcgcagcagggctacagtgcttacaccgcccagcccactcaaggatatgcacagaccacccaggcatatgggcaacaaagctatggaacctatggacagcccactgatgtcagctatacccaggctcagaccactgcaacctatgggcagaccgcctatgcaacttcttatggacagcctcccactggttatactactccaactgccccccaggcatacagccagcctgtccaggggtatggcactggtgcttatgataccaccactgctacagtcaccaccacccaggcctcctatgcagctcagtctgcatatggcactcagcctgcttatccagcctatgggcagcagccagcagccactgcacctacaagaccgcaggatggaaacaagcccactgagactagtcaacctcaatctagcacagggggttacaaccagcccagcctaggatatggacagagtaactacagttatccccaggtacctgggagctaccccatgcagccagtcactgcacctccatcctaccctcctaccagctattcctctacacagccgactagttatgatcagagcagttactctcagcagaacacctatgggcaaccgagcagctatggacagcagagtagctatggtcaacaaagcagctatgggcagcagcctcccactagttacccaccccaaactggatcctacagccaagctccaagtcaatatagccaacagagcagcagctacgggcagcagaggacccatggatgaaggaccagatcttgatctaggcccacctgtagatccagatgaagactctgacaacagtgcaatttatgtacaaggattaaatgacagtgtgactctagatgatctggcagacttctttaagcagtgtggggttgttaagatgaacaagagaactgggcaacccatgatccacatctacctggacaaggaaacaggaaagcccaaaggcgatgccacagtgtcctatgaagacccacccactgccaaggctgccgtggaatggtttgatgggaaagattttcaagggagcaaacttaaagtctcccttgctcggaagaagcctccaatgaacagtatgcggggtggtctgccaccccgtgagggcagaggcatgccaccaccactccgtggaggtccaggaggcccaggaggtcctgggggacccatgggtcgcatgggaggccgtggaggagatagaggaggcttccctccaagaggaccccggggttcccgagggaacccctctggaggaggaaacgtccagcaccgagctggagactggcagtgtcccaatccgggttgtggaaaccagaacttcgcctggagaacagagtgcaaccagtgtaaggccccaaagcctgaaggcttcctcccgccaccctttccgcccccgggtggtgatcgtggcagaggtggccctggtggcatgcggggaggaagaggtggcctcatggatcgtggtggtcccggtggaatgttcagaggtggccgtggtggagacagaggtggcttccgtggtggccggggcatggaccgaggtggctttggtggaggaagacgaggtggccctggggggccccctggacctttgatggaacagatgggaggaagaagaggaggacgtggaggacctggaaaaatggataaaggcgagcaccgtcaggagcgcagagatcggccctactagatgcagagaccccgcagagctgcattgactaccagatttattttttaaaccagaaaatgttttaaatttataattccatatttataatgttggccacaacattatgattattccttgtctgtactttagtatttttcaccatttgtgaagaaacattaaaacaagttaaatggta

SEQ ID NO: 356910 - DNA, 2436 bp, Homo sapiens
tggcgaattcggcacgagggggagacggacgttgagagaacgaggaggaaggagagaaaatggcgtccacggattacagtacctatagccaagctgcagcgcagcagggctacagtgcttacaccgcccagcccactcaaggatatgcacagaccacccaggcatatgggcaacaaagctatggaacctatggacagcccactgatgtcagctatacccaggctcagaccactgcaacctatgggcagaccgcctatgcaacttcttatggacagcctcccactggttatactactccaactgccccccaggcatacagccagcctgtccaggggtatggcactggtgcttatgataccaccactgctacagtcaccaccacccaggcctcctatgcagctcagtctgcatatggcactcagcctgcttatccagcctatgggcagcagccagcagccactgcacctacaagaccgcaggatggaaacaagcccactgagactagtcaacctcaatctagcacagggggttacaaccagcccagcctaggatatggacagagtaactacagttatccccaggtacctgggagctaccccatgcagccagtcactgcacctccatcctaccctcctaccagctattcctctacacagccgactagttatgatcagagcagttactctcagcagaacacctatgggcaaccgagcagctatggacagcagagtagctatggtcaacaaagcagctatgggcagcagcctcccactagttacccaccccaaactggatcctacagccaagctccaagtcaatatagccaacagagcagcagctacgggcagcagagttcattccgacaggaccaccccagtagcatgggtgtttatgggcaggagtctggaggattttccggaccaggagagaaccggagcatgagtggccctgataaccggggcaggggaagagggggatttgatcgtggaggcatgagcagaggtgggcggggaggaggacgcggtggaatgggtgtggcatccagtgcccctcccctgactggcaagcgaggccggggccgcccaaggaaggccaacctgctggactcaatgtttgggtccccagggggcctgagggaggcaggcatccttccatgcggtctatgtggtaaggtgttcactgatgccaaccggctccggcagcacgaggcccagcacggtgtcaccagcctccagctgggctacatcgaccttcctcctccgaggctgggtgagaatgggctacccatctctgaagaccccgacggcccccgaaagaggagccggaccaggaagcaggtggcttgtgagatctgcggcaagatcttccgtgatgtgtatcatcttaaccggcacaagctgtcccactctggggagaagccctactcctgccctgtgtgtgggttgcggttcaagagaaaagaccgcatgtcctaccatgtgcggtcccatgatgggtccgtgggcaagccttacatctgccagagctgtgggaaaggcttctccaggcctgatcacttgaacggacatatcaagcaggtgcacacttctgagcggcctcacaagtgtcagacctgcaatgcttcttttgccacccgagaccgtctgcgctcccacctggcctgtcatgaagacaaggtgccctgccaggtgtgtgggaagtacttgcgggcagcatacatggcagaccacctgaagaagcacagcgaggggcccagcaacttctgcagtatctgtaaccgagaaggccagaaatgctcacatcaggatccgattgagagctctgactcctatggtgacctctcagatgccagcgacctgaagacgccagagaagcagagtgccaatggctctttctcctgcgacatggcagtccccaaaaacaaaatggagtctgatggggagaagaagtacccatgccctgaatgtgggagcttcttccgctctaagtcctacttgaacaaacacatccagaaggtgcatgtccgggctctcgggggccccctgggggacctgggccctgcccttggctcacctttctctcctcagcagaacatgtctctcctcgagtcctttgggtttcagattgttcagtcggcatttgcgtcatctttagtagatcctgaggttgaccagcagcccatggggcctgaagggaaatgaggcagctgctgtgtccccacggaaacaaccatctggggactgctgggaaatgctgtgaatgcggagggaagtagggggtttcaatgctgttgggaaccaggaaggtgggacagccggcaggtagggacattgtgtacctcagttgtgtcacatgtgagcaagcccaggttgaccttgtgatgtgaattgatctgatcagactgtattaaaaatgttagtacattactctatctgc

SEQ ID NO: 356911 - DNA, 2557 bp, Homo sapiens
  misc_feature (2360)..(2360): n is a, c, g, or t
tggcgaattcggcacgagggggagacggacgttgagagaacgaggaggaaggagagaaaatggcgtccacggattacagtacctatagccaagctgcagcgcagcagggctacagtgcttacaccgcccagcccactcaaggatatgcacagaccacccaggcatatgggcaacaaagctatggaacctatggacagcccactgatgtcagctatacccaggctcagaccactgcaacctatgggcagaccgcctatgcaacttcttatggacagcctcccactggttatactactccaactgccccccaggcatacagccagcctgtccaggggtatggcactggtgcttatgataccaccactgctacagtcaccaccacccaggcctcctatgcagctcagtctgcatatggcactcagcctgcttatccagcctatgggcagcagccagcagccactgcacctacaagaccgcaggatggaaacaagcccactgagactagtcaacctcaatctagcacagggggttacaaccagcccagcctaggatatggacagagtaactacagttatccccaggtacctgggagctaccccatgcagccagtcactgcacctccatcctaccctcctaccagctattcctctacacagccgactagttatgatcagagcagttactctcagcagaacacctatgggcaaccgagcagctatggacagcagagtagctatggtcaacaaagcagctatgggcagcagcctcccactagttacccaccccaaactggatcctacagccaagctccaagtcaatatagccaacagagcagcagctacgggcagcagagttcattccgacaggaccaccccagtagcatgggtgtttatgggcaggagtctggaggattttccggaccaggagagaaccggagcatgagtggccctgataaccggggcaggggaagagggggatttgatcgtggaggcatgagcagaggtgggcggggaggaggacgcggtggaatggggttacaaagtgagagccttgtatacacttcaatacttaaaaagtacccgtactcagtactcagccggcagcataatgaaaagtgggactagacacggtgtccatatggagaggaaaaatatacatagaatatttttaacaaaatgtattcattgtataaatggaatccttctgtaactttggtaactgcatacttgttgtttggtaatgaaccagaggaggtataatactctagaattgtgtaacattaaagtgtaaacttttgtgtttaaagagagagaacattttatggtgtgtacttttaaaaaggaaacaaagctgcatgcaacagcttgaaattgtatattcaggtattaaaggtgcaatactggttagaaaaaactcagggcctcccactggggagctgcctttatttaattttaaagaaaacaaaatctaacccaaaaagtccaattcatatttccctctcccctctttaagtaattttacatggccatagtcattattctaactgatatgtctataaagttgcacccccagtccgttgagccttggtatttgttgtaaattctcctttcacagcgattgttaaatctattcgtgccctgagatgtatggctttatgctgaagattggctggatgcgtcctctgatgtgtgttgtaggaatttaatgtggttgtctcctgcttttattatactgtgacttgttaggaaaccctgggcctcatggatcgtggtggtcccggtggaatgttcagaggtggccgtggtggagacagaggtggcttccgtggtggccggggcatggaccgaggtggctttggtggaggaagacgaggtggccctggggggccccctggacctttgatggaacagatgggaggaagaagaggaggacgtggaggacctggaaaaatggataaaggcgagcaccgtcaggagcgcagagatcggccctactagatgcagagaccccgcagagctgcattgactaccagatttattttttaaaccagaaaatgttttaaatttataattccatatttataatgttggccacaacattatgattattccttgtctgtactttagtatttttcaccatttgtgaagaaacattaaaacaagttaaatggtaaaaaaaaagtcatttactctaccatgtttgcaggcacactcattacagcgctaagctcgcactgatttttttacctgagtaggcctagaaataaacatgctagcttttattccaggtctaaccaaaaaaataaaccctcgttccacagaagctgtcatcaagtatttcctcacgcaagcaaccgcatncataatccttctaatagctatcctctataacaatatactctgcggacaatgaaccataaccaatactaccaatcaatactcatcattaataatcataatggctatagcaataaaactaggaatagccccctttcacttttgagtccagaattaacccaggcacccctctgcaacccggctgctttttgtacatggca

SEQ ID NO: 356912 - DNA, 2332 bp, Homo sapiens
tggcgaattcggcacgagggggagacggacgttgagagaacgaggaggaaggagagaaaatggcgtccacggattacagtacctatagccaagctgcagcgcagcagggctacagtgcttacaccgcccagcccactcaaggatatgcacagaccacccaggcatatgggcaacaaagctatggaacctatggacagcccactgatgtcagctatacccaggctcagaccactgcaacctatgggcagaccgcctatgcaacttcttatggacagcctcccactggttatactactccaactgccccccaggcatacagccagcctgtccaggggtatggcactggtgcttatgataccaccactgctacagtcaccaccacccaggcctcctatgcagctcagtctgcatatggcactcagcctgcttatccagcctatgggcagcagccagcagccactgcacctacaagaccgcaggatggaaacaagcccactgagactagtcaacctcaatctagcacagggggttacaaccagcccagcctaggatatggacagagtaactacagttatccccaggtacctgggagctaccccatgcagccagtcactgcacctccatcctaccctcctaccagctattcctctacacagccgactagttatgatcagagcagttactctcagcagaacacctatgggcaaccgagcagctatggacagcagagtagctatggtcaacaaagcagctatgggcagcagcctcccactagttacccaccccaaactggatcctacagccaagctccaagtcaatatagccaacagagcagcagctacgggcagcagagttcattccgacaggaccaccccagtagcatgggtgtttatgggcaggagtctggaggattttccggaccaggagagaaccggagcatgagtggccctgataaccggggcaggggaagagggggatttgatcgtggaggcatgagcagaggtgggcggggaggaggacgcggtggaatggggtaagagcaaaccttttctccttttacctaattttgtttcatccataggattttcagtggaaagaagggactgaaagacataagaaattaatttctgcatttccatggacaatctgttgagctcaagccatcttctaaaacatggaaatgtcatctttgtggcatatattaagtggcagtttattttctttccctgccagtatacttcgttgggtcggggagaacaaagaatggttttgaaaccagagctttcagttcccttcatggtttccagaggtgagaagcctctgtgggtagtagatttgggatggaacacacacaacccttctaatgaccctaagttgttaactaactgcctttgaatggttgtcttgaaatacctggtgtatatactgcagaaaaggaatgcagctgttttccacagtgtttgtccccaacttctgtttgtactcagaatcgttgaacatatgaagattttggtcccataatccttaaactatagcctgaggtgcacctgattacatagagtttggatggagcaaagaaaaatccaatagcattttgcagagtaatgtatataattatgggctcacttcctactggagatgttgaaagtctaaatcggtttgaccattttgattgatggcacaatctggtttagaaaactttgtttagatcaatgacataaccctgctgcctctgcctgcccttcccctcccttctcccatccccttttccctatctggtgtctgtactttgatgaaggtgagctataatattggtggttaacataatccagaaggcttagttctgtgtgtgttctgtccctatataaactggtaaagaaaaaaaaaagttatgcagaatgttagatatttacatttgatacggtgtgccactattcaaggaaaaattaaatagcattttttaaaaaacagaatgaacttcaaaattaaagttgatttttaacttccatattagcaaatactcttcactactgaaagacagtactattttgcatattctgcataactttaagaaagtctttagtgaaatctttattggaagaaagtcatttgacaacaggcaaaaatttaatgattcggtatgaagtaaaatcaatcttctgatttggaaaatactctattataaaggtttcacttctttttggatgttttaaaatagacatagacacttgaaagtactatcatcacgtctcaaatcacctagaattcctagtatttttaaattgcaaatacaatttcaagtttatttaaatactccagaagttataatcct

SEQ ID NO: 356913 - DNA, 2057 bp, Homo sapiens
tggcgaattcggcacgagggggagacggacgttgagagaacgaggaggaaggagagaaaatggcgtccacggattacagtacctatagccaagctgcagcgcagcagggctacagtgcttacaccgcccagcccactcaaggatatgcacagaccacccaggcatatgggcaacaaagctatggaacctatggacagcccactgatgtcagctatacccaggctcagaccactgcaacctatgggcagaccgcctatgcaacttcttatggacagcctcccactggttatactactccaactgccccccaggcatacagccagcctgtccaggggtatggcactggtgcttatgataccaccactgctacagtcaccaccacccaggcctcctatgcagctcagtctgcatatggcactcagcctgcttatccagcctatgggcagcagccagcagccactgcacctacaagaccgcaggatggaaacaagcccactgagactagtcaacctcaatctagcacagggggttacaaccagcccagcctaggatatggacagagtaactacagttatccccaggtacctgggagctaccccatgcagccagtcactgcacctccatcctaccctcctaccagctattcctctacacagccgactagttatgatcagagcagttactctcagcagaacacctatgggcaaccgagcagctatggacagcagagtagctatggtcaacaaagcagctatgggcagcagcctcccactagttacccaccccaaactggatcctacagccaagctccaagtcaatatagccaacagagcagcagctacgggcagcagagttcattccgacaggaccaccccagtagcatgggtgtttatgggcaggagtctggaggattttccggaccaggagagaaccggagcatgagtggccctgataaccggggcaggggaagagggggatttgatcgtggaggcatgagcagaggtgggcggggaggaggacgcggtggaatgggtgtggcatccagtgcccctcccctgactggcaagcgaggccggggccgcccaaggaaggccaacctgctggactcaatgtttgggtccccagggggcctgagggaggcaggcatccttccatgcggtctatgtggtaaggtgttcactgatgccaaccggctccggcagcacgaggcccagcacggtgtcaccagcctccagctgggctacatcgaccttcctcctccgaggctgggtgagaatgggctacccatctctgaagaccccgacggcccccgaaagaggagccggaccaggaagcaggtggcttgtgagatctgcggcaagatcttccgtgatgtgtatcatcttaaccggcacaagctgtcccactctggggagaagccctactcctgccctgtgtgtgggttgcggttcaagagaaaagaccgcatgtcctaccatgtgcggtcccatgatgggtccgtgggcaagccttacatctgccagagctgtgggaaaggcttctccaggcctgatcacttgaacggacatatcaagcaggtgcacacttctgagcggcctcacaagtgtcaggtgtgggttgggagcagcagcggcctgccgcccctggaacctcttcctagcgacctgccatcatgggactttgcccagcctgctttgtggaggtcgtcccattcggttcctgacaccgccttttccctttctctaaaaaaatcattcccagcccttgaaaacctgggcccagcacactccagcaacactcagatctagatcctgctttcatttctggctagtgaagtagacttttgtgtttttgaggtttattagcaggtctgctcaggaaccaaactaatgagtagctttatattgggccaccccaatatatggctttgggggctgaaaaagcagatgtagaccccctccctcggatccttattggtgtgccctttagcactccgcagactctgcggggtgaacaggagtgatgataaaatttttcattctaacatattgaggctt

SEQ ID NO: 356914 - DNA, 1986 bp, Homo sapiens
tggcgaattcggcacgagggggagacggacgttgagagaacgaggaggaaggagagaaaatggcgtccacggattacagtacctatagccaagctgcagcgcagcagggctacagtgcttacaccgcccagcccactcaaggatatgcacagaccacccaggcatatgggcaacaaagctatggaacctatggacagcccactgatgtcagctatacccaggctcagaccactgcaacctatgggcagaccgcctatgcaacttcttatggacagcctcccactggttatactactccaactgccccccaggcatacagccagcctgtccaggggtatggcactggtgcttatgataccaccactgctacagtcaccaccacccaggcctcctatgcagctcagtctgcatatggcactcagcctgcttatccagcctatgggcagcagccagcagccactgcacctacaagaccgcaggatggaaacaagcccactgagactagtcaacctcaatctagcacagggggttacaaccagcccagcctaggatatggacagagtaactacagttatccccaggtacctgggagctaccccatgcagccagtcactgcacctccatcctaccctcctaccagctattcctctacacagccgactagttatgatcagagcagttactctcagcagaacacctatgggcaaccgagcagctatggacagcagagtagctatggtcaacaaagcagctatgggcagcagcctcccactagttacccaccccaaactggatcctacagccaagctccaagtcaatatagccaacagagcagcagctacgggcagcagagttcattccgacaggaccaccccagtagcatgggtgtttatgggcaggagtctggaggattttccggaccaggagagaaccggagcatgagtggccctgataaccggggcaggggaagagggggatttgatcgtggaggcatgagcagaggtgggcggggaggaggacgcggtggaatggggttacaaagtgagagccttgtatacacttcaatacttaaaaagtacccgtactcagtactcagccggcagcataatgaaaagtgggactagacacggtgtccatatggagaggaaaaatatacatagaatatttttaacaaaatgtattcattgtataaatggaatccttctgtaactttggtaactgcatacttgttgtttggtaatgaaccagaggaggtataatactctagaattgtgtaacattaaagtgtaaacttttgtgtttaaagagagagaacattttatggtgtgtacttttaaaaaggaaacaaagctgcatgcaacagcttgaaattgtatattcaggtattaaaggtgcaatactggttagaaaaaactcagggcctcccactggggagctgcctttatttaattttaaagaaaacaaaatctaacccaaaaagtccaattcatatttccctctcccctctttaagtaattttacatggccatagtcattattctaactgatatgtctataaagttgcacccccagtccgttgagccttggtatttgttgtaaattctcctttcacagcgattgttaaatctattcgtgccctgagatgtatggctttatgctgaagattggctggatgcgtcctctgatgtgtgttgtaggaatttaatgtggttgtctcctgcttttattatactgtgacttgttaggaaaccctgggcctcatttggctctcccttgggagacgtgcagcagccccatataacctgccaggtatcccccagataaccaatgacctcctcaatacagactcggtatcacgacgacgaacagggaccacgcacgcaatgcagagccacaccacccaatacgccacaccaggtacacacaacgcacaaaaacaccagcccacacccacgacacaaacaccaccccacagcgcaacacgac

SEQ ID NO: 356915 - DNA, 2151 bp, Homo sapiens
tggcgaattcggcacgagggggagacggacgttgagagaacgaggaggaaggagagaaaatggcgtccacggattacagtacctatagccaagctgcagcgcagcagggctacagtgcttacaccgcccagcccactcaaggatatgcacagaccacccaggcatatgggcaacaaagctatggaacctatggacagcccactgatgtcagctatacccaggctcagaccactgcaacctatgggcagaccgcctatgcaacttcttatggacagcctcccactggttatactactccaactgccccccaggcatacagccagcctgtccaggggtatggcactggtgcttatgataccaccactgctacagtcaccaccacccaggcctcctatgcagctcagtctgcatatggcactcagcctgcttatccagcctatgggcagcagccagcagccactgcacctacaagaccgcaggatggaaacaagcccactgagactagtcaacctcaatctagcacagggggttacaaccagcccagcctaggatatggacagagtaactacagttatccccaggtacctgggagctaccccatgcagccagtcactgcacctccatcctaccctcctaccagctattcctctacacagccgactagttatgatcagagcagttactctcagcagaacacctatgggcagcagcctcccactagttacccaccccaaactggatcctacagccaagctccaagtcaatatagccaacagagcagcagctacgggcagcagagttcattccgacaggaccaccccagtagcatgggtgtttatgggcaggagtctggaggattttccggaccaggagagaaccggagcatgagtggccctgataaccggggcaggggaagagggggatttgatcgtggaggcatgagcagaggtgggcggggaggaggacgcggtggaatgggcagcgctggagagcgaggtggcttcaataagcctggtggacccatggatgaaggaccagatcttgatctaggcccacctgtagatccagatgaagactctgacaacagtgcaatttatgtacaaggattaaatgacagtgtgactctagatgatctggcagacttctttaagcagtgtggggttgttaagatgaacaagagaactgggcaacccatgatccacatctacctggacaaggaaacaggaaagcccaaaggcgatgccacagtgtcctatgaagacccacccactgccaaggctgccgtggaatggtttgatgggaaagattttcaagggagcaaacttaaagtctcccttgctcggaagaagcctccaatgaacagtatgcggggtggtctgccaccccgtgagggcagaggcatgccaccaccactccgtggaggtccaggaggcccaggaggtcctgggggacccatgggtcgcatgggaggccgtggaggagatagaggaggcttccctccaagaggaccccggggttcccgagggaacccctctggaggaggaaacgtccagcaccgagctggagactggcagtgtcccaatccgggttgtggaaaccagaacttcgcctggagaacagagtgcaaccagtgtaaggccccaaagcctgaaggcttcctcccgccaccctttccgcccccgggtggtgatcgtggcagaggtggccctggtggcatgcggggaggaagaggtggcctcatggatcgtggtggtcccggtggaatgttcagaggtggccgtggtggagacagaggtggcttccgtggtggccggggcatggaccgaggtggctttggtggaggaagacgaggtggccctggggggccccctggacctttgatggaacagatgggaggaagaagaggaggacgtggaggacctggaaaaatggataaaggcgagcaccgtcaggagcgcagagatcggccctactagatgcagagaccccgcagagctgcattgactaccagatttattttttaaaccagaaaatgttttaaatttataattccatatttataatgttggccacaacattatgattattccttgtctgtactttagtatttttcaccatttgtgaagaaacattaaaacaagttaaatggta

SEQ ID NO: 356916 - DNA, 2123 bp, Homo sapiens
tggcgaattcggcacgagggggagacggacgttgagagaacgaggaggaaggagagaaaatggcgtccacggattacagtacctatagccaagctgcagcgcagcagggctacagtgcttacaccgcccagcccactcaaggatatgcacagaccacccaggcatatgggcaacaaagctatggaacctatggacagcccactgatgtcagctatacccaggctcagaccactgcaacctatgggcagaccgcctatgcaacttcttatggacagcctcccactggttatactactccaactgccccccaggcatacagccagcctgtccaggggtatggcactggtgcttatgataccaccactgctacagtcaccaccacccaggcctcctatgcagctcagtctgcatatggcactcagcctgcttatccagcctatgggcagcagccagcagccactgcacctacaagaccgcaggatggaaacaagcccactgagactagtcaacctcaatctagcacagggggttacaaccagcccagcctaggatatggacagagtaactacagttatccccaggtacctgggagctaccccatgcagccagtcactgcacctccatcctaccctcctaccagctattcctctacacagccgactagttatgatcagagcagttactctcagcagaacacctatgggcaaccgagcagctatggacagcagagtagctatggtcaacaaagcagctatgggcagcagcctcccactagttacccaccccaaactggatcctacagccaagctccaagtcaatatagccaacagagcagcagctacgggcagcagaatgtcaccgggtgcgcatcaatgtacctccacacagagggcttctctgggccctctccaggtgacggggccatgggctatggctatgagaaacctctgcgaccattcccagatgatgtctgcgttgtccctgagaaatttgaaggagacatcaagcaggaaggggtcggtgcatttcgagaggggccgccctaccagcgccggggtgccctgcagctgtggcaatttctggtggccttgctggatgacccaacaaatgcccatttcattgcctggacgggccggggaatggagttcaagctcattgagcctgaggaggtcgccaggctctggggcatccagaagaaccggccagccatgaattacgacaagctgagccgctcgctccgatactattatgagaaaggcatcatgcagaaggtggctggtgagcgttacgtgtacaagtttgtgtgtgagcccgaggccctcttctctttggccttcccggacaatcagcgtccagctctcaaggctgagtttgaccggcctgtcagtgaggaggacacagtccctttgtcccacttggatgagagccccgcctacctcccagagctggctggccccgcccagccatttggccccaagggtggctactcttactagcccccagcggctgttccccctgccgcaggtgggtgctgccctgtgtacatataaatgaatctggtgttggggaaaccttcatctgaaacccacagatgtctctggggcagatccccactgtcctaccagttgccctagcccagactctgagctgctcaccggagtcattgggaaggaaaagtggagaaatggcaagtctagagtctcagaaactcccctgggggtttcacctgggccctggaggaattcagctcagcttcttcctaggtccaagccccccacaccttttccccaaccacagagaacaagagtttgttctgttctgggggacagagaaggcgcttcccaacttcatactggcaggagggtgaggaggttcactgagctccccagatctcccactgcggggagacagaagcctggactctgccccacgctgtggccctggagggtcccggtttgtcagttcttggtgctctgtgttcccagaggcaggcggaggttgaagaaaggaacctgggatgaggggtgctgggtataagcagagagggatgggttcctgctccaagggaccctttgcctttcttctgccctttcctaggcccaggcctgggtttgtatcccatt

SEQ ID NO: 356917 - DNA, 1354 bp, Homo sapiens
  misc_feature (856)..(856): n is a, c, g, or t
  misc_feature (859)..(859): n is a, c, g, or t
  misc_feature (871)..(871): n is a, c, g, or t
  misc_feature (877)..(877): n is a, c, g, or t
  misc_feature (892)..(892): n is a, c, g, or t
  misc_feature (895)..(895): n is a, c, g, or t
  misc_feature (898)..(898): n is a, c, g, or t
  misc_feature (905)..(905): n is a, c, g, or t
  misc_feature (911)..(911): n is a, c, g, or t
  misc_feature (919)..(919): n is a, c, g, or t
  misc_feature (931)..(931): n is a, c, g, or t
  misc_feature (934)..(934): n is a, c, g, or t
  misc_feature (952)..(952): n is a, c, g, or t
  misc_feature (961)..(961): n is a, c, g, or t
  misc_feature (967)..(967): n is a, c, g, or t
  misc_feature (977)..(977): n is a, c, g, or t
  misc_feature (988)..(989): n is a, c, g, or t
  misc_feature (997)..(997): n is a, c, g, or t
  misc_feature (1003)..(1003): n is a, c, g, or t
  misc_feature (1015)..(1015): n is a, c, g, or t
  misc_feature (1021)..(1021): n is a, c, g, or t
  misc_feature (1027)..(1027): n is a, c, g, or t
  misc_feature (1033)..(1033): n is a, c, g, or t
  misc_feature (1045)..(1045): n is a, c, g, or t
  misc_feature (1054)..(1054): n is a, c, g, or t
  misc_feature (1057)..(1057): n is a, c, g, or t
  misc_feature (1063)..(1063): n is a, c, g, or t
  misc_feature (1072)..(1072): n is a, c, g, or t
  misc_feature (1075)..(1075): n is a, c, g, or t
  misc_feature (1078)..(1078): n is a, c, g, or t
  misc_feature (1081)..(1081): n is a, c, g, or t
  misc_feature (1084)..(1085): n is a, c, g, or t
  misc_feature (1087)..(1087): n is a, c, g, or t
  misc_feature (1090)..(1090): n is a, c, g, or t
  misc_feature (1093)..(1093): n is a, c, g, or t
  misc_feature (1099)..(1099): n is a, c, g, or t
  misc_feature (1102)..(1102): n is a, c, g, or t
  misc_feature (1114)..(1114): n is a, c, g, or t
  misc_feature (1117)..(1117): n is a, c, g, or t
  misc_feature (1126)..(1126): n is a, c, g, or t
  misc_feature (1129)..(1129): n is a, c, g, or t
  misc_feature (1135)..(1135): n is a, c, g, or t
  misc_feature (1138)..(1138): n is a, c, g, or t
  misc_feature (1141)..(1142): n is a, c, g, or t
  misc_feature (1144)..(1144): n is a, c, g, or t
  misc_feature (1150)..(1150): n is a, c, g, or t
  misc_feature (1153)..(1154): n is a, c, g, or t
  misc_feature (1168)..(1168): n is a, c, g, or t
  misc_feature (1171)..(1171): n is a, c, g, or t
  misc_feature (1175)..(1175): n is a, c, g, or t
  misc_feature (1178)..(1178): n is a, c, g, or t
  misc_feature (1180)..(1180): n is a, c, g, or t
  misc_feature (1187)..(1189): n is a, c, g, or t
  misc_feature (1195)..(1195): n is a, c, g, or t
  misc_feature (1198)..(1198): n is a, c, g, or t
  misc_feature (1206)..(1207): n is a, c, g, or t
  misc_feature (1214)..(1214): n is a, c, g, or t
tggcgaattcggcacgagggggagacggacgttgagagaacgaggaggaaggagagaaaatggcgtccacggattacagtacctatagccaagctgcagcgcagcagggctacagtgcttacaccgcccagcccactcaaggatatgcacagaccacccaggcatatgggcaacaaagctatggaacctatggacagcccactgatgtcagctatacccaggctcagaccactgcaacctatgggcagaccgcctatgcaacttcttatggacagcctcccactggttatactactccaactgccccccaggcatacagccagcctgtccaggggtatggcactggtgcttatgataccaccactgctacagtcaccaccacccaggcctcctatgcagctcagtctgcatatggcactcagcctgcttatccagcctatgggcagcagccagcagccactgcacctacaagaccgcaggatggaaacaagcccactgagactagtcaacctcaatctagcacagggggttacaaccagcccagcctaggatatggacagagtaactacagttatccccaggtacctgggagctaccccatgcagccagtcactgcacctccatcctaccctcctaccagctattcctctacacagccgactagttatgatcagagcagttactctcagcagaacacctatgggcaaccgagcagctatggacagcagagtagctatggtcaacaaagcagctatgggcagcagcctcccactagttacccaccccaaactggatcctacagccaagctccaagtcaatatagccaacagagcagcagctacgggcagcagagagnggncagatccagctntggcanttcctcctggagctnctntcngacagcnccaacnccagctgnatcacctggganggnaccaacggggagttcaanatgacggancccgangaggtggccnggcgctggggnnagcggaanagcaancccaacatgaantacganaagctnagccgngccctccgttantactatganaanaacatnatgaccaangtncanggnaanngntangcntacaanttngacttccacggnatngcccaggcnctncagccncanccnncngagtcntcnntgtacaagtacccntcngacntcncntacatgnnntcctancangcccaccnncagaagntgaactttgtggcgccccaccctccagccctccccgtgacatcttccagtttttttgctgccccaaacccatactggaattcaccaactgggggtatataccccaacactaggctccccaccagccatatgccttctcat

SEQ ID NO: 356918 - DNA, 1140 bp, Homo sapiens
tggcgaattcggcacgagggggagacggacgttgagagaacgaggaggaaggagagaaaatggcgtccacggattacagtacctatagccaagctgcagcgcagcagggctacagtgcttacaccgcccagcccactcaaggatatgcacagaccacccaggcatatgggcaacaaagctatggaacctatggacagcccactgatgtcagctatacccaggctcagaccactgcaacctatgggcagaccgcctatgcaacttcttatggacagcctcccactggttatactactccaactgccccccaggcatacagccagcctgtccaggggtatggcactggtgcttatgataccaccactgctacagtcaccaccacccaggcctcctatgcagctcagtctgcatatggcactcagcctgcttatccagcctatgggcagcagccagcagccactgcacctacaagaccgcaggatggaaacaagcccactgagactagtcaacctcaatctagcacagggggttacaaccagcccagcctaggatatggacagagtaactacagttatccccaggtacctgggagctaccccatgcagccagtcactgcacctccatcctaccctcctaccagctattcctctacacagccgactagttatgatcagagcagttactctcagcagaacacctatgggcaaccgagcagctatggacagcagagtagctatggtcaacaaagcagctatgggcagcagcctcccactagttacccaccccaaactggatcctacagccaagctccaagtcaatatagccaacagagcagcagctacgggcagcagattgccattgccccaaatggagccttacagttggcaagtccaggcacagatggagtacagggacttcagacattaaccatgacaaattcaggcagtactcagcaaggtacaactattcttcagtatgcacagacctctgatggacagcagatacttgtgcccagcaatcaggtggtcgtacaaactgcatcaggagatatgccaacatatcagatccgaactacaccttcagctacttctctgccacaaactgtggtgatgacatctcctgtgactctcacctctcaga

SEQ ID NO: 356919 - DNA, 792 bp, Homo sapiens
  misc_feature (762)..(762): n is a, c, g, or t
  misc_feature (768)..(768): n is a, c, g, or t
tggcgaattcggcacgagggggagacggacgttgagagaacgaggaggaaggagagaaaatggcgtccacggattacagtacctatagccaagctgcagcgcagcagggctacagtgcttacaccgcccagcccactcaaggatatgcacagaccacccaggcatatgggcaacaaagctatggaacctatggacagcccactgatgtcagctatacccaggctcagaccactgcaacctatgggcagaccgcctatgcaacttcttatggacagcctcccactggttatactactccaactgccccccaggcatacagccagcctgtccaggggtatggcactggtgcttatgataccaccactgctacagtcaccaccacccaggcctcctatgcagctcagtctgcatatggcactcagcctgcttatccagcctatgggcagcagccagcagccactgcacctacaagaccgcaggatggaaacaagcccactgagactagtcaacctcaatctagcacagggggttacaaccagcccagcctaggatatggacagagtaactacagttatccccaggtacctgggagctaccccatgcagccagtcactgcacctccatcctaccctcctaccagctattcctctacacagccgactagttatgatcagagcagttactctcagcagaacacctatgggcaaccgagcagctatggacagcagagtagctatggtcaacaaagcagctatgggcacncattangaggggtccgagctcgatcgttca

SEQ ID NO: 356920 - DNA, 845 bp, Homo sapiens
tggcgaattcggcacgagggggagacggacgttgagagaacgaggaggaaggagagaaaatggcgtccacggattacagtacctatagccaagctgcagcgcagcagggctacagtgcttacaccgcccagcccactcaaggatatgcacagaccacccaggcatatgggcaacaaagctatggaacctatggacagcccactgatgtcagctatacccaggctcagaccactgcaacctatgggcagaccgcctatgcaacttcttatggacagcctcccactggttatactactccaactgccccccaggcatacagccagcctgtccaggggtatggcactggtgcttatgataccaccactgctacagtcaccaccacccaggcctcctatgcagctcagtctgcatatggcactcagcctgcttatccagcctatgggcagcagccagcagccactgcacctacaagaccgcaggatggaaacaagcccactgagactagtcaacctcaatctagcacagggggttacaaccagcccagcctaggatatggacagagtaactacagttatccccaggtacctgggagctaccccatgcagccagtcactgcacctccatcctaccctcctaccagctattcctctacacagccgactagttatgattgctacagtcaccaccacccaggcctcctatgcagctcagtctgcatatggcactcagcctgcttatccagcctatgggcagcagccagcagccctgcacctacaagaccgcaggatgcaacaagccctctgagactagtcaacctcaatctagcaacggggttacaccaaccc

SEQ ID NO: 356921 - DNA, 430 bp, Homo sapiens
agtttgggaaatcctatgtgagcatctactcataattgccttaagtgaagtaaaccaaaagtttgatagcattcttcttagtatgcttggtagttttcttagatttatgatgaatatccttgggcagtagtgatcaggtagttaagaaacccctatagatacatgataataattctcctgtcttgttgtctctgaaaggcccacctgtagatccagatgaagactctgacaacagtgcaatttatgtacaaggattaaatgacagtgtgactctagatgatctggcagacttctttaagcagtgtggggttgttaaggtcagtaaaagcataaccaggtcatctggcagaactttaaaccacagagcattttaaagagattgaattgatgttgagagttgttttctaaggttgcctttgcctgacttctt

SEQ ID NO: 356922 - DNA, 518 bp, Homo sapiens
tataggctaactatataaggttatttcagctgtgatgatccagcagttttgttgaacttaaaagagcctacctattaaggatgctttatcgtgatgtaaagaagatggtgccttggttagtgccttggaattgaggattttgtgattccaggagaaagtacatcaggcagtggtgtaaatgctggtccatggcttacagatgtgactctttcctcaggttcattccgacaggaccaccccagtagcatgggtgtttatgggcaggagtctggaggattttccggaccaggagagaaccggagcatgagtggccctgataaccggggcaggggaagagggggatttgatcgtggaggcatgagcagaggtgggcggggaggaggacgcggtggaatggggtaagagcaaaccttttctccttttacctaattttgtttcatccataggattttcagtggaaagaagggactgaaagacataagaaattaatttctgcatttccatggacaatctgttga

SEQ ID NO: 356923 - DNA, 3014 bp, Homo sapiens
gggcctactctgccgccgccgccgcccgcccgctccagccgccgccgccgccgccaccgccctccaggctccgggacccggcccgcgccaccgcccccgtgcgcgccccgccgccgccgccttcgccttcgccttttgtttcctccgctccggcgcccccgccccggctcgcgctttgcaggggacgcagcgcgcgcccccagcgggcccgggaaaagccgcggcgcgcgcgcgcgcctgcgcggcggacccctccttctcctccccgcgtgcgcgtgcccttcttggctgcgcgccggcgccgcctggcgggcgggaggggaggtggcaggcgcgtttgcaggaggggcgcacctcttcgctcgcgcacccccccggaaggtagaccgggaaggggaggcgggcgggcggagaggagagagtggcgcgcagtccagcgagggcgggggttggctatgtggggggtggtgcaccccgcagtctagacagtctgatccgggctgggggcgtgtacactcggcgcacctgcgagactacagagcctcgggccggcacgtgtggggagtgtggacacgtctgctgcgccccgcttctcgctgctgaggggaagggagggggcgggcaggtgcagcggccgggctagtgggagggggcggcggccatggagcgggtgaacgacgcttcgtgcggcccgtctggctgctacacataccaggtgagcagacacagcacggagatgctgcacaacctgaaccagcagcgcaaaaacggcgggcgcttctgcgacgtgctcttgcgggtaggcgacgagagcttcccagcgcaccgcgccgtgctggccgcctgcagcgagtactttgagtcggtgttcagcgcccagttgggcgacggcggagctgcggacgggggtccggctgatgtagggggcgcgacggcagcaccaggcggcggggccgggggcagccgggagctggagatgcacactatcagctccaaggtatttggggacattctggacttcgcctacacttcccgcatcgtggtgcgcttggagagctttcccgaactcatgacggccgccaagttcctgctgatgaggtcggttatcgagatctgccaggaagtcatcaaacagtccaacgtacagatcctggtaccccctgcccgcgccgatataatgctctttcgcccccctgggacctcggacttgggcttccctttggacatgaccaacggggcagccttggcagccaacagcaatggcatcgccggcagcatgcagccagaggaggaggcagctcgggcggctggtgcagccattgcaggccaagcctctttgcctgtgttacctggggtggaccgcttgcccatggtggctggacccctatccccccaactgctgacttccccattccccagtgtggcatccagtgcccctcccctgactggcaagcgaggccggggccgcccaaggaaggccaacctgctggactcaatgtttgggtccccagggggcctgagggaggcaggcatccttccatgcggtctatgtggtaaggtgttcactgatgccaaccggctccggcagcacgaggcccagcacggtgtcaccagcctccagctgggctacatcgaccttcctcctccgaggctgggtgagaatgggctacccatctctgaagaccccgacggcccccgaaagaggagccggaccaggaagcaggtggcttgtgagatctgcggcaagatcttccgtgatgtgtatcatcttaaccggcacaagctgtcccactctggggagaagccctactcctgccctgtgtgtgggttgcggttcaagagaaaagaccgcatgtcctaccatgtgcggtcccatgatgggtccgtgggcaagccttacatctgccagagctgtgggaaaggcttctccaggcctgatcacttgaacggacatatcaagcaggtgcacacttctgagcggcctcacaagtgtcaggtgtgggttgggagcagcagcggcctgccgcccctggaacctcttcctagcgacctgccatcatgggactttgcccagcctgctttgtggaggtcgtcccattcggttcctgacaccgccttttccctttctctaaaaaaatcattcccagcccttgaaaacctgggcccagcacactccagcaacactctcttctgcccagccccgccgggatatctgaggcagggctggaccaccccagagggcagcagggcctttacccagtggcctgttggctagcctgggcctccctggagagggttgacagtggaagggaacaggaggggcatttggcctgagacccctgcttttgggagaggctagcagggtggttcctgcccagcatgcccagctcctccctgggtgactcggagtctttcccatgtcagagcccccaaatgggggtagcaaggagcacctttctggaaccccctatagcatccaagtttctttctgggctctcttgccttttcccccctttcacagatggcacccctgggcatctgtccttgcctaggtgattttggaggttggtgccttcctgggaactagccaccagcttatctgcttcccttcccctggcatcacttcccataggcctggggtttctagactggggcctggccacccctttccccactccacgagtgagtcggcctccagagaagactggcacaattccaactagagtcaacccatgctgccctctgcccttcccactcagatctagatcctgctttcatttctggctagtgaagtagacttttgtgtttttgaggtttattagcaggtctgctcaggaaccaaactaatgagtagctttatattgggccaccccaatatatggctttgggggctgaaaaagcagatgtagaccccctccctcggatccttattggtgtgccctttagcactccgcagactctgcggggtgaacaggagtgatgataaaatttttcattctaacatattgaggctt

SEQ ID NO: 356924 - DNA, 670 bp, Homo sapiens
  misc_feature (14)..(15): n is a, c, g, or t
  misc_feature (45)..(45): n is a, c, g, or t
  misc_feature (70)..(70): n is a, c, g, or t
  misc_feature (77)..(77): n is a, c, g, or t
  misc_feature (116)..(116): n is a, c, g, or t
  misc_feature (122)..(122): n is a, c, g, or t
  misc_feature (129)..(129): n is a, c, g, or t
  misc_feature (134)..(134): n is a, c, g, or t
  misc_feature (139)..(139): n is a, c, g, or t
  misc_feature (142)..(143): n is a, c, g, or t
  misc_feature (145)..(146): n is a, c, g, or t
  misc_feature (148)..(150): n is a, c, g, or t
  misc_feature (153)..(153): n is a, c, g, or t
ccagggggccgggnnaaaaaaggggttccccaaaaggccccgggnttccaaggacccttggggaagaaancttccanccccaagttgaagctggcaagtgtcccatccgggtttgnaaccanacttggnttggnaaacnagnncnncnnntgnaaggccccaaagcctgaaggcttcctcccgccaccctttccgcccccgggtggtgatcgtggcagaggtggccctggtggcatgcggggaggaagaggtggcctcatggatcgtggtggtcccggtggaatgttcagaggtggccgtggtggagacagaggtggcttccgtggtggccggggcatggaccgaggtggctttggtggaggaagacgaggtggccctggggggccccctggacctttgatggaacagatgggaggaagaagaggaggacgtggaggacctggaaaaatggataaaggcgagcaccgtcaggagcgcagagatcggccctactagatgcagagaccccgcagagctgcattgactaccagatttattttttaaaccagaaaatgttttaaatttataattccatatttataatgttggccacaacattatgattattccttgtctgtactttagtatttttcaccatttgtgaagaaacattaaaacaagttaaatggta

SEQ ID NO: 356925 - DNA, 376 bp, Homo sapiens
tgcgtcgctctagaggatccggcacacccgctaggacagcagagtagcttaggcaacgaaagcagctatgggcagcagcctcccactagttacccaccccaaactggatcctacagccaagctccaagtcaatatagccaacagagcagcagctacgggcagcagagtgagaaaccataccagtgtgacttcaaggactgtgaacgaaggttttctcgttcagaccagctcaaaagacaccaaaggagacatacaggtgtgaaaccattccagtgtaaaacttgtcagcgaaagttctcccggtccgaccacctgaagacccacaccaggactcatacaggtaaaacaagtgaaaagcccttcagctgtcggtggc

SEQ ID NO: 356926 - DNA, 3679 bp, Homo sapiens
gggcctactctgccgccgccgccgcccgcccgctccagccgccgccgccgccgccaccgccctccaggctccgggacccggcccgcgccaccgcccccgtgcgcgccccgccgccgccgccttcgccttcgccttttgtttcctccgctccggcgcccccgccccggctcgcgctttgcaggggacgcagcgcgcgcccccagcgggcccgggaaaagccgcggcgcgcgcgcgcgcctgcgcggcggacccctccttctcctccccgcgtgcgcgtgcccttcttggctgcgcgccggcgccgcctggcgggcgggaggggaggtggcaggcgcgtttgcaggaggggcgcacctcttcgctcgcgcacccccccggaaggtagaccgggaaggggaggcgggcgggcggagaggagagagtggcgcgcagtccagcgagggcgggggttggctatgtggggggtggtgcaccccgcagtctagacagtctgatccgggctgggggcgtgtacactcggcgcacctgcgagactacagagcctcgggccggcacgtgtggggagtgtggacacgtctgctgcgccccgcttctcgctgctgaggggaagggagggggcgggcaggtgcagcggccgggctagtgggagggggcggcggccatggagcgggtgaacgacgcttcgtgcggcccgtctggctgctacacataccaggtgagcagacacagcacggagatgctgcacaacctgaaccagcagcgcaaaaacggcgggcgcttctgcgacgtgctcttgcgggtaggcgacgagagcttcccagcgcaccgcgccgtgctggccgcctgcagcgagtactttgagtcggtgttcagcgcccagttgggcgacggcggagctgcggacgggggtccggctgatgtagggggcgcgacggcagcaccaggcggcggggccgggggcagccgggagctggagatgcacactatcagctccaaggtatttggggacattctggacttcgcctacacttcccgcatcgtggtgcgcttggagagctttcccgaactcatgacggccgccaagttcctgctgatgaggtcggttatcgagatctgccaggaagtcatcaaacagtccaacgtacagatcctggtaccccctgcccgcgccgatataatgctctttcgcccccctgggacctcggacttgggcttccctttggacatgaccaacggggcagccttggcagccaacagcaatggcatcgccggcagcatgcagccagaggaggaggcagctcgggcggctggtgcagccattgcaggccaagcctctttgcctgtgttacctggggtggaccgcttgcccatggtggctggacccctatccccccaactgctgacttccccattccccagtgtggcatccagtgcccctcccctgactggcaagcgaggccggggccgcccaaggaaggccaacctgctggactcaatgtttgggtccccagggggcctgagggaggcaggcatccttccatgcggtctatgtggtaaggtgttcactgatgccaaccggctccggcagcacgaggcccagcacggtgtcaccagcctccagctgggctacatcgaccttcctcctccgaggctgggtgagaatgggctacccatctctgaagaccccgacggcccccgaaagaggagccggaccaggaagcaggtggcttgtgagatctgcggcaagatcttccgtgatgtgtatcatcttaaccggcacaagctgtcccactctggggagaagccctactcctgccctgtgtgtgggttgcggttcaagagaaaagaccgcatgtcctaccatgtgcggtcccatgatgggtccgtgggcaagccttacatctgccagagctgtgggaaaggcttctccaggcctgatcacttgaacggacatatcaagcaggtgcacacttctgagcggcctcacaagtgtcagacctgcaatgcttcttttgccacccgagaccgtctgcgctcccacctggcctgtcatgaagacaaggtgccctgccaggtgtgtgggaagtacttgcgggcagcatacatggcagaccacctgaagaagcacagcgaggggcccagcaacttctgcagtatctgtaaccgagaaggccagaaatgctcacatcaggatccgattgagagctctgactcctatggtgacctctcagatgccagcgacctgaagacgccagagaagcagagtgccaatggctctttctcctgcgacatggcagtccccaaaaacaaaatggagtctgatggggagaagaagtacccatgccctgaatgtgggagcttcttccgctctaagtcctacttgaacaaacacatccagaaggtgcatgtccgggctctcgggggccccctgggggacctgggccctgcccttggctcacctttctctcctcagcagaacatgtctctcctcgagtcctttgggtttcagattgttcagtcggcatttgcgtcatctttagtagatcctgaggttgaccagcagcccatggggcctgaagggaaatgaggcagctgctgtgtccccacggaaacaaccatctggggactgctgggaaatgctgtgaatgcggagggaagtgatgtttgggttctgtagctgagagatttttattcatttttaactgccccccaaccccactccaactccttctccaccacccattctcccaatggtctttagaaatagattttcatctgatattctgcagaaatatcaatgagacttggtatgggacaggggcagaaaacactacataggcctccaaggcaaaaccagtcccagtttctttaatgggaagaagctggaattcctggtgctcaattcttagtgaccccaatcctatacccaaatctatgatattctgggacctcagtgattttggtcccctcccacttctctagttcgtcatcctcccttcccatatccttcaaaagaaccacactagggtctccacctacttatacaatgcggatgcccaactgtttttaaggaagccagaagcatcccatggaccatggggtgagtgtcctccaagagccccctgagctcagccctctgcctggagggctccagacctttctgagccctgcttggaggcgagcattttcactgctaggacaagctcagctgttgaggacacccccaccccaaatttcagttcttacgtgattttaaccattcaacatgctgttgggttttaattctctaattattattattattgttattattttttaggaccagttgtagtgaattgctactgaaagctatcccaggtgatacagagctctttgtaaaccgcagtcacacattagggttagtattaaactttgtttagatgtaccataattaacttggctagttgattgtttgaagtctatggaagaaatagttttatgcaaaattttaaaaaatgccagtctggtcagggaagtagggggtttcaatgctgttgggaaccaggaaggtgggacagccggcaggtagggacattgtgtacctcagttgtgtcacatgtgagcaagcccaggttgaccttgtgatgtgaattgatctgatcagactgtattaaaaatgttagtacattactctatctgc

SEQ ID NO: 356927 - DNA, 2205 bp, Homo sapiens
tggcgaattcggcacgagggggagacggacgttgagagaacgaggaggaaggagagaaaatggcgtccacggattacagtacctatagccaagctgcagcgcagcagggctacagtgcttacaccgcccagcccactcaaggatatgcacagaccacccaggcatatgggcaacaaagctatggaacctatggacagcccactgatgtcagctatacccaggctcagaccactgcaacctatgggcagaccgcctatgcaacttcttatggacagcctcccactggttatactactccaactgccccccaggcatacagccagcctgtccaggggtatggcactggtgcttatgataccaccactgctacagtcaccaccacccaggcctcctatgcagctcagtctgcatatggcactcagcctgcttatccagcctatgggcagcagccagcagccactgcacctacaagaccgcaggatggaaacaagcccactgagactagtcaacctcaatctagcacagggggttacaaccagcccagcctaggatatggacagagtaactacagttatccccaggtacctgggagctaccccatgcagccagtcactgcacctccatcctaccctcctaccagctattcctctacacagccgactagttatgatcagagcagttactctcagcagaacacctatgggcaaccgagcagctatggacagcagagtagctatggtcaacaaagcagctatgggcagcagcctcccactagttacccaccccaaactggatcctacagccaagctccaagtcaatatagccaacagagcagcagctacgggcagcagagttcattccgacaggaccaccccagtagcatgggtgtttatgggcaggagtctggaggattttccggaccaggagagaaccggagcatgagtggccctgataaccggggcaggggaagagggggatttgatcgtggaggcatgagcagaggtgggcggggaggaggacgcggtggaatgggcagcgctggagagcgaggtggcttcaataagcctggtggacccatggatgaaggaccagatcttgatctaggcccacctgtagatccagatgaagactctgacaacagtgcaatttatgtacaaggattaaatgacagtgtgactctagatgatctggcagacttctttaagcagtgtggggttgttaagatgaacaagagaactgggcaacccatgatccacatctacctggacaaggaaacaggaaagcccaaaggcgatgccacagtgtcctatgaagacccacccactgccaaggctgccgtggaatggtttgatgggaaagattttcaagggagcaaacttaaagtctcccttgctcggaagaagcctccaatgaacagtatgcggggtggtctgccaccccgtgagggcagaggcatgccaccaccactccgtggaggtccaggaggcccaggaggtcctgggggacccatgggtcgcatgggaggccgtggaggagatagaggaggcttccctccaagaggaccccggggttcccgagggaacccctctggaggaggaaacgtccagcaccgagctggagactggcagtgtcccaatccgggttgtggaaaccagaacttcgcctggagaacagagtgcaaccagtgtaaggccccaaagcctgaaggcttcctcccgccaccctttccgcccccgggtggtgatcgtggcagaggtggccctggtggcatgcggggaggaagaggtggcctcatggatcgtggtggtcccggtggaatgttcagaggtggccgtggtggagacagaggtggcttccgtggtggccggggcatggaccgaggtggctttggtggaggaagacgaggtggccctggggggccccctggacctttgatggaacagatgggaggaagaagaggaggacgtggaggacctggaaaaatggataaaggcgagcaccgtcaggagcgcagagatcggccctactagatgcagagaccccgcagagctgcattgactaccagatttattttttaaaccagaaaatgttttaaatttataattccatatttataatgttggccacaacattatgattattccttgtctgtactttagtatttttcaccatttgtgaagaaacattaaaacaagttaaatggta

SEQ ID NO: 356928 - DNA, 3891 bp, Homo sapiens
tggcgaattcggcacgagggggagacggacgttgagagaacgaggaggaaggagagaaaatggcgtccacggattacagtacctatagccaagctgcagcgcagcagggctacagtgcttacaccgcccagcccactcaaggatatgcacagaccacccaggcatatgggcaacaaagctatggaacctatggacagcccactgatgtcagctatacccaggctcagaccactgcaacctatgggcagaccgcctatgcaacttcttatggacagcctcccactggttatactactccaactgccccccaggcatacagccagcctgtccaggggtatggcactggtgcttatgataccaccactgctacagtcaccaccacccaggcctcctatgcagctcagtctgcatatggcactcagcctgcttatccagcctatgggcagcagccagcagccactgcacctacaagaccgcaggatggaaacaagcccactgagactagtcaacctcaatctagcacagggggttacaaccagcccagcctaggatatggacagagtaactacagttatccccaggtacctgggagctaccccatgcagccagtcactgcacctccatcctaccctcctaccagctattcctctacacagccgactagttatgatcagagcagttactctcagcagaacacctatgggcaaccgagcagctatggacagcagagtagctatggtcaacaaagcagctatgggcagcagcctcccactagttacccaccccaaactggatcctacagccaagctccaagtcaatatagccaacagagcagcagctacgggcagcagagttcattccgacaggaccaccccagtagcatgggtgtttatgggcaggagtctggaggattttccggaccaggagagaaccggagcatgagtggccctgataaccggggcaggggaagagggggatttgatcgtggaggcatgagcagaggtgggcggggaggaggacgcggtggaatggggttacaaagtgagagccttgtatacacttcaatacttaaaaagtacccgtactcagtactcagccggcagcataatgaaaagtgggactagacacggtgtccatatggagaggaaaaatatacatagaatatttttaacaaaatgtattcattgtataaatggaatccttctgtaactttggtaactgcatacttgttgtttggtaatgaaccagaggaggtataatactctagaattgtgtaacattaaagtgtaaacttttgtgtttaaagagagagaacattttatggtgtgtacttttaaaaaggaaacaaagctgcatgcaacagcttgaaattgtatattcaggtattaaaggtgcaatactggttagaaaaaactcagggcctcccactggggagctgcctttatttaattttaaagaaaacaaaatctaacccaaaaagtccaattcatatttccctctcccctctttaagtaattttacatggccatagtcattattctaactgatatgtctataaagttgcacccccagtccgttgagccttggtatttgttgtaaattctcctttcacagcgattgttaaatctattcgtgccctgagatgtatggctttatgctgaagattggctggatgcgtcctctgatgtgtgttgtaggaatttaatgtggttgtctcctgcttttattatactgtgacttgttaggaaaccctgggcctcatttggctctcccttgggagaggttgagggtgcacctttatgaacatggaaaggtttatcacagcagttaacccccacttgctcctcccctctataccaagctcttctggtttttcacctgacggggtgggtgtttgggatctattttttcttgctaatttgccaagtattgcactattaataccagcccccgaaatgaaaggaaccaaccacactggtgtgtacaatcagacaagcaaggttgtatattgaggaaatttgagcaagctgccctgaagaaaggcatagtgacaagatgagagagatgcattgtttggagatgtgtttagccagtgcccttcttccccacgagcccccccaaggctcagagcggtactggcttttaaagggaaaggccttcatttcttcgtttatccccccagcagcgctggagagcgaggtggcttcaataagcctggtggtaagtttttgagtattaccatagatagtgtttaaaaaaaaatgcagtcagtttttagaaaactataatttttttattagtttcataagtggtttaaaaatgatctatacaaaagagactaatgggtactgccggcattgtcttaggggttaataaggttaacctatggttacaaaacaaagggtaacttgaagtattgagtaactgcttctgtaatatgggggagaataaatttttaaatttggtttatttagaggaaaaattttgacttaaatttaacactgatttggcacataagcattgagagtgtatttggttaatggtttagaagcaaaccagcaaaggaaaaaagcaaaccctagcaaacctttcacaaatgttaaagagacactgctccattttagcagtgcgggtcattttgagtttaatgaatccccatcaaatggtggtatagtagatagctatgtgtgtttgtaaggtttgtagcttgcaagacgtgcactaataatattttatatgatctttcctggttggcaggacccatggatgaaggaccagatcttgatctaggcccacctgtagatccagatgaagactctgacaacagtgcaatttatgtacaaggattaaatgacagtgtgactctagatgatctggcagacttctttaagcagtgtggggttgttaagatgaacaagagaactgggcaacccatgatccacatctacctggacaaggaaacaggaaagcccaaaggcgatgccacagtgtcctatgaagacccacccactgccaaggctgccgtggaatggtttgatgggaaagattttcaagggagcaaacttaaagtctcccttgctcggaagaagcctccaatgaacagtatgcggggtggtctgccaccccgtgagggcagaggcatgccaccaccactccgtggaggtccaggaggcccaggaggtcctgggggacccatgggtcgcatgggaggccgtggaggagatagaggaggcttccctccaagaggaccccggggttcccgagggaacccctctggaggaggaaacgtccagcaccgagctggagactggcagtgtcccaatccgggttgtggaaaccagaacttcgcctggagaacagagtgcaaccagtgtaaggccccaaagcctgaaggcttcctcccgccaccctttccgcccccgggtggtgatcgtggcagaggtggccctggtggcatgcggggaggaagaggtggcctcatggatcgtggtggtcccggtggaatgttcagaggtggccgtggtggagacagaggtggcttccgtggtggccggggcatggaccgaggtggctttggtggaggaagacgaggtggccctggggggccccctggacctttgatggaacagatgggaggaagaagaggaggacgtggaggacctggaaaaatggataaaggcgagcaccgtcaggagcgcagagatcggccctactagatgcagagaccccgcagagctgcattgactaccagatttattttttaaaccagaaaatgttttaaatttataattccatatttataatgttggccacaacattatgattattccttgtctgtactttagtatttttcaccatttgtgaagaaacattaaaacaagttaaatggta

SEQ ID NO: 356929 - DNA, 2381 bp, Homo sapiens
tggcgaattcggcacgagggggagacggacgttgagagaacgaggaggaaggagagaaaatggcgtccacggattacagtacctatagccaagctgcagcgcagcagggctacagtgcttacaccgcccagcccactcaaggatatgcacagaccacccaggcatatgggcaacaaagctatggaacctatggacagcccactgatgtcagctatacccaggctcagaccactgcaacctatgggcagaccgcctatgcaacttcttatggacagcctcccactggttatactactccaactgccccccaggcatacagccagcctgtccaggggtatggcactggtgcttatgataccaccactgctacagtcaccaccacccaggcctcctatgcagctcagtctgcatatggcactcagcctgcttatccagcctatgggcagcagccagcagccactgcacctacaagaccgcaggatggaaacaagcccactgagactagtcaacctcaatctagcacagggggttacaaccagcccagcctaggatatggacagagtaactacagttatccccaggtacctgggagctaccccatgcagccagtcactgcacctccatcctaccctcctaccagctattcctctacacagccgactagttatgatcagagcagttactctcagcagaacacctatgggcaaccgagcagctatggacagcagagtagctatggtcaacaaagcagctatgggcagcagcctcccactagttacccaccccaaactggatcctacagccaagctccaagtcaatatagccaacagagcagcagctacgggcagcagagttcattccgacaggaccaccccagtagcatgggtgtttatgggcaggagtctggaggattttccggaccaggagagaaccggagcatgagtggccctgataaccggggcaggggaagagggggatttgatcgtggaggcatgagcagaggtgggcggggaggaggacgcggtggaatgggcagcgctggagagcgaggtggcttcaataagcctggtggacccatggatgaaggaccagatcttgatctaggcccacctgtagatccagatgaagactctgacaacagtgcaatttatgtacaaggattaaatgacagtgtgactctagatgatctggcagacttctttaagcagtgtggggttgttaagatgaacaagagaactgggcaacccatgatccacatctacctggacaaggaaacaggaaagcccaaaggcgatgccacagtgtcctatgaagacccacccactgccaaggctgccgtggaatggtttgatgggaaagattttcaagggagcaaacttaaagtctcccttgctcggaagaagcctccaatgaacagtatgcggggtggtctgccaccccgtgagggcagaggcatgccaccaccactccgtggaggtccaggaggcccaggaggtcctgggggacccatgggtcgcatgggaggccgtggaggagatagaggaggcttccctccaagaggaccccggggttcccgagggaacccctctggaggaggaaacgtccagcaccgagctggagactggcagtgtcccaatccgggttgtggaaaccagaacttcgcctggagaacagagtgcaaccagtgtaaggccccaaagcctgaaggcttcctcccgccaccctttccgcccccgggtggtgatcgtggcagaggtggccctggtggcatgcggggaggaagaggtggcctcatggatcgtggtggtcccggtggaatgttcagaggtggccgtggtggagacagaggtggcttccgtggtggccggggcatggaccgaggtggctttggtggaggaagacgaggtggccctggggggccccctggacctttgatggaacagatgggaggaagaagaggaggacgtggaggacctggaaaaatggataaaggcgagcaccgtcaggagcgcagagatcggccctactagatgcagagaccccgcagagctgcattgactaccagatttattttttaaaccagaaaatgttttaaatttataattccatatttataatgttggccacaacattatgattattccttgtctgtactttagtatttttcaccatttgtgaagaaacattaaaacaagttaaatggtagtgtgcggagtttttttttcttccttcttttaaaaatggttgtttaagactttaacaatgggaaccccttgtgagcatgctcagtatcattgtggagaaccaagagggcctcttaactgtaacaatgttcatggttgtgatgtttttttttttttttaaataaaattccaaatgtt

SEQ ID NO: 356930 - DNA, 2604 bp, Homo sapiens
tggcgaattcggcacgagggggagacggacgttgagagaacgaggaggaaggagagaaaatggcgtccacggattacagtacctatagccaagctgcagcgcagcagggctacagtgcttacaccgcccagcccactcaaggatatgcacagaccacccaggcatatgggcaacaaagctatggaacctatggacagcccactgatgtcagctatacccaggctcagaccactgcaacctatgggcagaccgcctatgcaacttcttatggacagcctcccactggttatactactccaactgccccccaggcatacagccagcctgtccaggggtatggcactggtgcttatgataccaccactgctacagtcaccaccacccaggcctcctatgcagctcagtctgcatatggcactcagcctgcttatccagcctatgggcagcagccagcagccactgcacctacaagaccgcaggatggaaacaagcccactgagactagtcaacctcaatctagcacagggggttacaaccagcccagcctaggatatggacagagtaactacagttatccccaggtacctgggagctaccccatgcagccagtcactgcacctccatcctaccctcctaccagctattcctctacacagccgactagttatgatcagagcagttactctcagcagaacacctatgggcaaccgagcagctatggacagcagagtagctatggtcaacaaagcagctatgggcagcagcctcccactagttacccaccccaaactggatcctacagccaagctccaagtcaatatagccaacagagcagcagctacgggcagcagagttcattccgacaggaccaccccagtagcatgggtgtttatgggcaggagtctggaggattttccggaccaggagagaaccggagcatgagtggccctgataaccggggcaggggaagagggggatttgatcgtggaggcatgagcagaggtgggcggggaggaggacgcggtggaatgggcagcgctggagagcgaggtggcttcaataagcctggtggacccatggatgaaggaccagatcttgatctaggcccacctgtagatccagatgaagactctgacaacagtgcaatttatgtacaaggattaaatgacagtgtgactctagatgatctggcagacttctttaagcagtgtggggttgttaagatgaacaagagaactgggcaacccatgatccacatctacctggacaaggaaacaggaaagcccaaaggcgatgccacagtgtcctatgaagacccacccactgccaaggctgccgtggaatggtttgatgggaaagattttcaagggagcaaacttaaagtctcccttgctcggaagaagcctccaatgaacagtatgcggggtggtctgccaccccgtgagggcagaggcatgccaccaccactccgtggaggtccaggaggcccaggaggtcctgggggacccatgggtcgcatgggaggccgtggaggagatagaggaggcttccctccaagaggaccccggggttcccgagggaacccctctggaggaggaaacgtccagcaccgagctggagactggcagtgtcccaatccgggttgtggaaaccagaacttcgcctggagaacagagtgcaaccagtgtaaggccccaaagcctgaaggcttcctcccgccaccctttccgcccccgggtggtgatcgtggcagaggtggccctggtggcatgcggggaggaagaggtggcctcatggatcgtggtggtcccggtggaatgttcagaggtggccgtggtggagacagaggtggcttccgtggtggccggggcatggaccgaggtggctttggtggaggaagacgaggtggccctggggggccccctggacctttgatggaacagatgggaggaagaagaggaggacgtggaggacctggaaaaatggataaaggcgagcaccgtcaggagcgcagagatcggccctactagatgcagagaccccgcagagctgcattgactaccagatttattttttaaaccagaaaatgttttaaatttataattccatatttataatgttggccacaacattatgattattccttgtctgtactttagtatttttcaccatttgtgaagaaacattaaaacaagttaaatggtagtgtgcggagtttttttttcttccttcttttaaaaatggttgtttaagactttaacaatgggaaccccttgtgagcatgctcagtatcattgtggagaaccaagagggcctcttaactgtaacaatgttcatggttgtgatgttttttttttttaaataaaattccaaaaaacaagcaataaaacacacaacaacggtgtggcggggcggaggcacctcggaaaagtttttacacccactcgtggggcgcgggcgccagtgtaggtggaccgggccaagggttcgcaaggagaaccggcgcagcacagggggtgcttcccaccataaaaaagccggcggcgccccggcttggaacactccagagggtcgggccaggctttaacacgagtccaggagaag

SEQ ID NO: 356931 - DNA, 2134 bp, Homo sapiens
tggcgaattcggcacgagggggagacggacgttgagagaacgaggaggaaggagagaaaatggcgtccacggattacagtacctatagccaagctgcagcgcagcagggctacagtgcttacaccgcccagcccactcaaggatatgcacagaccacccaggcatatgggcaacaaagctatggaacctatggacagcccactgatgtcagctatacccaggctcagaccactgcaacctatgggcagaccgcctatgcaacttcttatggacagcctcccactggttatactactccaactgccccccaggcatacagccagcctgtccaggggtatggcactggtgcttatgataccaccactgctacagtcaccaccacccaggcctcctatgcagctcagtctgcatatggcactcagcctgcttatccagcctatgggcagcagccagcagccactgcacctacaagaccgcaggatggaaacaagcccactgagactagtcaacctcaatctagcacagggggttacaaccagcccagcctaggatatggacagagtaactacagttatccccaggtacctgggagctaccccatgcagccagtcactgcacctccatcctaccctcctaccagctattcctctacacagccgactagttatgatcagagcagttactctcagcagaacacctatgggcaaccgagcagctatggacagcagagtagctatggtcaacaaagcagctatgggcagcagcctcccactagttacccaccccaaactggatcctacagccaagctccaagtcaatatagccaacagagcagcagctacgggcagcagagttcattccgacaggaccaccccagtagcatgggtgtttatgggcaggagtctggaggattttccggaccaggagagaaccggagcatgagtggccctgataaccggggcaggggaagagggggatttgatcgtggaggcatgagcaggacccatggatgaaggaccagatcttgatctaggcccacctgtagatccagatgaagactctgacaacagtgcaatttatgtacaaggattaaatgacagtgtgactctagatgatctggcagacttctttaagcagtgtggggttgttaagatgaacaagagaactgggcaacccatgatccacatctacctggacaaggaaacaggaaagcccaaaggcgatgccacagtgtcctatgaagacccacccactgccaaggctgccgtggaatggtttgatgggaaagattttcaagggagcaaacttaaagtctcccttgctcggaagaagcctccaatgaacagtatgcggggtggtctgccaccccgtgagggcagaggcatgccaccaccactccgtggaggtccaggaggcccaggaggtcctgggggacccatgggtcgcatgggaggccgtggaggagatagaggaggcttccctccaagaggaccccggggttcccgagggaacccctctggaggaggaaacgtccagcaccgagctggagactggcagtgtcccaatccgggttgtggaaaccagaacttcgcctggagaacagagtgcaaccagtgtaaggccccaaagcctgaaggcttcctcccgccaccctttccgcccccgggtggtgatcgtggcagaggtggccctggtggcatgcggggaggaagaggtggcctcatggatcgtggtggtcccggtggaatgttcagaggtggccgtggtggagacagaggtggcttccgtggtggccggggcatggaccgaggtggctttggtggaggaagacgaggtggccctggggggccccctggacctttgatggaacagatgggaggaagaagaggaggacgtggaggacctggaaaaatggataaaggcgagcaccgtcaggagcgcagagatcggccctactagatgcagagaccccgcagagctgcattgactaccagatttattttttaaaccagaaaatgttttaaatttataattccatatttataatgttggccacaacattatgattattccttgtctgtactttagtatttttcaccatttgtgaagaaacattaaaacaagttaaatggta

SEQ ID NO: 356932 - DNA, 2534 bp, Homo sapiens
tggcgaattcggcacgagggggagacggacgttgagagaacgaggaggaaggagagaaaatggcgtccacggattacagtacctatagccaagctgcagcgcagcagggctacagtgcttacaccgcccagcccactcaaggatatgcacagaccacccaggcatatgggcaacaaagctatggaacctatggacagcccactgatgtcagctatacccaggctcagaccactgcaacctatgggcagaccgcctatgcaacttcttatggacagcctcccactggttatactactccaactgccccccaggcatacagccagcctgtccaggggtatggcactggtgcttatgataccaccactgctacagtcaccaccacccaggcctcctatgcagctcagtctgcatatggcactcagcctgcttatccagcctatgggcagcagccagcagccactgcacctacaagaccgcaggatggaaacaagcccactgagactagtcaacctcaatctagcacagggggttacaaccagcccagcctaggatatggacagagtaactacagttatccccaggtacctgggagctaccccatgcagccagtcactgcacctccatcctaccctcctaccagctattcctctacacagccgactagttatgatcagagcagttactctcagcagaacacctatgggcaaccgagcagctatggacagcagagtagctatggtcaacaaagcagctatgggcagcagcctcccactagttacccaccccaaactggatcctacagccaagctccaagtcaatatagccaacagagcagcagctacgggcagcagagttcattccgacaggaccaccccagtagcatgggtgtttatgggcaggagtctggaggattttccggaccaggagagaaccggagcatgagtggccctgataaccggggcaggggaagagggggatttgatcgtggaggcatgagcagaggtgggcggggaggaggacgcggtggaatgggcagcgctggagagcgaggtggcttcaataagcctggtggacccatggatgaaggaccagatcttgatctaggcccacctgtagatccagatgaagactctgacaacagtgcaatttatgtacaaggattaaatgacagtgtgactctagatgatctggcagacttctttaagcagtgtggggttgttaagatgaacaagagaactgggcaacccatgatccacatctacctggacaaggaaacaggaaagcccaaaggcgatgccacagtgtcctatgaagacccacccactgccaaggctgccgtggaatggtttgatgggaaagattttcaagggagcaaacttaaagtctcccttgctcggaagaagcctccaatgaacagtatgcggggtggtctgccaccccgtgagggcagaggcatgccaccaccactccgtggaggtccaggaggcccaggaggtcctgggggacccatgggtcgcatgggaggccgtggaggagatagaggaggcttccctccaagaggaccccggggttcccgagggaacccctctggaggaggaaacgtccagcaccgagctggagactggcagtgtcccaatccgggttgtggaaaccagaacttcgcctggagaacagagtgcaaccagtgtaaggccccaaagcctgaaggcttcctcccgccaccctttccgcccccgggtggtgatcgtggcagaggtggccctggtggcatgcggggaggaagaggtggcctcatggatcgtggtggtcccggtggaatgttcagaggtggccgtggtggagacagaggtggcttccgtggtggccggggcatggaccgaggtggctttggtggaggaagacgaggtggccctggggggccccctggacctttgatggaacagatgggaggaagaagaggaggacgtggaggacctggaaaaatggataaaggcgagcaccgtcaggagcgcagagatcggccctactagatgcagagaccccgcagagctgcattgactaccagatttattttttaaaccagaaaatgttttaaatttataattccatatttataatgttggccacaacattatgattattccttgtctgtactttagtatttttcaccatttgtgaagaaacattaaaacaagttaaatggtagaaaaaaaaaaaaaaaaaaaaaaaaaaatttttggggggtttgggcctttgggaaggtttttaaacacatttgggttgggcgggggggcccattatggttacgtggagccttgtgggcaataaggtgtccctaagggaaactcggggccaattgacactatggcgttggattttttacgcaattaaaaaaaaggcgcgggggaaaccgcggagttttctggaaccaaatttcccaaatggggatttcggggaggctccaaagcggggttctttcacgcggggaggtcccaggggactccgaactctatttagcggggccgcgtgagatg

SEQ ID NO: 356933 - DNA, 2183 bp, Homo sapiens
  misc_feature (2097)..(2097): n is a, c, g, or t
  misc_feature (2109)..(2109): n is a, c, g, or t
  misc_feature (2113)..(2113): n is a, c, g, or t
tggcgaattcggcacgagggggagacggacgttgagagaacgaggaggaaggagagaaaatggcgtccacggattacagtacctatagccaagctgcagcgcagcagggctacagtgcttacaccgcccagcccactcaaggatatgcacagaccacccaggcatatgggcaacaaagctatggaacctatggacagcccactgatgtcagctatacccaggctcagaccactgcaacctatgggcagaccgcctatgcaacttcttatggacagcctcccactggttatactactccaactgccccccaggcatacagccagcctgtccaggggtatggcactggtgcttatgataccaccactgctacagtcaccaccacccaggcctcctatgcagctcagtctgcatatggcactcagcctgcttatccagcctatgggcagcagccagcagccactgcacctacaagaccgcaggatggaaacaagcccactgagactagtcaacctcaatctagcacagggggttacaaccagcccagcctaggatatggacagagtaactacagttatccccaggtacctgggagctaccccatgcagccagtcactgcacctccatcctaccctcctaccagctattcctctacacagccgactagttatgatcagagcagttactctcagcagaacacctatgggcaaccgagcagctatggacagcagagtagctatggtcaacaaagcagctatgggcagcagcctcccactagttacccaccccaaactggatcctacagccaagctccaagtcaatatagccaacagagcagcagctacgggcagcagagttcattccgacaggaccaccccagtagcatgggtgtttatgggcaggagtctggaggattttccggaccaggagagaaccggagcatgagtggccctgataaccggggcaggggaagagggggatttgatcgtggaggcatgagcagaggtgggcggggaggaggacgcggtggaatgggcagcgctggagagcgaggtggcttcaataagcctggtggacccatggatgaaggaccagatcttgatctaggcccacctgtagatccagatgaagactctgacaacagtgcaatttatgtacaaggattaaatgacagtgtgactctagatgatctggcagacttctttaagcagtgtggggttgttaagatgaacaagagaactgggcaacccatgatccacatctacctggacaaggaaacaggaaagcccaaaggcgatgccacagtgtcctatgaagacccacccactgccaaggctgccgtggaatggtttgatgggaaagattttcaagggagcaaacttaaagtctcccttgctcggaagaagcctccaatgaacagtatgcggggtggtctgccaccccgtgagggcagaggcatgccaccaccactccgtggaggtccaggaggcccaggaggtcctgggggacccatgggtcgcatgggaggccgtggaggagatagaggaggcttccctccaagaggaccccggggttcccgagggaacccctctggaggaggaaacgtccagcaccgagctggagactggcagtgtcccaatccgggttgtggaaaccagaacttcgcctggagaacagagtgcaaccagtgtaaggccccaaagcctgaaggcttcctcccgccaccctttccgcccccgggtggtgatcgtggcagaggtggccctggtggcatgcggggaggaagaggtggcctcatggatcgtggtggtcccggtggaatgttcagaggtggccgtggtggagacagaggtggcttccgtggtggccggggcatggaccgaggtggctttggtggaggaagacgaggtggccctggggggccccctggacctttgatggaacagatgggaggaagaagaggaggacgtggaggacctggaaaaatggataaaggcgagcaccgtcaggagcgcagagatcggccctactagatgcagagaccccgcagagctgcattgactaccagatttattttttaaaccagaaaatgttttaatnttattcctattntatngtggcccacttttatattctggtctgtcttagtatttcccttgtgaggcacttaaccgttctggacaccc

SEQ ID NO: 356934 - DNA, 2154 bp, Homo sapiens
tggcgaattcggcacgagggggagacggacgttgagagaacgaggaggaaggagagaaaatggcgtccacggattacagtacctatagccaagctgcagcgcagcagggctacagtgcttacaccgcccagcccactcaaggatatgcacagaccacccaggcatatgggcaacaaagctatggaacctatggacagcccactgatgtcagctatacccaggctcagaccactgcaacctatgggcagaccgcctatgcaacttcttatggacagcctcccactggttatactactccaactgccccccaggcatacagccagcctgtccaggggtatggcactggtgcttatgataccaccactgctacagtcaccaccacccaggcctcctatgcagctcagtctgcatatggcactcagcctgcttatccagcctatgggcagcagccagcagccactgcacctacaagaccgcaggatggaaacaagcccactgagactagtcaacctcaatctagcacagggggttacaaccagcccagcctaggatatggacagagtaactacagttatccccaggtacctgggagctaccccatgcagccagtcactgcacctccatcctaccctcctaccagctattcctctacacagccgactagttatgatcagagcagttactctcagcagaacacctatgggcaaccgagcagctatggacagcagagtagctatggtcaacaaagcagctatgggcagcagcctcccactagttacccaccccaaactggatcctacagccaagctccaagtcaatatagccaacagagcagcagctacgggcagcagagttcattccgacaggaccaccccagtagcatgggtgtttatgggcaggagtctggaggattttccggaccaggagagaaccggagcatgagtggccctgataaccggggcaggggaagagggggatttgatcgtggaggcatgagcagaggtgggcggggaggaggacgcggtggaatgggcagcgctggagagcgaggtggcttcaataagcctggtggacccatggatgaaggaccagatcttgatctaggcccacctgtagatccagatgaagactctgacaacagtgcaatttatgtacaaggattaaatgacagtgtgactctagatgatctggcagacttctttaagcagtgtggggttgttaagatgaacaagagaactgggcaacccatgatccacatctacctggacaaggaaacaggaaagcccaaaggcgatgccacagtgtcctatgaagacccacccactgccaaggctgccgtggaatggtttgatgggaaagattttcaagggagcaaacttaaagtctcccttgctcggaagaagcctccaatgaacagtatgcggggtggtctgccaccccgtgagggcagaggcatgccaccaccactccgtggaggtccaggaggcccaggaggtcctgggggacccatgggtcgcatgggaggccgtggaggagatagaggaggcttccctccaagaggaccccggggttcccgagggaacccctctggaggaggaaacgtccagcaccgagctggagactggcagtgtcccaatccgggttgtggaaaccagaacttcgcctggagaacagagtgcaaccagtgtggtgatcgtggcagaggtggccctggtggcatgcggggaggaagaggtggcctcatggatcgtggtggtcccggtggaatgttcagaggtggccgtggtggagacagaggtggcttccgtggtggccggggcatggaccgaggtggctttggtggaggaagacgaggtggccctggggggccccctggacctttgatggaacagatgggaggaagaagaggaggacgtggaggacctggaaaaatggataaaggcgagcaccgtcaggagcgcagagatcggccctactagatgcagagaccccgcagagctgcattgactaccagatttattttttaaaccagaaaatgttttaaatttataattccatatttataatgttggccacaacattatgattattccttgtctgtactttagtatttttcaccatttgtgaagaaacattaaaacaagttaaatggta

SEQ ID NO: 356935 - DNA, 2193 bp, Homo sapiens
tggcgaattcggcacgagggggagacggacgttgagagaacgaggaggaaggagagaaaatggcgtccacggattacagtacctatagccaagctgcagcgcagcagggctacagtgcttacaccgcccagcccactcaaggatatgcacagaccacccaggcatatgggcaacaaagctatggaacctatggacagcccactgatgtcagctatacccaggctcagaccactgcaacctatgggcagaccgcctatgcaacttcttatggacagcctcccactggttatactactccaactgccccccaggcatacagccagcctgtccaggggtatggcactggtgcttatgataccaccactgctacagtcaccaccacccaggcctcctatgcagctcagtctgcatatggcactcagcctgcttatccagcctatgggcagcagccagcagccactgcacctacaagaccgcaggatggaaacaagcccactgagactagtcaacctcaatctagcacagggggttacaaccagcccagcctaggatatggacagagtaactacagttatccccaggtacctgggagctaccccatgcagccagtcactgcacctccatcctaccctcctaccagctattcctctacacagccgactagttatgatcagagcagttactctcagcagaacacctatgggcaaccgagcagctatggacagcagagtagctatggtcaacaaagcagctatgggcagcagcctcccactagttacccaccccaaactggatcctacagccaagctccaagtcaatatagccaacagagcagcagctacgggcagcagagttcattccgacaggaccaccccagtagcatgggtgtttatgggcaggagtctggaggattttccggaccaggagagaaccggagcatgagtggccctgataaccggggcaggggaagagggggatttgatcgtggaggcatgagcagaggtgggcggggaggaggacgcggtggaatgggcagcgctggagagcgaggtggcttcaataagcctggtggacccatggatgaaggaccagatcttgatctaggcccacctgtagatccagatgaagactctgacaacagtgcaatttatgtacaaggattaaatgacagtgtgactctagatgatctggcagacttctttaagcagtgtggggttgttaagatgaacaagagaactgggcaacccatgatccacatctacctggacaaggaaacaggaaagcccaaaggcgatgccacagtgtcctatgaagacccacccactgccaaggctgccgtggaatggtttgatgggaaagattttcaagggagcaaacttaaagtctcccttgctcggaagaagcctccaatgaacagtatgcggggtggtctgccaccccgtgagggcagaggcatgccaccaccactccgtggaggtccaggaggcccaggaggtcctgggggacccatgggtcgcatgggaggccgtggaggagatagaggaggcttccctccaagaggaccccggggttcccgagggaacccctctggaggaggaaacgtccagcaccgagctggagactggcagtgtcccaatccttcaattggtgatttctgctgtgatgtaattgtatgcaggggttgtggaaaccagaacttcgcctggagaacagagtgcaaccagtgtggtgatcgtggcagaggtggccctggtggcatgcggggaggaagaggtggcctcatggatcgtggtggtcccggtggaatgttcagaggtggccgtggtggagacagaggtggcttccgtggtggccggggcatggaccgaggtggctttggtggaggaagacgaggtggccctggggggccccctggacctttgatggaacagatgggaggaagaagaggaggacgtggaggacctggaaaaatggataaaggcgagcaccgtcaggagcgcagagatcggccctactagatgcagagaccccgcagagctgcattgactaccagatttattttttaaaccagaaaatgttttaaatttataattccatatttataatgttggccacaacattatgattattccttgtctgtactttagtatttttcaccatttgtgaagaaacattaaaacaagttaaatggta

SEQ ID NO: 356936 - DNA, 2204 bp, Homo sapiens
  misc_feature (1642)..(1642): n is a, c, g, or t
  misc_feature (1647)..(1647): n is a, c, g, or t
  misc_feature (1652)..(1652): n is a, c, g, or t
  misc_feature (1655)..(1656): n is a, c, g, or t
  misc_feature (1658)..(1659): n is a, c, g, or t
  misc_feature (1661)..(1663): n is a, c, g, or t
  misc_feature (1666)..(1666): n is a, c, g, or t
tggcgaattcggcacgagggggagacggacgttgagagaacgaggaggaaggagagaaaatggcgtccacggattacagtacctatagccaagctgcagcgcagcagggctacagtgcttacaccgcccagcccactcaaggatatgcacagaccacccaggcatatgggcaacaaagctatggaacctatggacagcccactgatgtcagctatacccaggctcagaccactgcaacctatgggcagaccgcctatgcaacttcttatggacagcctcccactggttatactactccaactgccccccaggcatacagccagcctgtccaggggtatggcactggtgcttatgataccaccactgctacagtcaccaccacccaggcctcctatgcagctcagtctgcatatggcactcagcctgcttatccagcctatgggcagcagccagcagccactgcacctacaagaccgcaggatggaaacaagcccactgagactagtcaacctcaatctagcacagggggttacaaccagcccagcctaggatatggacagagtaactacagttatccccaggtacctgggagctaccccatgcagccagtcactgcacctccatcctaccctcctaccagctattcctctacacagccgactagttatgatcagagcagttactctcagcagaacacctatgggcaaccgagcagctatggacagcagagtagctatggtcaacaaagcagctatgggcagcagcctcccactagttacccaccccaaactggatcctacagccaagctccaagtcaatatagccaacagagcagcagctacgggcagcagagttcattccgacaggaccaccccagtagcatgggtgtttatgggcaggagtctggaggattttccggaccaggagagaaccggagcatgagtggccctgataaccggggcaggggaagagggggatttgatcgtggaggcatgagcagaggtgggcggggaggaggacgcggtggaatgggcagcgctggagagcgaggtggcttcaataagcctggtggacccatggatgaaggaccagatcttgatctaggcccacctgtagatccagatgaagactctgacaacagtgcaatttatgtacaaggattaaatgacagtgtgactctagatgatctggcagacttctttaagcagtgtggggttgttaagatgaacaagagaactgggcaacccatgatccacatctacctggacaaggaaacaggaaagcccaaaggcgatgccacagtgtcctatgaagacccacccactgccaaggctgccgtggaatggtttgatgggaaagattttcaagggagcaaacttaaagtctcccttgctcggaagaagcctccaatgaacagtatgcggggtggtctgccaccccgtgagggcagaggcatgccaccaccactccgtggaggtccaggaggcccaggaggtcctgggggacccatgggtcgcatgggaggccgtggaggagatagaggaggcttccctccaagaggaccccggggttcccgagggaacccctctggaggaggaaacgtccagcaccgagctggagactggcagtgtcccaatccggnttggnaaacnagnncnncnnntgnagaacagagtgcaaccagtgtaaggccccaaagcctgaaggcttcctcccgccaccctttccgcccccgggtggtgatcgtggcagaggtggccctggtggcatgcggggaggaagaggtggcctcatggatcgtggtggtcccggtggaatgttcagaggtggccgtggtggagacagaggtggcttccgtggtggccggggcatggaccgaggtggctttggtggaggaagacgaggtggccctggggggccccctggacctttgatggaacagatgggaggaagaagaggaggacgtggaggacctggaaaaatggataaaggcgagcaccgtcaggagcgcagagatcggccctactagatgcagagaccccgcagagctgcattgactaccagatttattttttaaaccagaaaatgttttaaatttataattccatatttataatgttggccacaacattatgattattccttgtctgtactttagtatttttcaccatttgtgaagaaacattaaaacaagttaaatggta

SEQ ID NO: 356937 - DNA, 2133 bp, Homo sapiens
tggcgaattcggcacgagggggagacggacgttgagagaacgaggaggaaggagagaaaatggcgtccacggattacagtacctatagccaagctgcagcgcagcagggctacagtgcttacaccgcccagcccactcaaggatatgcacagaccacccaggcatatgggcaacaaagctatggaacctatggacagcccactgatgtcagctatacccaggctcagaccactgcaacctatgggcagaccgcctatgcaacttcttatggacagcctcccactggttatactactccaactgccccccaggcatacagccagcctgtccaggggtatggcactggtgcttatgataccaccactgctacagtcaccaccacccaggcctcctatgcagctcagtctgcatatggcactcagcctgcttatccagcctatgggcagcagccagcagccactgcacctacaagaccgcaggatggaaacaagcccactgagactagtcaacctcaatctagcacagggggttacaaccagcccagcctaggatatggacagagtaactacagttatccccaggtacctgggagctaccccatgcagccagtcactgcacctccatcctaccctcctaccagctattcctctacacagccgactagttatgatcagagcagttactctcagcagaacacctatgggcaaccgagcagctatggacagcagagtagctatggtcaacaaagcagctatgggcagcagcctcccactagttacccaccccaaactggatcctacagccaagctccaagtcaatatagccaacagagcagcagctacgggcagcagagttcattccgacaggaccaccccagtagcatgggtgtttatgggcaggagtctggaggattttccggaccaggagagaaccggagcatgagtggccctgataaccggggcaggggaagagggggatttgatcgtggaggcatgagcagaggtgggcggggaggaggacgcggtggaatgggcagcgctggagagcgaggtggcttcaataagcctggtggacccatggatgaaggaccagatcttgatctaggcccacctgtagatccagatgaagactctgacaacagtgcaatttatgtacaaggattaaatgacagtgtgactctagatgatctggcagacttctttaagcagtgtggggttgttaagatgaacaagagaactgggcaacccatgatccacatctacctggacaaggaaacaggaaagcccaaaggcgatgccacagtgtcctatgaagacccacccactgccaaggctgccgtggaatggtttgatgggaaagattttcaagggagcaaacttaaagtctcccttgctcggaagaagcctccaatgaacagtatgcggggtggtctgccaccccgtgagggcagaggcatgccaccaccactccgtggaggtccaggaggcccaggaggtcctgggggacccatgggtcgcatgggaggccgtggaggagatagaggaggcttccctccaagaggaccccggggttcccgagggaacccctctggaggaggaaacgtccagcaccgagctggagactggcagtgtcccaatccgggttgtggaaaccagaacttcgcctggggtgatcgtggcagaggtggccctggtggcatgcggggaggaagaggtggcctcatggatcgtggtggtcccggtggaatgttcagaggtggccgtggtggagacagaggtggcttccgtggtggccggggcatggaccgaggtggctttggtggaggaagacgaggtggccctggggggccccctggacctttgatggaacagatgggaggaagaagaggaggacgtggaggacctggaaaaatggataaaggcgagcaccgtcaggagcgcagagatcggccctactagatgcagagaccccgcagagctgcattgactaccagatttattttttaaaccagaaaatgttttaaatttataattccatatttataatgttggccacaacattatgattattccttgtctgtactttagtatttttcaccatttgtgaagaaacattaaaacaagttaaatggta

SEQ ID NO: 356938 - DNA, 2809 bp, Homo sapiens
tggcgaattcggcacgagggggagacggacgttgagagaacgaggaggaaggagagaaaatggcgtccacggattacagtacctatagccaagctgcagcgcagcagggctacagtgcttacaccgcccagcccactcaaggatatgcacagaccacccaggcatatgggcaacaaagctatggaacctatggacagcccactgatgtcagctatacccaggctcagaccactgcaacctatgggcagaccgcctatgcaacttcttatggacagcctcccactggttatactactccaactgccccccaggcatacagccagcctgtccaggggtatggcactggtgcttatgataccaccactgctacagtcaccaccacccaggcctcctatgcagctcagtctgcatatggcactcagcctgcttatccagcctatgggcagcagccagcagccactgcacctacaagaccgcaggatggaaacaagcccactgagactagtcaacctcaatctagcacagggggttacaaccagcccagcctaggatatggacagagtaactacagttatccccaggtacctgggagctaccccatgcagccagtcactgcacctccatcctaccctcctaccagctattcctctacacagccgactagttatgatcagagcagttactctcagcagaacacctatgggcaaccgagcagctatggacagcagagtagctatggtcaacaaagcagctatgggcagcagcctcccactagttacccaccccaaactggatcctacagccaagctccaagtcaatatagccaacagagcagcagctacgggcagcagagttcattccgacaggaccaccccagtagcatgggtgtttatgggcaggagtctggaggattttccggaccaggagagaaccggagcatgagtggccctgataaccggggcaggggaagagggggatttgatcgtggaggcatgagcagaggtgggcggggaggaggacgcggtggaatgggcagcgctggagagcgaggtggcttcaataagcctggtggacccatggatgaaggaccagatcttgatctaggcccacctgtagatccagatgaagactctgacaacagtgcaatttatgtacaaggattaaatgacagtgtgactctagatgatctggcagacttctttaagcagtgtggggttgttaagatgaacaagagaactgggcaacccatgatccacatctacctggacaaggaaacaggaaagcccaaaggcgatgccacagtgtcctatgaagacccacccactgccaaggctgccgtggaatggtttgatgggaaagattttcaagggagcaaacttaaagtctcccttgctcggaagaagcctccaatgaacagtatgcggggtggtctgccaccccgtgagggcagaggcatgccaccaccactccgtggaggtccaggaggcccaggaggtcctgggggacccatgggtcgcatgggaggccgtggaggagatagaggaggcttccctccaagaggaccccggggttcccgagggaacccctctggaggaggaaacgtccagcaccgagctggagactggcagtgtcccaatccgtatgtacttgtcttggcaaattgataccctacgagtgaagccacccttccctcaccccatccccactctagagtggattgctctgtctagaggaacagaatgatgaccctgatggctggttagggacactagtcagccattcactggacgcttcagagccttctgaagattgatttgacctgtcctgtgggtgcaatgctgcctgaggctgtgccctaaagcatgggtgtacatagatcctcttgatagtgagtgtgtacctgttcacacaccacctttccttgtttatcttccttagttcaattggtgatttctgctgtgatgtaattgtatgcaggggttgtggaaaccagaacttcgcctggagaacagagtgcaaccagtgtaaggccccaaagcctgaaggcttcctcccgccaccctttccgcccccgggtaggtgcaggtttcatgagtgtcccctcagcttcctggtgctaaacctcttttcttatttgtgggcttggtaaactgcagttgccctctgcttaacaactttgagttgtcgtgtcctcatttctaaattgtcagcccgatgccgagattgagtgaagtgtctggtttgttctgctgtgagagaaggaagcagagcagcttccacagtgtccacagggcctctgcagccacccactgactgctttcgccctgctattctcaccttaggggtgatcgtggcagaggtggccctggtggcatgcggggaggaagaggtggcctcatggatcgtggtggtcccggtggaatgttcagaggtggccgtggtggagacagaggtggcttccgtggtggccggggcatggaccgaggtggctttggtggaggaagacgaggtggccctggggggccccctggacctttgatggaacagatgggaggaagaagaggaggacgtggaggacctggaaaaatggataaaggcgagcaccgtcaggagcgcagagatcggccctactagatgcagagaccccgcagagctgcattgactaccagatttattttttaaaccagaaaatgttttaaatttataattccatatttataatgttggccacaacattatgattattccttgtctgtactttagtatttttcaccatttgtgaagaaacattaaaacaagttaaatggta

SEQ ID NO: 356939 - DNA, 2653 bp, Homo sapiens
tggcgaattcggcacgagggggagacggacgttgagagaacgaggaggaaggagagaaaatggcgtccacggattacagtacctatagccaagctgcagcgcagcagggctacagtgcttacaccgcccagcccactcaaggatatgcacagaccacccaggcatatgggcaacaaagctatggaacctatggacagcccactgatgtcagctatacccaggctcagaccactgcaacctatgggcagaccgcctatgcaacttcttatggacagcctcccactggttatactactccaactgccccccaggcatacagccagcctgtccaggggtatggcactggtgcttatgataccaccactgctacagtcaccaccacccaggcctcctatgcagctcagtctgcatatggcactcagcctgcttatccagcctatgggcagcagccagcagccactgcacctacaagaccgcaggatggaaacaagcccactgagactagtcaacctcaatctagcacagggggttacaaccagcccagcctaggatatggacagagtaactacagttatccccaggtacctgggagctaccccatgcagccagtcactgcacctccatcctaccctcctaccagctattcctctacacagccgactagttatgatcagagcagttactctcagcagaacacctatgggcaaccgagcagctatggacagcagagtagctatggtcaacaaagcagctatgggcagcagcctcccactagttacccaccccaaactggatcctacagccaagctccaagtcaatatagccaacagagcagcagctacgggcagcagagttcattccgacaggaccaccccagtagcatgggtgtttatgggcaggagtctggaggattttccggaccaggagagaaccggagcatgagtggccctgataaccggggcaggggaagagggggatttgatcgtggaggcatgagcagaggtgggcggggaggaggacgcggtggaatgggcagcgctggagagcgaggtggcttcaataagcctggtggacccatggatgaaggaccagatcttgatctaggcccacctgtagatccagatgaagactctgacaacagtgcaatttatgtacaaggattaaatgacagtgtgactctagatgatctggcagacttctttaagcagtgtggggttgttaagatgaacaagagaactgggcaacccatgatccacatctacctggacaaggaaacaggaaagcccaaaggcgatgccacagtgtcctatgaagacccacccactgccaaggctgccgtggaatggtttgatgggaaagattttcaagggagcaaacttaaagtctcccttgctcggaagaagcctccaatgaacagtatgcggggtggtctgccaccccgtgagggcagaggcatgccaccaccactccgtggaggtccaggaggcccaggaggtcctgggggacccatgggtcgcatgggaggccgtggaggagatagaggaggcttccctccaagaggaccccggggttcccgagggaacccctctggaggaggaaacgtccagcaccgagctggagactggcagtgtcccaatccgggttgtggaaaccagaacttcgcctggagaacagagtgcaaccagtgtaaggccccaaagcctgaaggcttcctcccgccaccctttccgcccccgggtaggtgcaggtttcatgagtgtcccctcagcttcctggtgctaaacctcttttcttatttgtgggcttggtaaactgcagttgccctctgcttaacaactttgagttgtcgtgtcctcatttctaaattgtcagcccgatgccgagattgagtgaagtgtctggtttgttctgctgtgagagaaggaagcagagcagcttccacagtgtccacagggcctctgcagccacccactgactgctttcgccctgctattctcaccttaggcctcctatgcagctcagtctgcatatggcactcagcctgcttatccagcctatgggcagcagccagcagccactgcacctacaagaccgcaggatggaaacaagcccactgagactagtcaacctcaatctagcacagggggttacaaccagcccagcctaggatatggacagagtaactacagttatccccaggtacctgggagctaccccatgcagccagtcactgcacctccatcctaccctcctaccagctattcctctacacagccgactagttatgatcagagcagttactctcagcagaacactatgggcaaccgaggtggctttggtggaggaagacgaggtggccctggggggccccctggacctttgatggaacagatgggaggaagaagaggaggacgtggaggacctggaaaaatggataaaggcgagcaccgtcaggagcgcagagatcggccctactagatgcagagaccccgcagagctgcattgactaccagatttattttttaaaccagaaaatgttttaaatttataattccatatttataatgttggccacaacattatgattattccttgtctgtactttagtatttttcaccatttgtgaagaaacattaaaacaagttaaatggta

SEQ ID NO: 356940 - DNA, 1976 bp, Homo sapiens
tggcgaattcggcacgagggggagacggacgttgagagaacgaggaggaaggagagaaaatggcgtccacggattacagtacctatagccaagctgcagcgcagcagggctacagtgcttacaccgcccagcccactcaaggatatgcacagaccacccaggcatatgggcaacaaagctatggaacctatggacagcccactgatgtcagctatacccaggctcagaccactgcaacctatgggcagaccgcctatgcaacttcttatggacagcctcccactggttatactactccaactgccccccaggcatacagccagcctgtccaggggtatggcactggtgcttatgataccaccactgctacagtcaccaccacccaggcctcctatgcagctcagtctgcatatggcactcagcctgcttatccagcctatgggcagcagccagcagccactgcacctacaagaccgcaggatggaaacaagcccactgagactagtcaacctcaatctagcacagggggttacaaccagcccagcctaggatatggacagagtaactacagttatccccaggtacctgggagctaccccatgcagccagtcactgcacctccatcctaccctcctaccagctattcctctacacagccgactagttatgatcagagcagttactctcagcagaacacctatgggcaaccgagcagctatggacagcagagtagctatggtcaacaaagcagctatgggcagcagcctcccactagttacccaccccaaactggatcctacagccaagctccaagtcaatatagccaacagagcagcagctacgggcagcagagttcattccgacaggaccaccccagtagcatgggtgtttatgggcaggagtctggaggattttccggaccaggagagaaccggagcatgagtggccctgataaccggggcaggggaagagggggatttgatcgtggaggcatgagcagaggtgggcggggaggaggacgcggtggaatgggcagcgctggagagcgaggtggcttcaataagcctggtggacccatggatgaaggaccagatcttgatctaggcccacctgtagatccagatgaagactctgacaacagtgcaatttatgtacaaggattaaatgacagtgtgactctagatgatctggcagacttctttaagcagtgtggggttgttaagatgaacaagagaactgggcaacccatgatccacatctacctggacaaggaaacaggaaagcccaaaggcgatgccacagtgtcctatgaagacccacccactgccaaggctgccgtggaatggtttgatgggaaagattttcaagggagcaaacttaaagtctcccttgctcggaagaagcctccaatgaacagtatgcggggtggtctgccaccccgtgagggcagaggcatgccaccaccactccgtggaggtccaggaggcccaggaggtcctgggggacccatgggtcgcatgggaggccgtggaggagatagaggaggcttccctccaagaggaccccggggttcccgagggaacccctctggaggaggaaacgtccagcaccgagctggagactggcagtgtcccaatccgggttgtggaaaccagaacttcgcctggagaacagagtgcaaccagtgtggccccctggacctttgatggaacagatgggaggaagaagaggaggacgtggaggacctggaaaaatggataaaggcgagcaccgtcaggagcgcagagatcggccctactagatgcagagaccccgcagagctgcattgactaccagatttattttttaaaccagaaaatgttttaaatttataattccatatttataatgttggccacaacattatgattattccttgtctgtactttagtatttttcaccatttgtgaagaaacattaaaacaagttaaatggta

SEQ ID NO: 356941 - DNA, 3366 bp, Homo sapiens
tggcgaattcggcacgagggggagacggacgttgagagaacgaggaggaaggagagaaaatggcgtccacggattacagtacctatagccaagctgcagcgcagcagggctacagtgcttacaccgcccagcccactcaaggatatgcacagaccacccaggcatatgggcaacaaagctatggaacctatggacagcccactgatgtcagctatacccaggctcagaccactgcaacctatgggcagaccgcctatgcaacttcttatggacagcctcccactggttatactactccaactgccccccaggcatacagccagcctgtccaggggtatggcactggtgcttatgataccaccactgctacagtcaccaccacccaggcctcctatgcagctcagtctgcatatggcactcagcctgcttatccagcctatgggcagcagccagcagccactgcacctacaagaccgcaggatggaaacaagcccactgagactagtcaacctcaatctagcacagggggttacaaccagcccagcctaggatatggacagagtaactacagttatccccaggtacctgggagctaccccatgcagccagtcactgcacctccatcctaccctcctaccagctattcctctacacagccgactagttatgatcagagcagttactctcagcagaacacctatgggcaaccgagcagctatggacagcagagtagctatggtcaacaaagcagctatgggcagcagcctcccactagttacccaccccaaactggatcctacagccaagctccaagtcaatatagccaacagagcagcagctacgggcagcagagttcattccgacaggaccaccccagtagcatgggtgtttatgggcaggagtctggaggattttccggaccaggagagaaccggagcatgagtggccctgataaccggggcaggggaagagggggatttgatcgtggaggcatgagcagaggtgggcggggaggaggacgcggtggaatgggtgtggcatccagtgcccctcccctgactggcaagcgaggccggggccgcccaaggaaggccaacctgctggactcaatgtttgggtccccagggggcctgagggaggcaggcatccttccatgcggtctatgtggtaaggtgttcactgatgccaaccggctccggcagcacgaggcccagcacggtgtcaccagcctccagctgggctacatcgaccttcctcctccgaggctgggtgagaatgggctacccatctctgaagaccccgacggcccccgaaagaggagccggaccaggaagcaggtggcttgtgagatctgcggcaagatcttccgtgatgtgtatcatcttaaccggcacaagctgtcccactctggggagaagccctactcctgccctgtgtgtgggttgcggttcaagagaaaagaccgcatgtcctaccatgtgcggtcccatgatgggtccgtgggcaagccttacatctgccagagctgtgggaaaggcttctccaggcctgatcacttgaacggacatatcaagcaggtgcacacttctgagcggcctcacaagtgtcagacctgcaatgcttcttttgccacccgagaccgtctgcgctcccacctggcctgtcatgaagacaaggtgccctgccaggtgtgtgggaagtacttgcgggcagcatacatggcagaccacctgaagaagcacagcgaggggcccagcaacttctgcagtatctgtaaccgaggtctccaggcaccaggagcccatcctgaatgggggagcagcgttccactgcgccaggacctatggcaacaaagaaggccagaaatgctcacatcaggatccgattgagagctctgactcctatggtgacctctcagatgccagcgacctgaagacgccagagaagcagagtgccaatggctctttctcctgcgacatggcagtccccaaaaacaaaatggagtctgatggggagaagaagtacccatgccctgaatgtgggagcttcttccgctctaagtcctacttgaacaaacacatccagaaggtgcatgtccgggctctcgggggccccctgggggacctgggccctgcccttggctcacctttctctcctcagcagaacatgtctctcctcgagtcctttgggtttcagattgttcagtcggcatttgcgtcatctttagtagatcctgaggttgaccagcagcccatggggcctgaagggaaatgaggcagctgctgtgtccccacggaaacaaccatctggggactgctgggaaatgctgtgaatgcggagggaagtgatgtttgggttctgtagctgagagatttttattcatttttaactgccccccaaccccactccaactccttctccaccacccattctcccaatggtctttagaaatagattttcatctgatattctgcagaaatatcaatgagacttggtatgggacaggggcagaaaacactacataggcctccaaggcaaaaccagtcccagtttctttaatgggaagaagctggaattcctggtgctcaattcttagtgaccccaatcctatacccaaatctatgatattctgggacctcagtgattttggtcccctcccacttctctagttcgtcatcctcccttcccatatccttcaaaagaaccacactagggtctccacctacttatacaatgcggatgcccaactgtttttaaggaagccagaagcatcccatggaccatggggtgagtgtcctccaagagccccctgagctcagccctctgcctggagggctccagacctttctgagccctgcttggaggcgagcattttcactgctaggacaagctcagctgttgaggacacccccaccccaaatttcagttcttacgtgattttaaccattcaacatgctgttgggttttaattctctaattattattattattgttattattttttaggaccagttgtagtgaattgctactgaaagctatcccaggtgatacagagctctttgtaaaccgcagtcacacattagggttagtattaaactttgtttagatgtaccataattaacttggctagttgattgtttgaagtctatggaagaaatagttttatgcaaaattttaaaaaatgccagtctggtcagggaagtagggggtttcaatgctgttgggaaccaggaaggtgggacagccggcaggtagggacattgtgtacctcagttgtgtcacatgtgagcaagcccaggttgaccttgtgatgtgaattgatctgatcagactgtattaaaaatgttagtacattactctatctgc

SEQ ID NO: 356942 - DNA, 2049 bp, Homo sapiens
tggcgaattcggcacgagggggagacggacgttgagagaacgaggaggaaggagagaaaatggcgtccacggattacagtacctatagccaagctgcagcgcagcagggctacagtgcttacaccgcccagcccactcaaggatatgcacagaccacccaggcatatgggcaacaaagctatggaacctatggacagcccactgatgtcagctatacccaggctcagaccactgcaacctatgggcagaccgcctatgcaacttcttatggacagcctcccactggttatactactccaactgccccccaggcatacagccagcctgtccaggggtatggcactggtgcttatgataccaccactgctacagtcaccaccacccaggcctcctatgcagctcagtctgcatatggcactcagcctgcttatccagcctatgggcagcagccagcagccactgcacctacaagaccgcaggatggaaacaagcccactgagactagtcaacctcaatctagcacagggggttacaaccagcccagcctaggatatggacagagtaactacagttatccccaggtacctgggagctaccccatgcagccagtcactgcacctccatcctaccctcctaccagctattcctctacacagccgactagttatgatcagagcagttactctcagcagaacacctatgggcaaccgagcagctatggacagcagagtagctatggtcaacaaagcagctatgggcagcagcctcccactagttacccaccccaaactggatcctacagccaagctccaagtcaatatagccaacagagcagcagctacgggcagcagagttcattccgacaggaccaccccagtagcatgggtgtttatgggcaggagtctggaggattttccggaccaggagagaaccggagcatgagtggccctgataaccggggcaggggaagagggggatttgatcgtggaggcatgagcagaggtgggcggggaggaggacgcggtggaatgggcagcgctggagagcgaggtggcttcaataagcctggtggacccatggatgaaggaccagatcttgatctaggcccacctgtagatccagatgaagactctgacaacagtgcaatttatgtacaaggattaaatgacagtgtgactctagatgatctggcagacttctttaagcagtgtggggttgttaagatgaacaagagaactgggcaacccatgatccacatctacctggacaaggaaacaggaaagcccaaaggcgatgccacagtgtcctatgaagacccacccactgccaaggctgccgtggaatggtttgatgggaaagattttcaagggagcaaacttaaagtctcccttgctcggaagaagcctccaatgaacagtatgcggggtggtctgccaccccgtgagggcagaggcatgccaccaccactccgtggaggtccaggaggcccaggaggtcctgggggacccatgggtcgcatgggaggccgtggaggagatagaggaggcttccctccaagaggaccccggggttcccgagggaacccctctggaggaggaaacgtccagcaccgagctggagactggcagtgtcccaatccttcaattggtgatttctgctgtgatgtaattgtatgcaggggttgtggaaaccagaacttcgcctggagaacagagtgcaaccagtgtggtgatcgtggcagaggtggccctggtggcatgcggggaggaagaggtggcctcatggatcgtggtggtcccggtggaatgttcagaggtggccgtggtggagacagaggtggcttccgtggtggccggggcatggaccgaggtggctttggtggaggaagacgaggtggccctggggggccccctggacctttgatggaacagatgggttcgaatatcatgtctagtttattatagttgtcactgcttgttacactctcctcttgcggattcgccgtgcttgctctcttttattcttgttctcttttccctcgcccttctc

SEQ ID NO: 356943 - DNA, 1553 bp, Homo sapiens
tggcgaattcggcacgagggggagacggacgttgagagaacgaggaggaaggagagaaaatggcgtccacggattacagtacctatagccaagctgcagcgcagcagggctacagtgcttacaccgcccagcccactcaaggatatgcacagaccacccaggcatatgggcaacaaagctatggaacctatggacagcccactgatgtcagctatacccaggctcagaccactgcaacctatgggcagaccgcctatgcaacttcttatggacagcctcccactggttatactactccaactgccccccaggcatacagccagcctgtccaggggtatggcactggtgcttatgataccaccactgctacagtcaccaccacccaggcctcctatgcagctcagtctgcatatggcactcagcctgcttatccagcctatgggcagcagccagcagccactgcacctacaagaccgcaggatggaaacaagcccactgagactagtcaacctcaatctagcacagggggttacaaccagcccagcctaggatatggacagagtaactacagttatccccaggtacctgggagctaccccatgcagccagtcactgcacctccatcctaccctcctaccagctattcctctacacagccgactagttatgatcagagcagttactctcagcagaacacctatgggcaaccgagcagctatggacagcagagtagctatggtcaacaaagcagctatgggcagcagcctcccactagttacccaccccaaactggatcctacagccaagctccaagtcaatatagccaacagagcagcagctacgggcagcagagttcattccgacaggaccaccccagtagcatgggtgtttatgggcaggagtctggaggattttccggaccaggagagaaccggagcatgagtggccctgataaccggggcaggggaagagggggatttgatcgtggaggcatgagcagaggtgggcggggaggaggacgcggtggaatgggcagcgctggagagcgaggtggcttcaataagcctggtggacccatggatgaaggaccagatcttgatctaggcccacctgtagatccagatgaagactctgacaacagtgcaatttatgtacaaggattaaatgacagtgtgactctagatgatctggcagacttctttaagcagtgtggggttgttaagatgaacaagagaactgggcaacccatgatccacatctacctgggccccctggacctttgatggaacagatgggaggaagaagaggaggacgtggaggacctggaaaaatggataaaggcgagcaccgtcaggagcgcagagatcggccctactagatgcagagaccccgcagagctgcattgactaccagatttattttttaaaccagaaaatgttttaaatttataattccatatttataatgttggccacaacattatgattattccttgtctgtactttagtatttttcaccatttgtgaagaaacattaaaacaagttaaatggta

SEQ ID NO: 356944 - DNA, 2302 bp, Homo sapiens
tggcgaattcggcacgagggggagacggacgttgagagaacgaggaggaaggagagaaaatggcgtccacggattacagtacctatagccaagctgcagcgcagcagggctacagtgcttacaccgcccagcccactcaaggatatgcacagaccacccaggcatatgggcaacaaagctatggaacctatggacagcccactgatgtcagctatacccaggctcagaccactgcaacctatgggcagaccgcctatgcaacttcttatggacagcctcccactggttatactactccaactgccccccaggcatacagccagcctgtccaggggtatggcactggtgcttatgataccaccactgctacagtcaccaccacccaggcctcctatgcagctcagtctgcatatggcactcagcctgcttatccagcctatgggcagcagccagcagccactgcacctacaagaccgcaggatggaaacaagcccactgagactagtcaacctcaatctagcacagggggttacaaccagcccagcctaggatatggacagagtaactacagttatccccaggtacctgggagctaccccatgcagccagtcactgcacctccatcctaccctcctaccagctattcctctacacagccgactagttatgatcagagcagttactctcagcagaacacctatgggcaaccgagcagctatggacagcagagtagctatggtcaacaaagcagctatgggcagcagcctcccactagttacccaccccaaactggatcctacagccaagctccaagtcaatatagccaacagagcagcagctacgggcagcagagttcattccgacaggaccaccccagtagcatgggtgtttatgggcaggagtctggaggattttccggaccaggagagaaccggagcatgagtggccctgataaccggggcaggggaagagggggatttgatcgtggaggcatgagcagaggtgggcggggaggaggacgcggtggaatgggtgtggcatccagtgcccctcccctgactggcaagcgaggccggggccgcccaaggaaggccaacctgctggactcaatgtttgggtccccagggggcctgagggaggcaggcatccttccatgcggtctatgtggtaaggtgttcactgatgccaaccggctccggcagcacgaggcccagcacggtgtcaccagcctccagctgggctacatcgaccttcctcctccgaggctgggtgagaatgggctacccatctctgaagaccccgacggcccccgaaagaggagccggaccaggaagcaggtggcttgtgagatctgcggcaagatcttccgtgatgtgtatcatcttaaccggcacaagctgtcccactctggggagaagccctactcctgccctgtgtgtgggttgcggttcaagagaaaagaccgcatgtcctaccatgtgcggtcccatgatgggtccgtgggcaagccttacatctgccagagctgtgggaaaggcttctccaggcctgatcacttgaacggacatatcaagcaggtgcacacttctgagcggcctcacaagtgtcaggtgtgggttgggagcagcagcggcctgccgcccctggaacctcttcctagcgacctgccatcatgggactttgcccagcctgctttgtggaggtcgtcccattcggttcctgacaccgccttttccctttctctaaaaaaatcattcccagcccttgaaaacctgggcccagcacactccagcaacactctcttctgcccagccccgccgggatatctgaggcagggctggaccaccccagagggcagcagggcctttacccagtggcctgttggctagcctgggcctcccctggcatcacttcccataggcctggggtttctagactggggcctggccacccctttccccactccacgagtgagtcggcctccagagaagactggcacaattccaactagagtcaacccatgctgccctctgcccttcccactcagatctagatcctgctttcatttctggctagtgaagtagacttttgtgtttttgaggtttattagcaggtctgctcaggaaccaaactaatgagtagctttatattgggccaccccaatatatggctttgggggctgaaaaagcagatgtagaccccctccctcggatccttattggtgtgccctttagcactccgcagactctgcggggtgaacaggagtgatgataaaatttttcattctaacatattgaggctt

SEQ ID NO: 356945 - DNA, 2247 bp, Homo sapiens
tggcgaattcggcacgagggggagacggacgttgagagaacgaggaggaaggagagaaaatggcgtccacggattacagtacctatagccaagctgcagcgcagcagggctacagtgcttacaccgcccagcccactcaaggatatgcacagaccacccaggcatatgggcaacaaagctatggaacctatggacagcccactgatgtcagctatacccaggctcagaccactgcaacctatgggcagaccgcctatgcaacttcttatggacagcctcccactggttatactactccaactgccccccaggcatacagccagcctgtccaggggtatggcactggtgcttatgataccaccactgctacagtcaccaccacccaggcctcctatgcagctcagtctgcatatggcactcagcctgcttatccagcctatgggcagcagccagcagccactgcacctacaagaccgcaggatggaaacaagcccactgagactagtcaacctcaatctagcacagggggttacaaccagcccagcctaggatatggacagagtaactacagttatccccaggtacctgggagctaccccatgcagccagtcactgcacctccatcctaccctcctaccagctattcctctacacagccgactagttatgatcagagcagttactctcagcagaacacctatgggcaaccgagcagctatggacagcagagtagctatggtcaacaaagcagctatgggcagcagcctcccactagttacccaccccaaactggatcctacagccaagctccaagtcaatatagccaacagagcagcagctacgggcagcagagttcattccgacaggaccaccccagtagcatgggtgtttatgggcaggagtctggaggattttccggaccaggagagaaccggagcatgagtggccctgataaccggggcaggggaagagggggatttgatcgtggaggcatgagcagaggtgggcggggaggaggacgcggtggaatgggtgtggcatccagtgcccctcccctgactggcaagcgaggccggggccgcccaaggaaggccaacctgctggactcaatgtttgggtccccagggggcctgagggaggcaggcatccttccatgcggtctatgtggtaaggtgttcactgatgccaaccggctccggcagcacgaggcccagcacggtgtcaccagcctccagctgggctacatcgaccttcctcctccgaggctgggtgagaatgggctacccatctctgaagaccccgacggcccccgaaagaggagccggaccaggaagcaggtggcttgtgagatctgcggcaagatcttccgtgatgtgtatcatcttaaccggcacaagctgtcccactctggggagaagccctactcctgccctgtgtgtgggttgcggttcaagagaaaagaccgcatgtcctaccatgtgcggtcccatgatgggtccgtgggcaagccttacatctgccagagctgtgggaaaggcttctccaggcctgatcacttgaacggacatatcaagcaggtgcacacttctgagcggcctcacaagtgtcagacctgcaatgcttcttttgccacccgagaccgtctgcgctcccacctggcctgtcatgaagacaaggtgccctgccaggtgtgtgggaagtacttgcgggcagcatacatggcagaccacctgaagaagcacagcgaggggcccagcaacttctgcagtatctgtaaccgaggtaatctgcccactgtttcctcacttccagaggatgggcctgagcgtgtatgggaggcctaggggtgtctcaatcaccctgcctcagactccactctttgcacagccaccccctacttcccactgaatgataaacaccttcatcacccaactagctatttgctacctcttccttcccaagaagcttggggtgcttagaatgggaagtcccaggagaccagcaggtcaaaacagaaggagagaggttcttcccaagcttgggcccataactctcacctgctactcagatggcaggatggatgcattttgcagacaccactgaaccactgaggttggtgggggagttagtaggtcccaaagtgagagaaaaagaggttggtccggcttgagagcttttgctggttgattcactggcatatgaaattcagcagccagggaaggaggttgagtctgaaggcagtctgga

SEQ ID NO: 356946 - DNA, 1938 bp, Homo sapiens
tggcgaattcggcacgagggggagacggacgttgagagaacgaggaggaaggagagaaaatggcgtccacggattacagtacctatagccaagctgcagcgcagcagggctacagtgcttacaccgcccagcccactcaaggatatgcacagaccacccaggcatatgggcaacaaagctatggaacctatggacagcccactgatgtcagctatacccaggctcagaccactgcaacctatgggcagaccgcctatgcaacttcttatggacagcctcccactggttatactactccaactgccccccaggcatacagccagcctgtccaggggtatggcactggtgcttatgataccaccactgctacagtcaccaccacccaggcctcctatgcagctcagtctgcatatggcactcagcctgcttatccagcctatgggcagcagccagcagccactgcacctacaagaccgcaggatggaaacaagcccactgagactagtcaacctcaatctagcacagggggttacaaccagcccagcctaggatatggacagagtaactacagttatccccaggtacctgggagctaccccatgcagccagtcactgcacctccatcctaccctcctaccagctattcctctacacagccgactagttatgatcagagcagttactctcagcagaacacctatgggcaaccgagcagctatggacagcagagtagctatggtcaacaaagcagctatgggcagcagcctcccactagttacccaccccaaactggatcctacagccaagctccaagtcaatatagccaacagagcagcagctacgggcagcagagttcattccgacaggaccaccccagtagcatgggtgtttatgggcaggagtctggaggattttccggaccaggagagaaccggagcatgagtggccctgataaccggggcaggggaagagggggatttgatcgtggaggcatgagcagaggtgggcggggaggaggacgcggtggaatggggtaagagcaaaccttttctccttttacctaattttgtttcatccataggattttcagtggaaagaagggactgaaagacataagaaattaatttctgcatttccatggacaatctgttgagctcaagccatcttctaaaacatggaaatgtcatctttgtggcatatattaagtggcagtttattttctttccctgccagtatacttcgttgggtcggggagaacaaagaatggttttgaaaccagagctttcagttcccttcatggtttccagaggtgagaagcctctgtgggtagtagatttgggatggaacacacacaacccttctcccatccccttttccctatctggtgtctgtactttgatgaaggtgagctataatattggtggttaacataatccagaaggcttagttctgtgtgtgttctgtccctatataaactggtaaagaaaaaaaaaagttatgcagaatgttagatatttacatttgatacggtgtgccactattcaaggaaaaattaaatagcattttttaaaaaacagaatgaacttcaaaattaaagttgatttttaacttccatattagcaaatactcttcactactgaaagacagtactattttgcatattctgcataactttaagaaagtctttagtgaaatctttattggaagaaagtcatttgacaacaggcaaaaatttaatgattcggtatgaagtaaaatcaatcttctgatttggaaaatactctattataaaggtttcacttctttttggatgttttaaaatagacatagacacttgaaagtactatcatcacgtctcaaatcacctagaattcctagtatttttaaattgcaaatacaatttcaagtttatttaaatactccagaagttataatcct

SEQ ID NO: 356947 - DNA, 2040 bp, Homo sapiens
tggcgaattcggcacgagggggagacggacgttgagagaacgaggaggaaggagagaaaatggcgtccacggattacagtacctatagccaagctgcagcgcagcagggctacagtgcttacaccgcccagcccactcaaggatatgcacagaccacccaggcatatgggcaacaaagctatggaacctatggacagcccactgatgtcagctatacccaggctcagaccactgcaacctatgggcagaccgcctatgcaacttcttatggacagcctcccactggttatactactccaactgccccccaggcatacagccagcctgtccaggggtatggcactggtgcttatgataccaccactgctacagtcaccaccacccaggcctcctatgcagctcagtctgcatatggcactcagcctgcttatccagcctatgggcagcagccagcagccactgcacctacaagcagctattcctctacacagccgactagttatgatcagagcagttactctcagcagaacacctatgggcaaccgagcagctatggacagcagagtagctatggtcaacaaagcagctatgggcagcagcctcccactagttacccaccccaaactggatcctacagccaagctccaagtcaatatagccaacagagcagcagctacgggcagcagagttcattccgacaggaccaccccagtagcatgggtgtttatgggcaggagtctggaggattttccggaccaggagagaaccggagcatgagtggccctgataaccggggcaggggaagagggggatttgatcgtggaggcatgagcagaggtgggcggggaggaggacgcggtggaatgggcagcgctggagagcgaggtggcttcaataagcctggtggacccatggatgaaggaccagatcttgatctaggcccacctgtagatccagatgaagactctgacaacagtgcaatttatgtacaaggattaaatgacagtgtgactctagatgatctggcagacttctttaagcagtgtggggttgttaagatgaacaagagaactgggcaacccatgatccacatctacctggacaaggaaacaggaaagcccaaaggcgatgccacagtgtcctatgaagacccacccactgccaaggctgccgtggaatggtttgatgggaaagattttcaagggagcaaacttaaagtctcccttgctcggaagaagcctccaatgaacagtatgcggggtggtctgccaccccgtgagggcagaggcatgccaccaccactccgtggaggtccaggaggcccaggaggtcctgggggacccatgggtcgcatgggaggccgtggaggagatagaggaggcttccctccaagaggaccccggggttcccgagggaacccctctggaggaggaaacgtccagcaccgagctggagactggcagtgtcccaatccgggttgtggaaaccagaacttcgcctggagaacagagtgcaaccagtgtaaggccccaaagcctgaaggcttcctcccgccaccctttccgcccccgggtggtgatcgtggcagaggtggccctggtggcatgcggggaggaagaggtggcctcatggatcgtggtggtcccggtggaatgttcagaggtggccgtggtggagacagaggtggcttccgtggtggccggggcatggaccgaggtggctttggtggaggaagacgaggtggccctggggggccccctggacctttgatggaacagatgggaggaagaagaggaggacgtggaggacctggaaaaatggataaaggcgagcaccgtcaggagcgcagagatcggccctactagatgcagagaccccgcagagctgcattgactaccagatttattttttaaaccagaaaatgttttaaatttataattccatatttataatgttggccacaacattatgattattccttgtctgtactttagtatttttcaccatttgtgaagaaacattaaaacaagttaaatggta

SEQ ID NO: 356948 - DNA, 1491 bp, Homo sapiens
  misc_feature (966)..(966): n is a, c, g, or t
  misc_feature (969)..(969): n is a, c, g, or t
  misc_feature (981)..(981): n is a, c, g, or t
  misc_feature (987)..(987): n is a, c, g, or t
  misc_feature (1002)..(1002): n is a, c, g, or t
  misc_feature (1005)..(1005): n is a, c, g, or t
  misc_feature (1008)..(1008): n is a, c, g, or t
  misc_feature (1015)..(1015): n is a, c, g, or t
  misc_feature (1021)..(1021): n is a, c, g, or t
  misc_feature (1029)..(1029): n is a, c, g, or t
  misc_feature (1041)..(1041): n is a, c, g, or t
  misc_feature (1044)..(1044): n is a, c, g, or t
  misc_feature (1062)..(1062): n is a, c, g, or t
  misc_feature (1071)..(1071): n is a, c, g, or t
  misc_feature (1077)..(1077): n is a, c, g, or t
  misc_feature (1087)..(1087): n is a, c, g, or t
  misc_feature (1098)..(1099): n is a, c, g, or t
  misc_feature (1107)..(1107): n is a, c, g, or t
  misc_feature (1113)..(1113): n is a, c, g, or t
  misc_feature (1125)..(1125): n is a, c, g, or t
  misc_feature (1131)..(1131): n is a, c, g, or t
  misc_feature (1137)..(1137): n is a, c, g, or t
  misc_feature (1143)..(1143): n is a, c, g, or t
  misc_feature (1155)..(1155): n is a, c, g, or t
  misc_feature (1164)..(1164): n is a, c, g, or t
  misc_feature (1167)..(1167): n is a, c, g, or t
  misc_feature (1173)..(1173): n is a, c, g, or t
  misc_feature (1182)..(1182): n is a, c, g, or t
  misc_feature (1185)..(1185): n is a, c, g, or t
  misc_feature (1188)..(1188): n is a, c, g, or t
  misc_feature (1191)..(1191): n is a, c, g, or t
  misc_feature (1194)..(1195): n is a, c, g, or t
  misc_feature (1197)..(1197): n is a, c, g, or t
  misc_feature (1200)..(1200): n is a, c, g, or t
  misc_feature (1203)..(1203): n is a, c, g, or t
  misc_feature (1209)..(1209): n is a, c, g, or t
  misc_feature (1212)..(1212): n is a, c, g, or t
  misc_feature (1224)..(1224): n is a, c, g, or t
  misc_feature (1227)..(1227): n is a, c, g, or t
  misc_feature (1236)..(1236): n is a, c, g, or t
  misc_feature (1239)..(1239): n is a, c, g, or t
  misc_feature (1245)..(1245): n is a, c, g, or t
  misc_feature (1248)..(1248): n is a, c, g, or t
  misc_feature (1251)..(1252): n is a, c, g, or t
  misc_feature (1254)..(1254): n is a, c, g, or t
  misc_feature (1260)..(1260): n is a, c, g, or t
  misc_feature (1263)..(1264): n is a, c, g, or t
  misc_feature (1278)..(1278): n is a, c, g, or t
  misc_feature (1281)..(1281): n is a, c, g, or t
  misc_feature (1285)..(1285): n is a, c, g, or t
  misc_feature (1288)..(1288): n is a, c, g, or t
  misc_feature (1290)..(1290): n is a, c, g, or t
  misc_feature (1297)..(1299): n is a, c, g, or t
  misc_feature (1305)..(1305): n is a, c, g, or t
  misc_feature (1308)..(1308): n is a, c, g, or t
  misc_feature (1316)..(1317): n is a, c, g, or t
  misc_feature (1324)..(1324): n is a, c, g, or t
tggcgaattcggcacgagggggagacggacgttgagagaacgaggaggaaggagagaaaatggcgtccacggattacagtacctatagccaagctgcagcgcagcagggctacagtgcttacaccgcccagcccactcaaggatatgcacagaccacccaggcatatgggcaacaaagctatggaacctatggacagcccactgatgtcagctatacccaggctcagaccactgcaacctatgggcagaccgcctatgcaacttcttatggacagcctcccactggttatactactccaactgccccccaggcatacagccagcctgtccaggggtatggcactggtgcttatgataccaccactgctacagtcaccaccacccaggcctcctatgcagctcagtctgcatatggcactcagcctgcttatccagcctatgggcagcagccagcagccactgcacctacaagaccgcaggatggaaacaagcccactgagactagtcaacctcaatctagcacagggggttacaaccagcccagcctaggatatggacagagtaactacagttatccccaggtacctgggagctaccccatgcagccagtcactgcacctccatcctaccctcctaccagctattcctctacacagccgactagttatgatcagagcagttactctcagcagaacacctatgggcaaccgagcagctatggacagcagagtagctatggtcaacaaagcagctatgggcagcagcctcccactagttacccaccccaaactggatcctacagccaagctccaagtcaatatagccaacagagcagcagctacgggcagcagagtcctccccttggaggggcacaaacgatcagtaagaatacagagcaacggccccagccagatccgtatcagatcctgggcccgaccagcagtcgcctagccaaccctggagagnggncagatccagctntggcanttcctcctggagctnctntcngacagcnccaacnccagctgnatcacctggganggnaccaacggggagttcaanatgacggancccgangaggtggccnggcgctggggnnagcggaanagcaancccaacatgaantacganaagctnagccgngccctccgttantactatganaanaacatnatgaccaangtncanggnaanngntangcntacaanttngacttccacggnatngcccaggcnctncagccncanccnncngagtcntcnntgtacaagtacccntcngacntcncntacatgnnntcctancangcccaccnncagaagntgaactttgtccctccccatccatcctccatgcctgtcacttcctccagcttctttggagccgcatcacaatactggacctcccccacggggggaatctaccccaaccccaacgtcccccgccatcctaacacccacgtgccttcacacttaggcagctactactag

SEQ ID NO: 356949 - DNA, 1062 bp, Homo sapiens
tggcgaattcggcacgagggggagacggacgttgagagaacgaggaggaaggagagaaaatggcgtccacggattacagtacctatagccaagctgcagcgcagcagggctacagtgcttacaccgcccagcccactcaaggatatgcacagaccacccaggcatatgggcaacaaagctatggaacctatggacagcccactgatgtcagctatacccaggctcagaccactgcaacctatgggcagaccgcctatgcaacttcttatggacagcctcccactggttatactactccaactgccccccaggcatacagccagcctgtccaggggtatggcactggtgcttatgataccaccactgctacagtcaccaccacccaggcctcctatgcagctcagtctgcatatggcactcagcctgcttatccagcctatgggcagcagccagcagccactgcacctacaagaccgcaggatggaaacaagcccactgagactagtcaacctcaatctagcacagggggttacaaccagcccagcctaggatatggacagagtaactacagttatccccaggtacctgggagctaccccatgcagccagtcactgcacctccatcctaccctcctaccagctattcctctacacagccgactagttatgatcagagcagttactctcagcagaacacctatgggcaaccgagcagctatggacagcagagtagctatggtcaacaaagcagctatgggcagcagcctcccactagttacccaccccaaactggatcctacagccaagctccaagtcaatatagccaacagagcagcagctacgggcagcagagtgagaaaccataccagtgtgacttcaaggactgtgaacgaaggttttctcgttcagaccagctcaaaagacaccaaaggagacatacaggtgtgaaaccattccagtgtaaaacttgtcagcgaaagttctcccggtccgaccacctgaagacccacaccaggactcatacaggtaaaacaagtgaaaagcccttcagctgtcggtggc

SEQ ID NO: 356950 - DNA, 1127 bp, Homo sapiens
tggcgaattcggcacgagggggagacggacgttgagagaacgaggaggaaggagagaaaatggcgtccacggattacagtacctatagccaagctgcagcgcagcagggctacagtgcttacaccgcccagcccactcaaggatatgcacagaccacccaggcatatgggcaacaaagctatggaacctatggacagcccactgatgtcagctatacccaggctcagaccactgcaacctatgggcagaccgcctatgcaacttcttatggacagcctcccactggttatactactccaactgccccccaggcatacagccagcctgtccaggggtatggcactggtgcttatgataccaccactgctacagtcaccaccacccaggcctcctatgcagctcagtctgcatatggcactcagcctgcttatccagcctatgggcagcagccagcagccactgcacctacaagaccgcaggatggaaacaagcccactgagactagtcaacctcaatctagcacagggggttacaaccagcaccgagctggagactggcagtgtcccaatccttcaattggtgatttctgctgtgatgtaattgtatgcaggggttgtggaaaccagaacttcgcctgggagaaccagagtgcaaaccagtgggtgatcgtggcagaggtggccctggtggcatgcggggaggaagaggtggcctcatggatcgtggtggtcccggtggaatgttcagaggtggccgtggtggagacagaggtggcttccgtggtggccggggcatggaccgaggtggctttggtggaggaagacgaggtggccctggggggccccctggacctttgatggaacagatgggaggaagaagaggaggacgtggaggacctggaaaaatggataaaggcgagcaccgtcaggagcgcagagatcggccctactagatgcagagaccccgcagagctgcattgactaccagatttattttttaaaccagaaaatgttttaaatttataattccatatttataatgttggccacaacattatgattattccttgtctgtactttagtatttttcaccatttgtgaagaaacattaaaacaagttaaatggta

SEQ ID NO: 356951 - DNA, 355 bp, Homo sapiens
gcacatctccacgagagggtagtatgctgctgtacaaaagaatgagaaagttctctatatactaatgcagaaaggtctccaagatatgttgagaagtgaaaaaaacaaggtgaaaaaatgttatttgtgtaaaaaagggtacgacaagaatatatatatataatctacattttcttatatatgcatacagaatctggaaggacacacaagcaacaaataaatatcattacccgtgggaggtgggaaggttggcaagttggtgatgggaacagcagtgagaaagactccacagtgctttttaaaatatcatgtgatatgttactattaaaaaataaaattaaaacaaacaaactgc

SEQ ID NO: 356952 - DNA, 684 bp, Homo sapiens
cagtaggtacccgacactgaaactgagaggagaatgcatgaagtgaaatcatctgtttatcatcatcaaagagtttggaccacagacaactagggactcttctgcctcagttactgacaagccaaacacctgaaacactgagatcaaaccaacttgtttcttaacttctttaacttaggcccacatcttaatccacagaaaaaggaggaggagaagttactcaagaatttccacaaatagccatgatggagtaacagagattagatttgttgtcccagtttatactaccagaaaactggataaaacagatgaaacaatggcttttagatattagataccagtcagagcaggagtgggattcctgagaaaagatgaaaaaatgatgtgagtcctacatttgcctgacctcacacccttgaagcaatttacaggatgtagtgtaaagaagggagatggggcttaaacagaaccttacagtctcaaagagttgaggtcacaaagattgacacttagtggggccaaggcagccagaatttgtggactagcctaacagaaagaaactacatacagagacagtgccttggagacatgcaaaggagttcccacaagctgttaggagagtgctgatatgtcctgtgtggaaggaaaccacctgaggttggagaaaggactagcaaacaaaaa

SEQ ID NO: 356953 - DNA, 269 bp, Homo sapiens
attttttcaagaaatggttctggaataaataggtacccatgttgaaaaacaaatgaatctcaactcttacaccatctaaaacaacttgaagtagatcattaactgaatataagagctaaaatgtacagaaaaaatgtagaatattttagtgactttgggttaggcaaagatttttaaaatagggcacaaaaagcaccaactataaaaataaaaattcaataaattggacctcatcaaaatttacatttgctcttcaaaaggcactatga

SEQ ID NO: 356954 - DNA, 852 bp, Homo sapiens
tgcacacggcgagtctgggcgactgcgcacgcgcggctggttataaacaacttgtgaaatgagtgatttggaagatgatgagacaccccagctttctgcccatgccttagcagctctccaggaattttatgctgagcaaaagcaacaaattgagccaggcgaggatgataaatataacattggaataatagaagagaattggcaactgagccagttttggtatagtcaggaaactgctctgcagctggcacaggaggcaattgcagctgtaggagaaggtggcagaatcgcatgtgtgagtgcccctagtgtttaccagaaactcagagagctgtgcagagaaaacttttcgatatacatctttgaatatgacaaaagatttgccatgtatggagaggagtttattttctatgattacaataatccattggacttacccgaaagaattgctgcacatagttttgacatcgtaatagcagatcctccctatctttcggaggaatgtctcagaaaaacatcggaaaccgtcaagtacctgacgcggggcaagattctgctgtgcacaggtgccatcatggaagaacaggcagcagaactccttggagtgaagatgtgcacgtttgttccaagacacacccggaacttggcaaatgagtttcgctgttatgtgaattatgattctgggctggactgtgggatctgattacagacggtgacataacacaggaaggaaccctgtcacattcctctttttgtattttcgtagtagatttaaaagttataatctcttcccctccccccaaactggagctgtccctggcctggttttcaaaataaagtgtgcgatcttca

SEQ ID NO: 356955 - DNA, 840 bp, Homo sapiens
aacgaacacgacatgatgactgggagcaaccgcacttaagacgcgcgatcacacagtaaacccagggcgaagggagccacatgtcagacaggaaggccttccttataggggttgtggttacatggggcgtacatcacaacgtcgcactgcacacgtacgacctgcatttcattgtaagcattacctcctttttaaagttaatttaaaaacaggataaatagaattctggaaagcaagaaggaaggaactgtttgaggcagggggactcaaagatgaaaacagaatgaaaacctttggcccttttctggacgtaaattggattaaggggagaatcatccagcaatttataaaaagtatttggagaatatctaggccttacccattcatagagggagccttgctctcctgcggtttactggagtctgggatggctcctaggttaatgctctttgctctgaatcacactatcttaacctaatttcacacaagaatgaatgttgaaattacagtatggtggttttgccctaagtaaatttgataacatggaaattgagtaattttatccaaaaagagactaaccacagcccctgagaagccagctaatccctgcttatgctgcaagctaacgtgtccgcccctttgctcatgctgttccatctttctgaagtcttcactcttcatccttaccttttcctgaggccgagttgaagctccacctgctctttcactcctctccccactcaggccctccactctgatcccatggcgtgaatggtgcttctctatagagggcctccaccttaccgttggtgttcgccatgtgtctgcctaacctagaat

SEQ ID NO: 356956 - DNA, 335 bp, Homo sapiens
tggcaaaagggagtggcaatacattcgcacctgtgtttgcaagattggatattactgaaaaaggctcttggctcaacgttgggaaatgtagtttttagtaattatttttgctttccatatgtgtgtatatatatatagtacgtgtgtgtgtgtgtgtgtgtataatctgcttctaaatttctaagtgtctcggctttgcagaggtaggaaaataattcattcaataaaaaagacatggaaaaaagttggtaaattgcaaaaatattggagaaggtgaaagggaatgtaaagaacactcgctccctccccccacttgtgaattgtcaactaattgc

SEQ ID NO: 356957 - DNA, 832 bp, Homo sapiens
tgcacacggcgagtctgggcgactgcgcacgcgcggctgggagtggcgggttcgggcgcagctgtagggttggctgcgcgccgccgaggcgttttggactgggttataaacaacttgtgaaatgagtgatttggaagatgatgagacaccccagctttctgcccatgccttagcagctctccaggaattttatgctgagcaaaagcaacaaattgagccaggcgaggatgataaatataacattggaataatagaagagaattggaatcgcatgtgtgagtgcccctagtgtttaccagaaactcagagagctgtgcagagaaaacttttcgatatacatctttgaatatgacaaaagatttgccatgtatggagaggagtttattttctatgattacaataatccattggacttacccgaaagaattgctgcacatagttttgacatcgtaatagcagatcctccctatctttcggaggaatgtctcagaaaaacatcggaaaccgtcaagtacctgacgcggggcaagattctgctgtgcacaggtgccatcatggaagaacaggcagcagaactccttggagtgaagatgtgcacgtttgttccaagacacacccggaacttggcaaatgagtttcgctgttatgtgaattatgattctgggctggactgtgggatctgattacagacggtgacataacacaggaaggaaccctgtcacattcctctttttgtattttcgtagtagatttaaaagttataatctcttcccctccccccaaactggagctgtccctggcctggttttcaaaataaagtgtgcgatcttca

SEQ ID NO: 356958 - DNA, 1000 bp, Homo sapiens
tgcacacggcgagtctgggcgactgcgcacgcgcggctgggagtggcgggttcgggcgcagctgtagggttggctgcgcgccgccgaggcgttttggactgggttataaacaacttgtgaaatgagtgatttggaagatgatgagacaccccagctttctgcccatgccttagcagctctccaggaattttatgctgagcaaaagcaacaaattgagccaggcgaggatgataaatataacattggaataatagaagagaattgggtgccatcatggaagaacaggcagcagaactccttggagtgaagatgtgcacgtttgttccaagacacacccggaacttggcaaatgagtttcgctgttatgtgaattatgattctgggctggactgtgggatctgattacagacggtgacataacacaggaaggaaccctgtcacattcctctttttgtattttcgtagtagatttaaaagttataatctcttcccctccccccaaactggagctgtccctggcctggttttcaaaataaagtgtgcgatcttcacattattgtttccttagggagggcgtccctagagctcagtcttctgccaacctgaatccatggaattcgagttggaagaaaccttagaatctgcctgatcttctctcctcatttaacatgtgtaaaaacagaagaacagttgtgtggcttgcccaagggctcctgaatgagacaggaccttggcctctgcctcgggccagagcagtctggtagcatcctagggcttgtgaggaaccccacccccatgtcccaccccagccctccaaggagacagacttgcctccatgcaaaaaggcaataatccagtaactagcgtctgaatgcctcttagagctctcctcctcctccaggttctaggtgggctgcgagggatgacaggtgcccaggtgccctccctgcgtggctcagactcagcaccctccctctgaactgcctgagaaaatgaaaga

SEQ ID NO: 356959 - DNA, 962 bp, Homo sapiens
tgcacacggcgagtctgggcgactgcgcacgcgcggctggttataaacaacttgtgaaatgagtgatttggaagatgatgagacaccccagctttctgcccatgccttagcagctctccaggaattttatgctgagcaaaagcaacaaattgagccaggcgaggatgataaatataacattggaataatagaagagaattgggtaagtaaatgcatttcacagccatcaggaagtattgatgtggaacctactctgtgcattagtccagtgtttgtctgtctcacctaaaaccggaatctctgtcacctgtcatttgggatctgaacttctctatggggagctaagacagaaagcagtcagtgaacattttagaacagtgtaacagcttttcttgaacagctgttcttgattctgactatcaggctggttggtgatcagaagatggggtttttcagataaggagataatgatgcaggatttctcctcttggtcactttgcaagccggggaccctcagctggcaacacccctcctgggccttgctcggccacgctggtgtgccccagcttggctgtgttatagctcgtacccacgttcggcggttcccaagttcttctactgcgtccaagaagaatgaggatatgagggacattggagggtgaagagggtggggaagaatgttaatgaatagctgaaaacttcccaagtctagcaagagattaacacatccagatacaggaagcttagagattcccaaacagattaaattcaaaaaagcattcttcatgccacattattgtcaaactgtcagaagtcaaaagtcaaagagagaattctaaaaacagcaagacaaaagtgactagtcacttaaaagggaaacttcatcagactaacagcatattctcagcagaaatcttacatgccaggagggaatggggtgatatattcaaaatattgaaaga

SEQ ID NO: 356960 - DNA, 954 bp, Homo sapiens
tgcacacggcgagtctgggcgactgcgcacgcgcggctgggagtggcgggttcgggcgcagctgtagggttggctgcgcgccgccgaggcgttttggactgggttaggtgccttttgtgtgtttgtttctcaccttttttccagggtggtagtggtggaagagtttaattagcagtggctggcggattcctgagggaaggagctggcgccggcctgagagtggatcctggttgctgtgttaggcgctgttgggcctcgcgtcccggtcgccggaaggcgccgcgtcctgtgccgcgcacgttggcgcccgggccttaggcagccttggtgctgacggggaaattaacccccaggctacggcagcgcgtggaggcctcccttccctccgagtagaaacaggactcggcctgctgtccttttcatctttgccctcagaagttcgctgatggagtttgcgaaatgcccaggcctgactgtccgctcctggagggcgggcacccgcggcgcctgtcgctggggcttctgaggcaggtcccttgcaggatgcgggtgctgcgaggtggagtagactaggacgcgggcggctttactgcgaaacgggcagtagcttcggaggtgcagaagaagtgctgggacgatagcgggtccctaccgggagggagccacatgtcagacaggaaggccttccttataggggttgtggttacatggggcgtacatcacaacgtcgcactgcacacgtacgacctgcatttcattgctggagtgcaatggcgagatctcagctgactgcaacctccatctcctgggttcaagcgattctcctgtctcagcctcctgagtagctggcgctataggtgcctgccaccacacctgggtaatttttgtatttttagtagagacagggtttcaccatgttggccaggctgatcccgaattctttacctaaggtga

SEQ ID NO: 356961 - DNA, 456 bp, Homo sapiens
aaaaaattttttttactgccacttgtggggcagggccagccatagacagtgtgcccagagtagccagaaaaaatttaaaaataataataatataacacagtacttcccagctcttttggatttgaaaaatctcataaacccccttagaaattttaaaaacaataaagatatgataaaatagtgatttaaaaaatagttaaaaataggttcatttaatttaattttttttttttgaaatgtagtctcactcctgtcattcaggctggagtgcaatggcgagatctcagctgactgcaacctccatctcctgggttcaagcgattctcctgtctcagcctcctgagtagctggcgctataggtgcctgccaccacacctgggtaatttttgtatttttagtagagacagggtttcaccatgttggccaggctgatcccgaattctttacctaaggtga

SEQ ID NO: 356962 - DNA, 915 bp, Homo sapiens
tgcacacggcgagtctgggcgactgcgcacgcgcggctgggagtggcgggttcgggcgcagctgtagggttggctgcgcgccgccgaggcgttttggactgggttataaacaacttgtgaaatgagtgatttggaagatgatgagacaccccagctttctgcccatgccttagcagctctccaggaattttatgctgagcaaaagcaacaaattgagccaggcgaggatgataaatataacattggaataatagaagagaattggcaactgagccagttttggtatagtcaggaaactgctctgcagctggcacaggaggcaattgcagctgtaggagaaggtggcagaatcgcatgtgtgagtgcccctagtgtttaccagaaactcagagagctgtgcagagaaaacttttcgatatacatctttgaatatgacaaaagatttgccatgtatggagaggagtttattttctatgattacaataatccattggacttacccgaaagaattgctgcacatagttttgacatcgtaatagcagatcctccctatctttcggaggaatgtctcagaaaaacatcggaaaccgtcaagtacctgacgcggggcaagattctgctgtgcacaggtgccatcatggaagaacaggcagcagaactccttggagtgaagatgtgcacgtttgttccaagacacacccggaacttggcaaatgagtttcgctgttatgtgaattatgattctgggctggactgtgggatctgattacagacggtgacataacacaggaaggaaccctgtcacattcctctttttgtattttcgtagtagatttaaaagttataatctcttcccctccccccaaactggagctgtccctggcctggttttcaaaataaagtgtgcgatcttca

SEQ ID NO: 356963 - DNA, 1364 bp, Homo sapiens
tgcacacggcgagtctgggcgactgcgcacgcgcggctgggagtggcgggttcgggcgcagctgtagggttggctgcgcgccgccgaggcgttttggactgggttataaacaacttgtgaaatgagtgatttggaagatgatgagacaccccagctttctgcccatgccttagcagctctccaggaattttatgctgagcaaaagcaacaaattgagccaggcgaggatgataaatataacattggaataatagaagagaattggcaactgagccagttttggtatagtcaggaaactgctctgcagctggcacaggaggcaattgcagctgtaggagaaggtggcagaatcgcatgtgtgagtgcccctagtgtttaccagaaactcagagagctgtgcagagaaaacttttcgatatacatctttgaatatgacaaaagatttgccatgtatggagaggagtttattttctatgattacaataatccattggacttacccgaaagaattgctgcacatagttttgacatcgtaatagcagatcctccctatctttcggaggaatgtctcagaaaaacatcggaaaccgtcaagtacctgacgcggggcaagattctgctgtgcacaggtgccatcatggaagaacaggcagcagaactccttggagtgaagatgtgcacgtttgttccaagacacacccggaacttggcaaatgagtttcgctgttatgtgaattatgattctgggctggactgtgggatctgattacagacggtgacataacacaggaaggaaccctgtcacattcctctttttgtattttcgtagtagatttaaaagttataatctcttcccctccccccaaactggagctgtccctggcctggttttcaaaataaagtgtgcgatcttcacattattgtttccttagggagggcgtccctagagctcagtcttctgccaacctgaatccatggaattcgagttggaagaaaccttagaatctgcctgatcttctctcctcatttaacatgtgtaaaaacagaagaacagttgtgtggcttgcccaagggctcctgaatgagacaggaccttggcctctgcctcgggccagagcagtctggtagcatcctagggcttgtgaggaaccccacccccatgtcccaccccagccctccaaggagacagacttgcctccatgcaaaaaggcaataatccagtaactagcgtctgaatgcctcttagagctctcctcctcctccaggttctaggtgggctgcgagggatgacaggtgcccaggtgccctccctgcgtggctcagactcagcaccctccctctgaactgcctgagaaaatgaaaga

SEQ ID NO: 356964 - DNA, 465 bp, Homo sapiens
atattcattcttgtttacttcctcattgttcttgctatattaatcttttaattttcagccacttattgctaatgattttgtttaaatttaaaaaatccagttttgttgaactccctttattctaataataatttttatagatttccttatattttctatatagatttcttatcatttgcagataataaaattttttgcccctttagctcaattattgaaactaatttatttttcctctcctatagcattggctaggatcatcaatatactgtaaataatggtaatcttatggttgactttaaagaaaacatttctaacatttttgttgctacatttttatgaggggtaaacagtggttcatattgtacttgaatttaaagttaatttgtttttgcaaaagaaagataatcttagtgaacatctttttaaaaaagtttaactttttcaccttttcttagaaaaaag

SEQ ID NO: 356965 - DNA, 1434 bp, Homo sapiens
agtcacatttcagccactgctctgagaatttgtgagcagcccctaacaggctgttacttcactacaactgacgatatgatcatcttaatttacttatttctcttgctatgggaagacactcaaggatggggattcaaggatggaatttttcataactccatatggcttgaacgagcagccggtgtgtaccacagagaagcacggtctggcaaatacaagctcacctacgcagaagctaaggcggtgtgtgaatttgaaggcggccatctcgcaacttacaagcagctagaggcagccagaaaaattggatttcatgtctgtgctgctggatggatggctaagggcagagttggataccccattgtgaagccagggcccaactgtggatttggaaaaactggcattattgattatggaatccgtctcaataggagtgaaagatgggatgcctattgctacaacccacacgcaaaggagtgtggtggcgtctttacagatccaaagcaaatttttaaatctccaggcttcccaaatgagtacgaagataaccaaatctgctactggcacattagactcaagtatggtcagcgtattcacctgagttttttagattttgaccttgaagatgacccaggttgcttggctgattatgttgaaatatatgacagttacgatgatgtccatggctttgtgggaagatactgtggagatgagcttccagatgacatcatcagtacaggaaatgtcatgaccttgaagtttctaagtgatgcttcagtgacagctggaggtttccaaatcaaatatgttgcaatggatcctgtatccaaatccagtcaaggaaaaaatacaagtactacttctactggaaataaaaactttttagctggaagatttagccacttataaaaaaaaaaaaaggatgatcaaaacacacagtgtttatgttggaatcttttggaactcctttgatctcactgttattattaacatttatttattatttttctaaatgtgaaagcaatacataatttagggaaaattggaaaatataggaaactttaaacgagaaaatgaaacctctcataatcccactgcatagaaataacaagcgttaacattttcatatttttttctttcagtcatttttctatttgtggtatatgtatatatgtacctatatgtatttgcatttgaaattttggaatcctgctctatgtacagttttgtattatactttttaaatcttgaactttataaacattttctgaaatcattgattattctacaaaaacatgattttaaacagctgtaaaatattctatgatatgaatgttttatgcattatttaagcctgtctctattgttggaatttcaggtcattttcataaatattgttgcaataaatatccttgaacacacaaatttgtgcac

SEQ ID NO: 356966 - DNA, 511 bp, Homo sapiens
tcgtgccgaattcggcacgagctcactgttattattaacatttatttatgtattgctttcacatttagaaaaataataaataaatgttaataataacagtgagattaatttagggaaaattggaaaatataggaaactttaaacgagaaaatgaaacctctcataatcccactgcatagaaataacaagcgttaacattttcatatttttttctttcagtcatttttctatttgtggtatatgtatatatgtacctatatgtatttgcatttgaaattttggaatcctgctctatgtacagttttgtattatactttttaaatcttgaactttataaacattttctgaaatcattgattattctacaaaaacatgattttaaacagctgtaaaatattctatgatatgaatgttttatgcattatttaagcctgtctctattgttggaatttcaggtcattttcataaatattgttgcaataaatatccttgaacacacaaatttgtgcac

SEQ ID NO: 356967 - DNA, 417 bp, Homo sapiens
  misc_feature (53)..(54): n is a, c, g, or t
  misc_feature (75)..(75): n is a, c, g, or t
gttgtgaggtccaggagtcataccgctatacaaccaaaacaaacctgaggggnnacaacacccccgttactcggnataaaccggatgttgggactcagacgataccctaaagtatgacactttgggatactgagtactttgagctaaaggagactggaaggcctcagaagcaagatctctgtgaccttctccttccatcttccctcttgccccaagtcttcctcttccaaagcaagtcataaaaaccagaattcaccgggcgcagtggctcactcctgtaatcccatcactttggaaggccgaggcagaggatctcttgagctcaggagttcaaaaccaggctgggcaacatagcaagacctcatctctatgaaaaaaattttaaattaaaaaattaaaaattatctgggcatagtg

SEQ ID NO: 356968 - DNA, 894 bp, Homo sapiens
agtcacatttcagccactgctctgagaatttgtgagcagcccctaacaggctgttacttcactacaactgacgatatgatcatcttaatttacttatttctcttgctatgggaagacactcaaggatggggattcaaggatggaatttttcataactccatatggcttgaacgagcagccggtgtgtaccacagagaagcacggtctggcaaatacaagctcacctacgcagaagctaaggcggtgtgtgaatttgaaggcggccatctcgcaacttacaagcagctagaggcagccagaaaaattggatttcatgtctgtgctgctggatggatggctaagggcagagttggataccccattgtgaagccagggcccaactgtggatttggaaaaactggcattattgattatggaatccgtctcaataggagtgaaagatgggatgcctattgctacaacccacacgcaaaggagtgtggtggcgtctttacagatccaaagcaaatttttaaatctccaggcttcccaaatgagtacgaagataaccaaatctgctactggcacattagactcaagtatggtcagcgtattcacctgagttttttagattttgaccttgaagatgacccaggttgcttggctgattatgttgaaatatatgacagttacgatgatgtccatggctttgtgggaagatactgtggagatgagcttccagatgacatcatcagtacaggtaaggttttaaattgaggaccaaaactatgatttgtttctttacagtgtccctgaaagtaaagggacactgttaaatagtaaatagtagttattattcactttttaaagttgaaagaaccaacaccagatgcagcttgctaggttgtaaaatgc

SEQ ID NO: 356969 - DNA, 1108 bp, Homo sapiens
agtcacatttcagccactgctctgagaatttgtgagcagcccctaacaggctgttacttcactacaactgacgatatgatcatcttaatttacttatttctcttgctatgggaagacactcaaggatggggattcaaggatggaatttttcataactccatatggcttgaacgagcagccggtgtgtaccacagagaagcacggtctggcaaatacaagctcacctacgcagaagctaaggcggtgtgtgaatttgaaggcggccatctcgcaacttacaagcagctagaggcagccagaaaaattggatttcatgtctgtgctgctggatggatggctaagggcagagttggataccccattgtgaagccagggcccaactgtggatttggaaaaactggcattattgattatggaatccgtctcaataggagtgaaagatgggatgcctattgctacaacccacacgcaaaggagtgtggtggcgtctttacagatccaaagcaaatttttaaatctccaggcttcccaaatgagtacgaagataaccaaatctgctactggcacattagactcaagtatggtcagcgtattcacctgagttttttagattttgaccttgaagatgacccaggttgcttggctgattatgttgaaatatatgacagttacgatgatgtccatggctttgtgggaagatactgtggagatgagcttccagatgacatcatcagtacagggagaaaaaaacacagttgttactcggtaatgagggatgttgggactcagacgataccctaaagtatgacactttgggatactgagtactttgagctaaaggagactggaaggcctcagaagcaagatctctgtgaccttctccttccatcttccctcttgccccaagtcttcctcttccaaagcaagtcataaaaaccagaattcaccgggcgcagtggctcactcctgtaatcccatcactttggaaggccgaggcagaggatctcttgagctcaggagttcaaaaccaggctgggcaacatagcaagacctcatctctatgaaaaaaattttaaattaaaaaattaaaaattatctgggcatagtg

SEQ ID NO: 356970 - DNA, 1250 bp, Homo sapiens
agtcacatttcagccactgctctgagaatttgtgagcagcccctaacaggctgttacttcactacaactgacgatatgatcatcttaatttacttatttctcttgctatgggaagacactcaaggatggggattcaaggatggaatttttcataactccatatggcttgaacgagcagccggtgtgtaccacagagaagcacggtctggcaaatacaagctcacctacgcagaagctaaggcggtgtgtgaatttgaaggcggccatctcgcaacttacaagcagctagaggcagccagaaaaattggatttcatgtctgtgctgctggatggatggctaagggcagagttggataccccattgtgaagccagggcccaactgtggatttggaaaaactggcattattgattatggaatccgtctcaataggagtgaaagatgggatgcctattgctacaacccacacgcaaaggagtgtggtggcgtctttacagatccaaagcaaatttttaaatctccaggcttcccaaatgagtacgaagataaccaaatctgctactggcacattagactcaagtatggtcagcgtattcacctgagttttttagattttgaccttgaagatgacccaggttgcttggctgattatgttgaaatatatgacagttacgatgatgtccatggctttgtgggaagatactgtggagatgagcttccagatgacatcatcagtacaggaaatgtcatgaccttgaagtttctaagtgatgcttcagtgacagctggaggtttccaaatcaaatatgttgcaatggatcctgtatccaaatccagtcaaggaaaaaatacaagtactacttctactggaaataaaaactttttagctggaagatttagccacttataaaaaaaaaaaaaggatgatcaaaacacacagtgtttatgttggaatcttttggaactcctttgatctcactgttattattaacatttatttattatttttctaaatgtgaaagcaatacataatttagggaaaattggaaaatataggaaactttaaacgagaaaatgaaacctctcataatcccactgcatagaaataacaagcgttaacattttcatatttttttctttcagtcatttttctatttgtggtatatgtatatatgtaccacaaatagaaaaatgactgaaagaaaaaaatatgacaatgttaacgcttgttatttctatgcagtgtcgagc

SEQ ID NO: 356971 - DNA, 1013 bp, Homo sapiens
agtcacatttcagccactgctctgagaatttgtgagcagcccctaacaggctgttacttcactacaactgacgatatgatcatcttaatttacttatttctcttgctatgggaagacactcaaggatggggattcaaggatggaatttttcataactccatatggcttgaacgagcagccggtgtgtaccacagagaagcacggtctggcaaatacaagctcacctacgcagaagctaaggcggtgtgtgaatttgaaggcggccatctcgcaacttacaagcagctagaggcagccagaaaaattggatttcatgtctgtgctgctggatggatggctaagggcagagttggataccccattgtgaagccagggcccaactgtggatttggaaaaactggcattattgattatggaatccgtctcaataggagtgaaagatgggatgcctattgctacaacccacacgcaaaggagtgtggtggcgtctttacagatccaaagcaaatttttaaatctccaggcttcccaaatgagtacgaagataaccaaatctgctactggcacattagactcaagtatggtcagcgtattcacctgagttttttagattttgaccttgaagatgacccaggttgcttggctgattatgttgaaatatatgacagttacgatgatgtccatggctttgtgggaagatactgtggagatgagcttccagatgacatcatcagtacagaccctcattccagaagagtcctgccccacacccagaaggaaggagtgttacacagagaggccaagaagaatctagacagacaggccttactgggcctccccacttggtctattgccatgagatcacatgatttgtccaatcacatttctacatggccgtctattcttcatcaaacctaaacataaaaatacaattttccttgggtctttgagtcttcatttctgtaggctcccatgtcacataaaattttgattaaataaatttataatgcttt

SEQ ID NO: 356972 - DNA, 762 bp, Homo sapiens
atgccacaggcatgcaataaattcccatttattgacagtctgaccttgctggcaggatggttccaaagttctgttggaagccagctctatatcctcaatctagcaagatgagcagttttccagggcacaccatggtaagggggcccacccaatcctgcccatctgatcccacaggctggcccccggataggtaacttggtggcaactctagtctctcatcatgtacagggggtaaaccagttcatgcgaagatcatgtattaagctgcctaacatatacaaaaacactgctaggtcctgaggaaacagagatgaataaattacagtcttcctctgaggagtttgaaattagcaagggagacagacacataagaagtaaaataacactacagtgagatatgctataaacaaacctgggaggagatgtaagggaaggctttatagagaaggtgacatttgcactgttcaaaaaaaaggataaggccaggtgcagtggctcatgcctgtaatcccagcactttgggaggtcaaggcgggcggatcacgaagtcaggagttcgagaccagcctggccaacatggtgaaaccccatctccactaaaaaatacaaaaattagccgggcatggtggtgcgcacctgtagtcccagctactcgggaggctggggcaggagaatcgcttgaactcggaggtggaggttgcagtgaactgagatcacaccactacactccagcctggttgacagtgagactgtctcaaaaaa

SEQ ID NO: 356973 - DNA, 362 bp, Homo sapiens
aacacagtataatgggctgcattatcttacagtttatggagactgccttgcagacgaggcagggaggcaggaactgtgagatggagagaatgtggtgcaataaaaaggaaattttggagctccccatcccagccttaaaagtacctgaaatgccagctcattatcattttttcaccactactgctgagcttttcaagtgtaaagaatcttatgattcaacatgacgaaaccctgtctctactaaaaatacaaaaatcagctgggtgtggtggcaggtgcctgtagtcccagctactcaggaggctgaaacaggagaatcgcttgaacccaggaggcagaggttgcagtgagcaaggctgcac

SEQ ID NO: 356974 - DNA, 645 bp, Homo sapiens
acaggaacagcacttctggactttatgttctgacgtttatgttgggaccttgaaattaatagtagcacctgatgctgatgctaggtggattttaagccaaacacataatatttttactcaggctggagtgagacagctctacgtacagattgactttgcagccatgtagtgaatggaaagaaattatgcaccttttatggaccaaatttttctggtactgtacgatccaaaacattgtacccagctttttaaaagagagaaattatcactacaactcccgagcactaagtagacggggtagagtcagccgttcatgctttgtggggagttcacagctaagggatcagatttaagaggatatctcctggacttttggtctttttttttgtgctctttcctccaaatctttttgacttctgaggtttttagcttaggatgttaatttgtccttttgtctttctttttttgtttttgttttctgtttgtttgttttcatgttgaatgcccacaccaccatcctctcatcccagccagtaagaatttcagttgtgggcctccagtcttctggaatgtcttcactgcagctgctggaaatcactgctttcattcccacaaaaccagtattacttttttttaaaaaaagaa

SEQ ID NO: 356975 - DNA, 506 bp, Homo sapiens
acaggaacagcacttctggactttatgttctgacgtttatgttgggaccttgaaattaatagtagcacctgatgctgatgctaggtggattttaagccaaacacataatatttttactcaggaaactggaagaggaaaatgagaatctgtaaaacttgaagctgtcctcatcgggccagatggataaagcaaaatgacttttttttcttttttttttctgttagactgagcttttgtggaaagctgtaagccctcaggggaaggatatcagcttgagtaattaactcatgattatgcaaagaaaatttacctagcctctttgtttttcctttctttgttattgccttgggctacttcattttttattaccatcttctctgtttagggctaggagtaaggaaaatgacagagacaataaaaagagcccaagttttgcccattttgctttcactaacaatgttgttgaaaaataaaagaaattaagacaatttatttgaacaatattt

SEQ ID NO: 356976 - DNA, 261 bp, Homo sapiens
cactgatgttgctgtgtgctacagggccccagcacactggaggggaggaggacctggaagttaagggaaaatagcaggcttgggacaaagggtgcagccagagaggggtctggctgcccataagagcccctggggggctgtcaccttatattattactagagcttgcgggatgtgtgttctgagtttgaagcagcaaagacccttcatgagcccacagtgacttctccagctccatggtgagaaagccaccaaaggcagga

SEQ ID NO: 356977 - DNA, 2826 bp, Homo sapiens
gcgatgcctgttttgaaagttgatggagcgaactgcttttccaaagactcttttgaaaaactttttaagtaggccattctgactttaacatttctctttgtcttaacattagacaaaaagtaaccttcctgaagaggacatgtgattggaagttgtcaattgttgaagcattggtaactccagtctctaacgttttagaaaatcataacaagcggttctctaccctgtaaaggtgaactactgagttcttcattatgtctgatggagattatgattacctcatcaagtttttagctttgggagactctggtgtagggaagaccagtgtactttaccaatatacagatggtaaatttaactccaaatttatcacaacagtgggcattgatttcagggaaaaaagagtggtgtacagagccagtgggccggatggagccactggcagaggccagagaatccacctgcagttatgggacacagcagggcaggagaggtttcgtagcttaacgacagcgttcttcagagatgctatgggttttcttctactttttgatctgacaaatgagcaaagtttcctcaatgtcagaaactggataagccagctacagatgcatgcatattgtgaaaacccagatatagtgctgtgtggaaacaagagtgatctggaggaccagagagtagtgaaagaggaggaagccatagcactcgcagagaaatatggaatcccctactttgaaactagtgctgccaatgggacaaacataagccaagcaattgagatgcttctggacctgataatgaagcgaatggaacggtgtgtggacaagtcctggattcctgaaggagtggtgcgatcaaatggtcatgcctctacggatcagttaagtgaagaaaaggagaaaggggcatgtggctgttgagaagtcaagtaagcgacatagtagttcaggtggcccatgcctgggatcttctctatgattgatacatggcacagtgagagattaatgggcattgtgtacaaattgcttctcaccatccccattagacctacgaataaagcatccggttctaaaattaatttgttgcagctttgtaaatatttctttaagattcagcctgagagttaggagaaatatttcagagccaaaagtgccttatacaaccttagcctattatagtaaatcattcaaggattcagaattttgcagtcacagaagagtgtatttattatgtagaatgaatgagggtactgtcacctgccttaatgtaggtaggcccagagtcttacatttaagatcttacatgcagttataaaaccgccacagtcttcaatccagatttgaagactcatgccataggtgacattctaaaataccattaaagccacttaaatgttaaataagaatatacatgcacatcagctcaatgtctttgagtattaattttatgtaagcattctatttaacatgaatataggacaaatcatggctatatctatagaccttggataaactggattgaccaattatacactcacggtgacttttttattggtgggaaggggattggggtggggcaggctggcttaatgtaatatgagcaaccaaagtgggacttctgtctccccgctatattcccattgctctgaatggttgattgaagggtcagggaactagattttatggctttagttcactgtgattgtacatttatacttggcctatgtgctggccgcacctgaacatagctggtgcttatgccgagttatttgcgatgagtaaatatttagtttctttttcttcatatttataatgttgatctggcatcctcaggctgcagctttattagcttataacttactcatctctatctttaccagcaggctctgtattgttgatatttgcaacttgttttgcttttccattggtggaattgaaataattagtttttaattacataagatgcctgtttgctatttggtggaagatagatgttcatattgaagcagtcacatttgtactgtagttcaataaaagaaaaatgaagtattctgtagcctatatttttcatagagctcatgagcatttactgtacttgctgggtcttgccaagatcatttattccgctgcattgccaaagtgtcttcataccaaattaaaggtggttttaatatatgtttcatggaagttgtttataaaattcaaaggtatttcatttaggtgaaaagtcttatttattaaagtggtttgaataaagtagatcaaaacttccagagatcttaatggctatataggaagaaatatcactcaccataatttaaataaagaataaaaatacttgtattttgtggtggcaaatgtttggtagaactgtaattagaaaaatacaagtatatttgcgtgatggttacactagaagcccagactttacgactacacaatatattcatgtatctaaactgtacttgtaccccctaaatttatttttaaaaaaggaaaaataaaagtatcatgaaaaaacctatttttttttccactgtccttccactactcccataacaaacttatccatggttggtaaaattttacatatttctatccttgaaatgaaggcttcttttaaattccaaagaagtcatggaggcctgtgcatttgaattgtatatgctagtgaggaaaagatttagacatttcaagagcagggttggccaggcgcggtggctcacacctgtaatcccagcactttgggaggccgaggagggcggatcacgaggtcaggagatcgagaccatcctggctaacacagtgaaaccccatctctactaaa

SEQ ID NO: 356978 - DNA, 1038 bp, Homo sapiens
  misc_feature (45)..(45): n is a, c, g, or t
actaagacgagggggacaaagagcaggcggggaccgggccggaanccgggattggcggtctctgtgctcgggggtccgaaaactgctggaaggcccccggtctctggaggggagcaggcggtagcgagtttagtgacgtggagcaggcgcagaacagtcggaggtacctgagtggttattaaaaacggtaacggtaattgtagacgtcagtgttggtgttaacatttcagatttgaagagatttcctgggtgtggagtgtgactttccaaaaccagcttttccttgagctgtatttgttgcagcaatgtttaggagattgacttttgcacaactgctttttgccactgtccttggaattgctggaggagtatatatttttcaaccagtatttgaacagtatgccaaagatcagaaggaattaaaagaaaagatgcagttggtacaagaatcagaagagaagaaaagttaatactacatggagttaggcctggcgcagtggctcacgcctgtaatcccagcactttgggaggccgaggcgggtggatcaggtggtcaggagttcaagaccagcctgaccaacatggtgaaaccctgtctctactgaaaatacaaaaatcagccaggcttggtggcatgcgcctgtaatcccagctacttgggaggctgaggcaggagcatcacttgaacctgggaggcagaggtggcagtgagtcaagatcacgctgctgcactccagcctgggtgacagagcgagactccatctaaaaaaacaaaaagcaaaaaaacccacaaatacctcatggagatgaactgtaataattgcttaaagttccatttaattatgttaactctaatctagcaaaaacatagatgtacttaaaaataaatcatggataatgattttttaacctaaaactgttaattttaatgtttattgtatatttgtcattttatgtctttttaccaggacagataagtaatttccttttaaacaaaagtgaatattttaggaatattttctacttgaggtttatttt

SEQ ID NO: 356979 - DNA, 1024 bp, Homo sapiens
agctcccacccgacgtggtggcctccttgcggtttcctttcgccgtttccgaaccgagggattgctactcgcctttggcttggcggtctctgtgctcgggggtccgaaaactgctggaaggcccccggtctctggaggggagcaggcggtagcgagtttagtgacgtggagcaggcgcagaacagtcggaggtacctgagtggttattaaaaacggatttgaagagatttcctgggtgtggagtgtgactttccaaaaccagcttttccttgagctgtatttgttgcagcaatgtttaggagattgacttttgcacaactgctttttgccactgtccttggaattgctggaggagtatatatttttcaaccagtatttgaacagtatgccaaagatcagaaggaattaaaagaaaagatgcagttggtacaagaatcagaagagaagaaaagttaatactacatggagttaggcctggcgcagtggctcacgcctgtaatcccagcactttgggaggccgaggcgggtggatcaggtggtcaggagttcaagaccagcctgaccaacatggtgaaaccctgtctctactgaaaatacaaaaatcagccaggcttggtggcatgcgcctgtaatcccagctacttgggaggctgaggcaggagcatcacttgaacctgggaggcagaggtggcagtgagtcaagatcacgctgctgcactccagcctgggtgacagagcgagactccatctaaaaaaacaaaaagcaaaaaaacccacaaatacctcatggagatgaactgtaataattgcttaaagttccatttaattatgttaactctaatctagcaaaaacatagatgtacttaaaaataaatcatggataatgattttttaacctaaaactgttaattttaatgtttattgtatatttgtcattttatgtctttttaccaggacagataagtaatttccttttaaacaaaagtgaatattttaggaatattttctacttgaggtttatttt

SEQ ID NO: 356980 - DNA, 630 bp, Homo sapiens
acgtggggaccagaaaaccaaataagtggtttattatagccatctaagaaataataaaaacttggagtaggagcaagaagatgaatatccttaggacttggtggccaattggaagtgggaggggcagagagggaggagttaatgagagccatcagatttctggctgtgttgggattgtgtgattcaagacacaggaagagaagtgggtttgaagcaaggttgtggagaaaagcaaaggaggtgagtacgggacatgctggatttgagatgccagcaagatatctgggtggactcccttgtaggcagttttacttatgaaattggaggccagctgcaaggtctggtaagtaatctagccccatccctcctgccacttccatttgatcccccatattgtttgtttggatcaggcattgtatttgtaagcaacaatatgaatataacctttaagggccttgagaatacaaggcactttctcaagaaaacaaatgttctactgttttgattcacggggtaggtgggcggaagaaagagctgaagtgcagagtcttctaacaccagaagaggttaataaagccgccctctgagtggccagtcgaactggaacttggtaagcttgaaaggggcaaa

SEQ ID NO: 356981 - DNA, 3816 bp, Homo sapiens
agctcccacccgacgtggtggcctccttgcggtttcctttcgccgtttccgaaccgagggattgctactcgcctttggcttggcggtctctgtgctcgggggtccgaaaactgctggaaggcccccggtctctggaggggagcaggcggtagcgagtttagtgacgtggagcaggcgcagaacagtcggagatacagtctcgctgtgatgcccaggctggagtgcaatggcgtgattttggctcactgcaacctctcccacccaggttcaagtgattctcctgcctcagcctcccgagcagctgggattacaggtgcctgctaccacacccggaatcctgggcattcccttgccccggaaacgccgtgtccaggccgacctaagccaggagccgcaggggcgggaagccgggggcagggccgggcctgggacgccgcctcaggagccgcgcggactcgggaacctcgggcggggccggcgtgagtacgcccggcacctccggctgctacggtggcgaccgcgaactgatgccgtggaaaacacccttagaacatggctttttggggaggtgaataggggagagtccccaaacgacacctcgccgcgcaccggtccttggtgcagtttgtaaatgtccctcctgtgtcccaaaacgaaaacactcctatattttgtagcgccttccagaatggggcagcggaaactagtgttgggacaaaggaggcgagcggggccttttcggggctcacagaggacccctcggaggcgcggccgccggggagagcgcgacagcaccccgccccccgccagccgggcgggggccgctcccgaggtgacaggagaaggcgggaggtggaggagagaaggtcccgccccacctcgctctcctttacgggaagtgatgtggggccaggcggaaaatacccgccaacgacccaaaaaaggccggcggcgggtggacgcggcgcgcgaggacccgagccaggcggggacaggacggcggggcgagccagacaaaaagtaaccttcctgaagaggacatgtgattggaagttgtcaattgttgaagcattggtaactccagtctctaacgttttagaaaatcataacaagcggttctctaccctgtaaagaacagaaacctggaaatctaaggctcaaagacatccaagtaattggtatctgggagatttgggattcaaacccagctctgcttgacttggtgaactactgagttcttcattatgtctgatggagattatgattacctcatcaagtttttagctttgggagactctggtgtagggaagaccagtgtactttaccaatatacagatggtaaatttaactccaaatttatcacaacagtgggcattgatttcagggaaaaaagagtggtgtacagagccagtgggccggatggagccactggcagaggccagagaatccacctgcagttatgggacacagcagggcaggagaggtttcgtagcttaacgacagcgttcttcagagatgctatgggttttcttctactttttgatctgacaaatgagcaaagtttcctcaatgtcagaaactggataagccagctacagatgcatgcatattgtgaaaacccagatatagtgctgtgtggaaacaagagtgatctggaggaccagagagtagtgaaagaggaggaagccatagcactcgcagagaaatatggaatcccctactttgaaactagtgctgccaatgggacaaacataagccaagcaattgagatgcttctggacctgataatgaagcgaatggaacggtgtgtggacaagtcctggattcctgaaggagtggtgcgatcaaatggtcatgcctctacggatcagttaagtgaagaaaaggagaaaggggcatgtggctgttgagaagtcaagtaagcgacatagtagttcaggtggcccatgcctgggatcttctctatgattgatacatggcacagtgagagattaatgggcattgtgtacaaattgcttctcaccatccccattagacctacgaataaagcatccggttctaaaattaatttgttgcagctttgtaaatatttctttaagattcagcctgagagttaggagaaatatttcagagccaaaagtgccttatacaaccttagcctattatagtaaatcattcaaggattcagaattttgcagtcacagaagagtgtatttattatgtagaatgaatgagggtactgtcacctgccttaatgtaggtaggcccagagtcttacatttaagatcttacatgcagttataaaaccgccacagtcttcaatccagatttgaagactcatgccataggtgacattctaaaataccattaaagccacttaaatgttaaataagaatatacatgcacatcagctcaatgtctttgagtattaattttatgtaagcattctatttaacatgaatataggacaaatcatggctatatctatagaccttggataaactggattgaccaattatacactcacggtgacttttttattggtgggaaggggattggggtggggcaggctggcttaatgtaatatgagcaaccaaagtgggacttctgtctccccgctatattcccattgctctgaatggttgattgaagggtcagggaactagattttatggctttagttcactgtgattgtacatttatacttggcctatgtgctggccgcacctgaacatagctggtgcttatgccgagttatttgcgatgagtaaatatttagtttctttttcttcatatttataatgttgatctggcatcctcaggctgcagctttattagcttataacttactcatctctatctttaccagcaggctctgtattgttgatatttgcaacttgttttgcttttccattggtggaattgaaataattagtttttaattacataagatgcctgtttgctatttggtggaagatagatgttcatattgaagcagtcacatttgtactgtagttcaataaaagaaaaatgaagtattctgtagcctatatttttcatagagctcatgagcatttactgtacttgctgggtcttgccaagatcatttattccgctgcattgccaaagtgtcttcataccaaattaaaggtggttttaatatatgtttcatggaagttgtttataaaattcaaaggtatttcatttaggtgaaaagtcttatttattaaagtggtttgaataaagtagatcaaaacttccagagatcttaatggctatataggaagaaatatcactcaccataatttaaataaagaataaaaatacttgtattttgtggtggcaaatgtttggtagaactgtaattagaaaaatacaagtatatttgcgtgatggttacactagaagcccagactttacgactacacaatatattcatgtatctaaactgtacttgtaccccctaaatttatttttaaaaaaggaaaaataaaagtatcatgaaaaaacctatttttttttccactgtccttccactactcccataacaaacttatccatggttggtaaaattttacatatttctatccttgaaatgaaggcttcttttaaattccaaagaagtcatggaggcctgtgcatttgaattgtatatgctagtgaggaaaagatttagacatttcaagagcagggttggccaggcgcggtggctcacacctgtaatcccagcactttgggaggccgaggagggcggatcacgaggtcaggagatcgagaccatcctggctaacacagtgaaaccccatctctactaaa

SEQ ID NO: 356982 - DNA, 3057 bp, Homo sapiens
acgtggggaccagaaaaccaaataagtggtttattatagccatctaagaaataataaaaacttggagtaggagcaagaagatgaatatccttaggacttggtggccaattggaagtgggaggggcagagagggaggagttaatgagagccatcagatttctggctgtgttgggattgtgtgattcaagacacaggaagagaagtgggtttgaagcaaggttgtggagaaaagcaaaggaggtgagtacgggacatgctggatttgagatgccagcaagatatctgggtggactcccttgtaggcagttttacttatgaaattggaggccagctgcaaggtctgacaaaaagtaaccttcctgaagaggacatgtgattggaagttgtcaattgttgaagcattggtaactccagtctctaacgttttagaaaatcataacaagcggttctctaccctgtaaaggtgaactactgagttcttcattatgtctgatggagattatgattacctcatcaagtttttagctttgggagactctggtgtagggaagaccagtgtactttaccaatatacagatggtaaatttaactccaaatttatcacaacagtgggcattgatttcagggaaaaaagagtggtgtacagagccagtgggccggatggagccactggcagaggccagagaatccacctgcagttatgggacacagcagggcaggagaggtttcgtagcttaacgacagcgttcttcagagatgctatgggttttcttctactttttgatctgacaaatgagcaaagtttcctcaatgtcagaaactggataagccagctacagatgcatgcatattgtgaaaacccagatatagtgctgtgtggaaacaagagtgatctggaggaccagagagtagtgaaagaggaggaagccatagcactcgcagagaaatatggaatcccctactttgaaactagtgctgccaatgggacaaacataagccaagcaattgagatgcttctggacctgataatgaagcgaatggaacggtgtgtggacaagtcctggattcctgaaggagtggtgcgatcaaatggtcatgcctctacggatcagttaagtgaagaaaaggagaaaggggcatgtggctgttgagaagtcaagtaagcgacatagtagttcaggtggcccatgcctgggatcttctctatgattgatacatggcacagtgagagattaatgggcattgtgtacaaattgcttctcaccatccccattagacctacgaataaagcatccggttctaaaattaatttgttgcagctttgtaaatatttctttaagattcagcctgagagttaggagaaatatttcagagccaaaagtgccttatacaaccttagcctattatagtaaatcattcaaggattcagaattttgcagtcacagaagagtgtatttattatgtagaatgaatgagggtactgtcacctgccttaatgtaggtaggcccagagtcttacatttaagatcttacatgcagttataaaaccgccacagtcttcaatccagatttgaagactcatgccataggtgacattctaaaataccattaaagccacttaaatgttaaataagaatatacatgcacatcagctcaatgtctttgagtattaattttatgtaagcattctatttaacatgaatataggacaaatcatggctatatctatagaccttggataaactggattgaccaattatacactcacggtgacttttttattggtgggaaggggattggggtggggcaggctggcttaatgtaatatgagcaaccaaagtgggacttctgtctccccgctatattcccattgctctgaatggttgattgaagggtcagggaactagattttatggctttagttcactgtgattgtacatttatacttggcctatgtgctggccgcacctgaacatagctggtgcttatgccgagttatttgcgatgagtaaatatttagtttctttttcttcatatttataatgttgatctggcatcctcaggctgcagctttattagcttataacttactcatctctatctttaccagcaggctctgtattgttgatatttgcaacttgttttgcttttccattggtggaattgaaataattagtttttaattacataagatgcctgtttgctatttggtggaagatagatgttcatattgaagcagtcacatttgtactgtagttcaataaaagaaaaatgaagtattctgtagcctatatttttcatagagctcatgagcatttactgtacttgctgggtcttgccaagatcatttattccgctgcattgccaaagtgtcttcataccaaattaaaggtggttttaatatatgtttcatggaagttgtttataaaattcaaaggtatttcatttaggtgaaaagtcttatttattaaagtggtttgaataaagtagatcaaaacttccagagatcttaatggctatataggaagaaatatcactcaccataatttaaataaagaataaaaatacttgtattttgtggtggcaaatgtttggtagaactgtaattagaaaaatacaagtatatttgcgtgatggttacactagaagcccagactttacgactacacaatatattcatgtatctaaactgtacttgtaccccctaaatttatttttaaaaaaggaaaaataaaagtatcatgaaaaaacctatttttttttccactgtccttccactactcccataacaaacttatccatggttggtaaaattttacatatttctatccttgaaatgaaggcttcttttaaattccaaagaagtcatggaggcctgtgcatttgaattgtatatgctagtgaggaaaagatttagacatttcaagagcagggttggccaggcgcggtggctcacacctgtaatcccagcactttgggaggccgaggagggcggatcacgaggtcaggagatcgagaccatcctggctaacacagtgaaaccccatctctactaaa

SEQ ID NO: 356983 - DNA, 2685 bp, Homo sapiens
ttctgagactctgcatactgaataataggtgaaataaggaaagactttgagaagcaataagaaatatatctgatttgaccttgtccattaggtgaactactgagttcttcattatgtctgatggagattatgattacctcatcaagtttttagctttgggagactctggtgtagggaagaccagtgtactttaccaatatacagatggtaaatttaactccaaatttatcacaacagtgggcattgatttcagggaaaaaagagtggtgtacagagccagtgggccggatggagccactggcagaggccagagaatccacctgcagttatgggacacagcagggcaggagaggtttcgtagcttaacgacagcgttcttcagagatgctatgggttttcttctactttttgatctgacaaatgagcaaagtttcctcaatgtcagaaactggataagccagctacagatgcatgcatattgtgaaaacccagatatagtgctgtgtggaaacaagagtgatctggaggaccagagagtagtgaaagaggaggaagccatagcactcgcagagaaatatggaatcccctactttgaaactagtgctgccaatgggacaaacataagccaagcaattgagatgcttctggacctgataatgaagcgaatggaacggtgtgtggacaagtcctggattcctgaaggagtggtgcgatcaaatggtcatgcctctacggatcagttaagtgaagaaaaggagaaaggggcatgtggctgttgagaagtcaagtaagcgacatagtagttcaggtggcccatgcctgggatcttctctatgattgatacatggcacagtgagagattaatgggcattgtgtacaaattgcttctcaccatccccattagacctacgaataaagcatccggttctaaaattaatttgttgcagctttgtaaatatttctttaagattcagcctgagagttaggagaaatatttcagagccaaaagtgccttatacaaccttagcctattatagtaaatcattcaaggattcagaattttgcagtcacagaagagtgtatttattatgtagaatgaatgagggtactgtcacctgccttaatgtaggtaggcccagagtcttacatttaagatcttacatgcagttataaaaccgccacagtcttcaatccagatttgaagactcatgccataggtgacattctaaaataccattaaagccacttaaatgttaaataagaatatacatgcacatcagctcaatgtctttgagtattaattttatgtaagcattctatttaacatgaatataggacaaatcatggctatatctatagaccttggataaactggattgaccaattatacactcacggtgacttttttattggtgggaaggggattggggtggggcaggctggcttaatgtaatatgagcaaccaaagtgggacttctgtctccccgctatattcccattgctctgaatggttgattgaagggtcagggaactagattttatggctttagttcactgtgattgtacatttatacttggcctatgtgctggccgcacctgaacatagctggtgcttatgccgagttatttgcgatgagtaaatatttagtttctttttcttcatatttataatgttgatctggcatcctcaggctgcagctttattagcttataacttactcatctctatctttaccagcaggctctgtattgttgatatttgcaacttgttttgcttttccattggtggaattgaaataattagtttttaattacataagatgcctgtttgctatttggtggaagatagatgttcatattgaagcagtcacatttgtactgtagttcaataaaagaaaaatgaagtattctgtagcctatatttttcatagagctcatgagcatttactgtacttgctgggtcttgccaagatcatttattccgctgcattgccaaagtgtcttcataccaaattaaaggtggttttaatatatgtttcatggaagttgtttataaaattcaaaggtatttcatttaggtgaaaagtcttatttattaaagtggtttgaataaagtagatcaaaacttccagagatcttaatggctatataggaagaaatatcactcaccataatttaaataaagaataaaaatacttgtattttgtggtggcaaatgtttggtagaactgtaattagaaaaatacaagtatatttgcgtgatggttacactagaagcccagactttacgactacacaatatattcatgtatctaaactgtacttgtaccccctaaatttatttttaaaaaaggaaaaataaaagtatcatgaaaaaacctatttttttttccactgtccttccactactcccataacaaacttatccatggttggtaaaattttacatatttctatccttgaaatgaaggcttcttttaaattccaaagaagtcatggaggcctgtgcatttgaattgtatatgctagtgaggaaaagatttagacatttcaagagcagggttggccaggcgcggtggctcacacctgtaatcccagcactttgggaggccgaggagggcggatcacgaggtcaggagatcgagaccatcctggctaacacagtgaaaccccatctctactaaa

SEQ ID NO: 356984 - DNA, 3613 bp, Homo sapiens
tcattgctctaacactcttagaaatttacagtggttttatattcttgaattacacagtgtgagcagagactccgtttgccatttcctcccggaattacattgatttttttcctgcgaaattttttacttatttttctcccatgttatttccaggaatcctgggcattcccttgccccggaaacgccgtgtccaggccgacctaagccaggagccgcaggggcgggaagccgggggcagggccgggcctgggacgccgcctcaggagccgcgcggactcgggaacctcgggcggggccggcgtgagtacgcccggcacctccggctgctacggtggcgaccgcgaactgatgccgtggaaaacacccttagaacatggctttttggggaggtgaataggggagagtccccaaacgacacctcgccgcgcaccggtccttggtgcagtttgtaaatgtccctcctgtgtcccaaaacgaaaacactcctatattttgtagcgccttccagaatggggcagcggaaactagtgttgggacaaaggaggcgagcggggccttttcggggctcacagaggacccctcggaggcgcggccgccggggagagcgcgacagcaccccgccccccgccagccgggcgggggccgctcccgaggtgacaggagaaggcgggaggtggaggagagaaggtcccgccccacctcgctctcctttacgggaagtgatgtggggccaggcggaaaatacccgccaacgacccaaaaaaggccggcggcgggtggacgcggcgcgcgaggacccgagccaggcggggacaggacggcggggcgagccagacaaaaagtaaccttcctgaagaggacatgtgattggaagttgtcaattgttgaagcattggtaactccagtctctaacgttttagaaaatcataacaagcggttctctaccctgtaaagaacagaaacctggaaatctaaggctcaaagacatccaagtaattggtatctgggagatttgggattcaaacccagctctgcttgacttggtgaactactgagttcttcattatgtctgatggagattatgattacctcatcaagtttttagctttgggagactctggtgtagggaagaccagtgtactttaccaatatacagatggtaaatttaactccaaatttatcacaacagtgggcattgatttcagggaaaaaagagtggtgtacagagccagtgggccggatggagccactggcagaggccagagaatccacctgcagttatgggacacagcagggcaggagaggtttcgtagcttaacgacagcgttcttcagagatgctatgggttttcttctactttttgatctgacaaatgagcaaagtttcctcaatgtcagaaactggataagccagctacagatgcatgcatattgtgaaaacccagatatagtgctgtgtggaaacaagagtgatctggaggaccagagagtagtgaaagaggaggaagcaatcccctactttgaaactagtgctgccaatgggacaaacataagccaagcaattgagatgcttctggacctgataatgaagcgaatggaacggtgtgtggacaagtcctggattcctgaaggagtggtgcgatcaaatggtcatgcctctacggatcagttaagtgaagaaaaggagaaaggggcatgtggctgttgagaagtcaagtaagcgacatagtagttcaggtggcccatgcctgggatcttctctatgattgatacatggcacagtgagagattaatgggcattgtgtacaaattgcttctcaccatccccattagacctacgaataaagcatccggttctaaaattaatttgttgcagctttgtaaatatttctttaagattcagcctgagagttaggagaaatatttcagagccaaaagtgccttatacaaccttagcctattatagtaaatcattcaaggattcagaattttgcagtcacagaagagtgtatttattatgtagaatgaatgagggtactgtcacctgccttaatgtaggtaggcccagagtcttacatttaagatcttacatgcagttataaaaccgccacagtcttcaatccagatttgaagactcatgccataggtgacattctaaaataccattaaagccacttaaatgttaaataagaatatacatgcacatcagctcaatgtctttgagtattaattttatgtaagcattctatttaacatgaatataggacaaatcatggctatatctatagaccttggataaactggattgaccaattatacactcacggtgacttttttattggtgggaaggggattggggtggggcaggctggcttaatgtaatatgagcaaccaaagtgggacttctgtctccccgctatattcccattgctctgaatggttgattgaagggtcagggaactagattttatggctttagttcactgtgattgtacatttatacttggcctatgtgctggccgcacctgaacatagctggtgcttatgccgagttatttgcgatgagtaaatatttagtttctttttcttcatatttataatgttgatctggcatcctcaggctgcagctttattagcttataacttactcatctctatctttaccagcaggctctgtattgttgatatttgcaacttgttttgcttttccattggtggaattgaaataattagtttttaattacataagatgcctgtttgctatttggtggaagatagatgttcatattgaagcagtcacatttgtactgtagttcaataaaagaaaaatgaagtattctgtagcctatatttttcatagagctcatgagcatttactgtacttgctgggtcttgccaagatcatttattccgctgcattgccaaagtgtcttcataccaaattaaaggtggttttaatatatgtttcatggaagttgtttataaaattcaaaggtatttcatttaggtgaaaagtcttatttattaaagtggtttgaataaagtagatcaaaacttccagagatcttaatggctatataggaagaaatatcactcaccataatttaaataaagaataaaaatacttgtattttgtggtggcaaatgtttggtagaactgtaattagaaaaatacaagtatatttgcgtgatggttacactagaagcccagactttacgactacacaatatattcatgtatctaaactgtacttgtaccccctaaatttatttttaaaaaaggaaaaataaaagtatcatgaaaaaacctatttttttttccactgtccttccactactcccataacaaacttatccatggttggtaaaattttacatatttctatccttgaaatgaaggcttcttttaaattccaaagaagtcatggaggcctgtgcatttgaattgtatatgctagtgaggaaaagatttagacatttcaagagcagggttggccaggcgcggtggctcacacctgtaatcccagcactttgggaggccgaggagggcggatcacgaggtcaggagatcgagaccatcctggctaacacagtgaaaccccatctctactaaa

SEQ ID NO: 356985 - DNA, 3617 bp, Homo sapiens
tcattgctctaacactcttagaaatttacagtggttttatattcttgaattacacagtgtgagcagagactccgtttgccatttcctcccggaattacattgatttttttcctgcgaaattttttacttatttttctcccatgttatttccaggaatcctgggcattcccttgccccggaaacgccgtgtccaggccgacctaagccaggagccgcaggggcgggaagccgggggcagggccgggcctgggacgccgcctcaggagccgcgcggactcgggaacctcgggcggggccggcgtgagtacgcccggcacctccggctgctacggtggcgaccgcgaactgatgccgtggaaaacacccttagaacatggctttttggggaggtgaataggggagagtccccaaacgacacctcgccgcgcaccggtccttggtgcagtttgtaaatgtccctcctgtgtcccaaaacgaaaacactcctatattttgtagcgccttccagaatggggcagcggaaactagtgttgggacaaaggaggcgagcggggccttttcggggctcacagaggacccctcggaggcgcggccgccggggagagcgcgacagcaccccgccccccgccagccgggcgggggccgctcccgaggtgacaggagaaggcgggaggtggaggagagaaggtcccgccccacctcgctctcctttacgggaagtgatgtggggccaggcggaaaatacccgccaacgacccaaaaaaggccggcggcgggtggacgcggcgcgcgaggacccgagccaggcggggacaggacggcggggcgagccagacaaaaagtaaccttcctgaagaggacatgtgattggaagttgtcaattgttgaagcattggtaactccagtctctaacgttttagaaaatcataacaagcggttctctaccctgtaaagaacagaaacctggaaatctaaggctcaaagacatccaagtaattggtatctgggagatttgggattcaaacccagctctgcttgacttggtgaactactgagttcttcattatgtctgatggagattatgattacctcatcaagtttttagctttgggagactctggtgtagggaagaccagtgtactttaccaatatacagatggtaaatttaactccaaatttatcacaacagtgggcattgatttcagggaaaaaagagtggtgtacagagccagtgggccggatggagccactggcagaggccagagaatccacctgcagttatgggacacagcagggcaggagaggtttcgtagcttaacgacagcgttcttcagagatgctatgggttttcttctactttttgatctgacaaatgagcaaagtttcctcaatgtcagaaactggataagccagctacagatgcatgcatattgtgaaaacccagatatagtgctgtgtggaaacaagagtgatctggaggaccagagagtagtgaaagaggaggaagccatagcactcgcagagaaatatggaatcccctactttgaaactagtgctgccaatgggacaaacataagccaagcaattgagatgcttctggacctgataatgaagcgaatggaacggtgtgtggacaagtcctggattcctgaaggagtggtgcgatcaaatggtcatgcctctacggatcagttaagtgaagaaaaggagaaaggggcatgtggctgttgagaagtcaagtaagcgacatagtagttcaggtggcccatgcctgggatcttctctatgattgatacatggcacagtgagagattaatgggcattgtgtacaaattgcttctcaccatccccattagacctacgaataaagcatccggttctaaaattaatttgttgcagctttgtaaatatttctttaagattcagcctgagagttaggagaaatatttcagagccaaaagtgccttatacaaccttagcctattatagtaaatcattcaaggattcagaattttgcagtcacagaagagtgtatttattatgtagaatgaatgagggtactgtcacctgccttaatgtaggtaggcccagagtcttacatttaagatcttacatgcagttataaaaccgccacagtcttcaatccagatttgaagactcatgccataggtgacattctaaaataccattaaagccacttaaatgttaaataagaatatacatgcacatcagctcaatgtctttgagtattaattttatgtaagcattctatttaacatgaatataggacaaatcatggctatatctatagaccttggataaactggattgaccaattatacactcacggtgacttttttattggtgggaaggggattggggtggggcaggctggcttaatgtaatatgagcaaccaaagtgggacttctgtctccccgctatattcccattgctctgaatggttgattgaagggtcagggaactagattttatggctttagttcactgtgattgtacatttatacttggcctatgtgctggccgcacctgaacatagctggtgcttatgccgagttatttgcgatgagtaaatatttagtttctttttcttcatatttataatgttgatctggcatcctcaggctgcagctttattagcttataacttactcatctctatctttaccagcaggctctgtattgttgatattaattacataagatgcctgtttgctatttggtggaagatagatgttcatattgaagcagtcacatttgtactgtagttcaataaaagaaaaatgaagtattctgtagcctatatttttcatagagctcatgagcatttactgtacttgctgggtcttgccaagatcatttattccgctgcattgccaaagtgtcttcataccaaattaaaggtggttttaatatatgtttcatggaagttgtttataaaattcaaaggtatttcatttaggtgaaaagtcttatttattaaagtggtttgaataaagtagatcaaaacttccagagatcttaatggctatataggggacgacacttattcacttcaccccatacattttaccattaacggaactaaaccattacgtttgtattttgttgggtgccacactgtgtcgggtagcacactgcacatttcgacacccttcacagtatatttgcgtgatggttacactagaagcccagactttacgactacacaatatattcatgtatctaaactgtacttgtaccccctaaatttatttttaaaaaaggaaaaataaaagtatcatgaaaaaacctatttttttttccactgtccttccactactcccataacaaacttatccatggttggtaaaattttacatatttctatccttgaaatgaaggcttcttttaaattccaaagaagtcatggaggcctgtgcatttgaattgtatatgctagtgaggaaaagatttagacatttcaagagcagggttggccaggcgcggtggctcacacctgtaatcccagcactttgggaggccgaggagggcggatcacgaggtcaggagatcgagaccatcctggctaacacagtgaaaccccatctctactaaa

SEQ ID NO: 356986 - DNA, 999 bp, Homo sapiens
agctcccacccgacgtggtggcctccttgcggtttcctttcgccgtttccgaaccgagggattgctactcgcctttggcttggcggtctctgtgctcgggggtccgaaaactgctggaaggcccccggtctctggaggggagcaggcggtagcgagtttagtgacgtggagcaggcgcagaacagtcggagatttgaagagatttcctgggtgtggagtgtgactttccaaaaccagcttttccttgagctgtatttgttgcagcaatgtttaggagattgacttttgcacaactgctttttgccactgtccttggaattgctggaggagtatatatttttcaaccagtatttgaacagtatgccaaagatcagaaggaattaaaagaaaagatgcagttggtacaagaatcagaagagaagaaaagttaatactacatggagttaggcctggcgcagtggctcacgcctgtaatcccagcactttgggaggccgaggcgggtggatcaggtggtcaggagttcaagaccagcctgaccaacatggtgaaaccctgtctctactgaaaatacaaaaatcagccaggcttggtggcatgcgcctgtaatcccagctacttgggaggctgaggcaggagcatcacttgaacctgggaggcagaggtggcagtgagtcaagatcacgctgctgcactccagcctgggtgacagagcgagactccatctaaaaaaacaaaaagcaaaaaaacccacaaatacctcatggagatgaactgtaataattgcttaaagttccatttaattatgttaactctaatctagcaaaaacatagatgtacttaaaaataaatcatggataatgattttttaacctaaaactgttaattttaatgtttattgtatatttgtcattttatgtctttttaccaggacagataagtaatttccttttaaacaaaagtgaatattttaggaatattttctacttgaggtttatttt

SEQ ID NO: 356987 - DNA, 970 bp, Homo sapiens
tcattgctctaacactcttagaaatttacagtggttttatattcttgaattacacagtgtgagcagagactccgtttgccatttcctcccggaattacattgatttttttcctgcgaaattttttacttatttttctcccatgttatttccaggaatcctgggcattcccttgccccggaaacgccgtgtccaggccgacctaagccaggagccgcaggggcgggaagccgggggcagggccgggcctgggacgccgcctcaggagccgcgcggactcgggaacctcgggcggggccggcgtgagtacgcccggcacctccggctgctacggtggcgaccgcgaactgatgccgtggaaaacacccttagaacatggctttttggggaggtgaataggggagagtccccaaacgacacctcgccgcgcaccggtccttggtgcagtttgtaaatgtccctcctgtgtcccaaaacgaaaacactcctatattttgtagcgccttccagaatggggcagcggaaactagtgttgggacaaaggaggcgagcggggccttttcggggctcacagaggacccctcggaggcgcggccgccggggagagcgcgacagcaccccgccccccgccagccgggcgggggccgctcccgaggtgacaggagaaggcgggaggtggaggagagaaggtcccgccccacctcgctctcctttacgggaagtgatgtggggccaggcggaaaatacccgccaacgacccaaaaaaggccggcggcgggtggacgcggcgcgcgaggacccgagccaggcggggacaggacggcggggcgagccaggtgagggggcctgaggagcgggaggcgcgcggcgggtccggtccctccgggagggccgagcgaggcgtccccctggggccgtcctagggctggggtccgagtgcgccgcccttcctccccgcctccaggcgcccga

SEQ ID NO: 356988 - DNA, 628 bp, Homo sapiens
tcatcttgtatatttgtattctatcgattctctaatttgaattatcaagagcaaaggtcactctcctttccctccacatgttgttacctcagttgtctctgtcttccagaatcccctactttgaaactagtgctgccaatgggacaaacataagccaagcaattgagatgcttctggacctgataatgaagcgaatggaacggtgtgtggacaagtcctggattcctgaaggagtggtgcgatcaaatggtcatgcctctacggatcagttaagtgaagaaaaggagaaaggggcatgtggctgttgagaagtcaagtaagcgacatagtagttcaggtggcccatgcctgggatcttctctatgattgatacatggcacagtgagagattaatgggcattgtgtacaaattgcttctcaccatccccattagacctacgaataaagcatccggttctaaaattaatttgttgcagctttgtaaatatttctttaagattcagcctgagagttaggagaaatatttcagagccaaaagtgccttatacaaccttagcctattatagtaaatcattcaaggattcagaattttgcagtcacagaagagtgtatttattatgtagaatga

SEQ ID NO: 356989 - DNA, 316 bp, Homo sapiens
ccttccctaattcacttcctgtactccttatgtatttatattcttgttttaattagtaacatattataaaaatattgttcactccagtgcaaagtagtgacataacatcttttaaaaggacattgtactaagtgatggctttgctttccatttttgtatgcagatttgaagagatttcctgggtgtggagtgtgactttccaaaaccagcttttccttgagctgtatttgttgcagcaatgtttaggagattgacttttgcacaactgctttttgccactgtccttggaattgctggaggagtatatatttttcaa

SEQ ID NO: 356990 - DNA, 379 bp, Homo sapiens
gaggcgggtggatcaggtggtcaggagttcaagaccagcctgaccaacatggtgaaaccctgtctctactgaaaatacaaaaatcagccaggcttggtggcatgcgcctgtaatcccagctacttgggaggctgaggcaggagcatcacttgaacctgggaggcagaggtggcagtgagtcaagatcacgctgctgcactccagcctgggtgacagagcgagactccatctaaaaaaacaaaaagcaaaaaaacccacaaatacctcatggagatgaactgtaataattgcttaaagttccatttaattatgttaactctaatctagcaaaaacatagatgtacttaaaaataaatcatggataatgattttttaacct

SEQ ID NO: 356991 - DNA, 3637 bp, Homo sapiens
tcattgctctaacactcttagaaatttacagtggttttatattcttgaattacacagtgtgagcagagactccgtttgccatttcctcccggaattacattgatttttttcctgcgaaattttttacttatttttctcccatgttatttccaggaatcctgggcattcccttgccccggaaacgccgtgtccaggccgacctaagccaggagccgcaggggcgggaagccgggggcagggccgggcctgggacgccgcctcaggagccgcgcggactcgggaacctcgggcggggccggcgtgagtacgcccggcacctccggctgctacggtggcgaccgcgaactgatgccgtggaaaacacccttagaacatggctttttggggaggtgaataggggagagtccccaaacgacacctcgccgcgcaccggtccttggtgcagtttgtaaatgtccctcctgtgtcccaaaacgaaaacactcctatattttgtagcgccttccagaatggggcagcggaaactagtgttgggacaaaggaggcgagcggggccttttcggggctcacagaggacccctcggaggcgcggccgccggggagagcgcgacagcaccccgccccccgccagccgggcgggggccgctcccgaggtgacaggagaaggcgggaggtggaggagagaaggtcccgccccacctcgctctcctttacgggaagtgatgtggggccaggcggaaaatacccgccaacgacccaaaaaaggccggcggcgggtggacgcggcgcgcgaggacccgagccaggcggggacaggacggcggggcgagccagacaaaaagtaaccttcctgaagaggacatgtgattggaagttgtcaattgttgaagcattggtaactccagtctctaacgttttagaaaatcataacaagcggttctctaccctgtaaagaacagaaacctggaaatctaaggctcaaagacatccaagtaattggtatctgggagatttgggattcaaacccagctctgcttgacttggtgaactactgagttcttcattatgtctgatggagattatgattacctcatcaagtttttagctttgggagactctggtgtagggaagaccagtgtactttaccaatatacagatggtaaatttaactccaaatttatcacaacagtgggcattgatttcagggaaaaaagagtggtgtacagagccagtgggccggatggagccactggcagaggccagagaatccacctgcagttatgggacacagcagggcaggagaggtttcgtagcttaacgacagcgttcttcagagatgctatgggttttcttctactttttgatctgacaaatgagcaaagtttcctcaatgtcagaaactggataagccagctacagatgcatgcatattgtgaaaacccagatatagtgctgtgtggaaacaagagtgatctggaggaccagagagtagtgaaagaggaggaagccatagcactcgcagagaaatatggaatcccctactttgaaactagtgctgccaatgggacaaacataagccaagcaattgagatgcttctggacctgataatgaagcgaatggaacggtgtgtggacaagtcctggattcctgaaggagtggtgcgatcaaatggtcatgcctctacggatcagttaagtgaagaaaaggagaaaggggcatgtggctgttgagaagtcaagtaagcgacatagtagttcaggtggcccatgcctgggatcttctctatgattgatacatggcacagtgagagattaatgggcattgtgtacaaattgcttctcaccatccccattagacctacgaataaagcatccggttctaaaattaatttgttgcagctttgtaaatatttctttaagattcagcctgagagttaggagaaatatttcagagccaaaagtgccttatacaaccttagcctattatagtaaatcattcaaggattcagaattttgcagtcacagaagagtgtatttattatgtagaatgaatgagggtactgtcacctgccttaatgtaggtaggcccagagtcttacatttaagatcttacatgcagttataaaaccgccacagtcttcaatccagatttgaagactcatgccataggtgacattctaaaataccattaaagccacttaaatgttaaataagaatatacatgcacatcagctcaatgtctttgagtattaattttatgtaagcattctatttaacatgaatataggacaaatcatggctatatctatagaccttggataaactggattgaccaattatacactcacggtgacttttttattggtgggaaggggattggggtggggcaggctggcttaatgtaatatgagcaaccaaagtgggacttctgtctccccgctatattcccattgctctgaatggttgattgaagggtcagggaactagattttatggctttagttcactgtgattgtacatttatacttggcctatgtgctggccgcacctgaacatagctggtgcttatgccgagttatttgcgatgagtaaatatttagtttctttttcttcatatttataatgttgatctggcatcctcaggctgcagctttattagcttataacttactcatctctatctttaccagcaggctctgtattgttgatatttgcaacttgttttgcttttccattggtggaattgaaataattagtttttaattacataagatgcctgtttgctatttggtggaagatagatgttcatattgaagcagtcacatttgtactgtagttcaataaaagaaaaatgaagtattctgtagcctatatttttcatagagctcatgagcatttactgtacttgctgggtcttgccaagatcatttattccgctgcattgccaaagtgtcttcataccaaattaaaggtggttttaatatatgtttcatggaagttgtttataaaattcaaaggtatttcatttaggtgaaaagtcttatttattaaagtggtttgaataaagtagatcaaaacttccagagatcttaatggctatataggaagaaatatcactcaccataatttaaataaagaataaaaatacttgtattttgtggtggcaaatgtttggtagaactgtaattagaaaaatacaagtatatttgcgtgatggttacactagaagcccagactttacgactacacaatatattcatgtatctaaactgtacttgtaccccctaaatttatttttaaaaaaggaaaaataaaagtatcatgaaaaaacctatttttttttccactgtccttccactactcccataacaaacttatccatggttggtaaaattttacatatttctatccttgaaatgaaggcttcttttaaattccaaagaagtcatggaggcctgtgcatttgaattgtatatgctagtgaggaaaagatttagacatttcaagagcagggttggccaggcgcggtggctcacacctgtaatcccagcactttgggaggccgaggagggcggatcacgaggtcaggagatcgagaccatcctggctaacacagtgaaaccccatctctactaaa

SEQ ID NO: 356992 - DNA, 3548 bp, Homo sapiens
tcattgctctaacactcttagaaatttacagtggttttatattcttgaattacacagtgtgagcagagactccgtttgccatttcctcccggaattacattgatttttttcctgcgaaattttttacttatttttctcccatgttatttccaggaatcctgggcattcccttgccccggaaacgccgtgtccaggccgacctaagccaggagccgcaggggcgggaagccgggggcagggccgggcctgggacgccgcctcaggagccgcgcggactcgggaacctcgggcggggccggcgtgagtacgcccggcacctccggctgctacggtggcgaccgcgaactgatgccgtggaaaacacccttagaacatggctttttggggaggtgaataggggagagtccccaaacgacacctcgccgcgcaccggtccttggtgcagtttgtaaatgtccctcctgtgtcccaaaacgaaaacactcctatattttgtagcgccttccagaatggggcagcggaaactagtgttgggacaaaggaggcgagcggggccttttcggggctcacagaggacccctcggaggcgcggccgccggggagagcgcgacagcaccccgccccccgccagccgggcgggggccgctcccgaggtgacaggagaaggcgggaggtggaggagagaaggtcccgccccacctcgctctcctttacgggaagtgatgtggggccaggcggaaaatacccgccaacgacccaaaaaaggccggcggcgggtggacgcggcgcgcgaggacccgagccaggcggggacaggacggcggggcgagccagacaaaaagtaaccttcctgaagaggacatgtgattggaagttgtcaattgttgaagcattggtaactccagtctctaacgttttagaaaatcataacaagcggttctctaccctgtaaaggtgaactactgagttcttcattatgtctgatggagattatgattacctcatcaagtttttagctttgggagactctggtgtagggaagaccagtgtactttaccaatatacagatggtaaatttaactccaaatttatcacaacagtgggcattgatttcagggaaaaaagagtggtgtacagagccagtgggccggatggagccactggcagaggccagagaatccacctgcagttatgggacacagcagggcaggagaggtttcgtagcttaacgacagcgttcttcagagatgctatgggttttcttctactttttgatctgacaaatgagcaaagtttcctcaatgtcagaaactggataagccagctacagatgcatgcatattgtgaaaacccagatatagtgctgtgtggaaacaagagtgatctggaggaccagagagtagtgaaagaggaggaagccatagcactcgcagagaaatatggaatcccctactttgaaactagtgctgccaatgggacaaacataagccaagcaattgagatgcttctggacctgataatgaagcgaatggaacggtgtgtggacaagtcctggattcctgaaggagtggtgcgatcaaatggtcatgcctctacggatcagttaagtgaagaaaaggagaaaggggcatgtggctgttgagaagtcaagtaagcgacatagtagttcaggtggcccatgcctgggatcttctctatgattgatacatggcacagtgagagattaatgggcattgtgtacaaattgcttctcaccatccccattagacctacgaataaagcatccggttctaaaattaatttgttgcagctttgtaaatatttctttaagattcagcctgagagttaggagaaatatttcagagccaaaagtgccttatacaaccttagcctattatagtaaatcattcaaggattcagaattttgcagtcacagaagagtgtatttattatgtagaatgaatgagggtactgtcacctgccttaatgtaggtaggcccagagtcttacatttaagatcttacatgcagttataaaaccgccacagtcttcaatccagatttgaagactcatgccataggtgacattctaaaataccattaaagccacttaaatgttaaataagaatatacatgcacatcagctcaatgtctttgagtattaattttatgtaagcattctatttaacatgaatataggacaaatcatggctatatctatagaccttggataaactggattgaccaattatacactcacggtgacttttttattggtgggaaggggattggggtggggcaggctggcttaatgtaatatgagcaaccaaagtgggacttctgtctccccgctatattcccattgctctgaatggttgattgaagggtcagggaactagattttatggctttagttcactgtgattgtacatttatacttggcctatgtgctggccgcacctgaacatagctggtgcttatgccgagttatttgcgatgagtaaatatttagtttctttttcttcatatttataatgttgatctggcatcctcaggctgcagctttattagcttataacttactcatctctatctttaccagcaggctctgtattgttgatatttgcaacttgttttgcttttccattggtggaattgaaataattagtttttaattacataagatgcctgtttgctatttggtggaagatagatgttcatattgaagcagtcacatttgtactgtagttcaataaaagaaaaatgaagtattctgtagcctatatttttcatagagctcatgagcatttactgtacttgctgggtcttgccaagatcatttattccgctgcattgccaaagtgtcttcataccaaattaaaggtggttttaatatatgtttcatggaagttgtttataaaattcaaaggtatttcatttaggtgaaaagtcttatttattaaagtggtttgaataaagtagatcaaaacttccagagatcttaatggctatataggaagaaatatcactcaccataatttaaataaagaataaaaatacttgtattttgtggtggcaaatgtttggtagaactgtaattagaaaaatacaagtatatttgcgtgatggttacactagaagcccagactttacgactacacaatatattcatgtatctaaactgtacttgtaccccctaaatttatttttaaaaaaggaaaaataaaagtatcatgaaaaaacctatttttttttccactgtccttccactactcccataacaaacttatccatggttggtaaaattttacatatttctatccttgaaatgaaggcttcttttaaattccaaagaagtcatggaggcctgtgcatttgaattgtatatgctagtgaggaaaagatttagacatttcaagagcagggttggccaggcgcggtggctcacacctgtaatcccagcactttgggaggccgaggagggcggatcacgaggtcaggagatcgagaccatcctggctaacacagtgaaaccccatctctactaaa

SEQ ID NO: 356993 - DNA, 3651 bp, Homo sapiens
tcattgctctaacactcttagaaatttacagtggttttatattcttgaattacacagtgtgagcagagactccgtttgccatttcctcccggaattacattgatttttttcctgcgaaattttttacttatttttctcccatgttatttccaggaatcctgggcattcccttgccccggaaacgccgtgtccaggccgacctaagccaggagccgcaggggcgggaagccgggggcagggccgggcctgggacgccgcctcaggagccgcgcggactcgggaacctcgggcggggccggcgtgagtacgcccggcacctccggctgctacggtggcgaccgcgaactgatgccgtggaaaacacccttagaacatggctttttggggaggtgaataggggagagtccccaaacgacacctcgccgcgcaccggtccttggtgcagtttgtaaatgtccctcctgtgtcccaaaacgaaaacactcctatattttgtagcgccttccagaatggggcagcggaaactagtgttgggacaaaggaggcgagcggggccttttcggggctcacagaggacccctcggaggcgcggccgccggggagagcgcgacagcaccccgccccccgccagccgggcgggggccgctcccgaggtgacaggagaaggcgggaggtggaggagagaaggtcccgccccacctcgctctcctttacgggaagtgatgtggggccaggcggaaaatacccgccaacgacccaaaaaaggccggcggcgggtggacgcggcgcgcgaggacccgagccaggcggggacaggacggcggggcgagccagacaaaaagtaaccttcctgaagaggacatgtgattggaagttgtcaattgttgaagcattggtaactccagtctctaacgttttagaaaatcataacaagcggttctctaccctgtaaagatttatgtgatcccaatgcaatgcaatgcaattccaataagaatccccatatggtttttgaggaactcagatggaaatgtgaagggttcatgtccttggtaaggtgaactactgagttcttcattatgtctgatggagattatgattacctcatcaagtttttagctttgggagactctggtgtagggaagaccagtgtactttaccaatatacagatggtaaatttaactccaaatttatcacaacagtgggcattgatttcagggaaaaaagagtggtgtacagagccagtgggccggatggagccactggcagaggccagagaatccacctgcagttatgggacacagcagggcaggagaggtttcgtagcttaacgacagcgttcttcagagatgctatgggttttcttctactttttgatctgacaaatgagcaaagtttcctcaatgtcagaaactggataagccagctacagatgcatgcatattgtgaaaacccagatatagtgctgtgtggaaacaagagtgatctggaggaccagagagtagtgaaagaggaggaagccatagcactcgcagagaaatatggaatcccctactttgaaactagtgctgccaatgggacaaacataagccaagcaattgagatgcttctggacctgataatgaagcgaatggaacggtgtgtggacaagtcctggattcctgaaggagtggtgcgatcaaatggtcatgcctctacggatcagttaagtgaagaaaaggagaaaggggcatgtggctgttgagaagtcaagtaagcgacatagtagttcaggtggcccatgcctgggatcttctctatgattgatacatggcacagtgagagattaatgggcattgtgtacaaattgcttctcaccatccccattagacctacgaataaagcatccggttctaaaattaatttgttgcagctttgtaaatatttctttaagattcagcctgagagttaggagaaatatttcagagccaaaagtgccttatacaaccttagcctattatagtaaatcattcaaggattcagaattttgcagtcacagaagagtgtatttattatgtagaatgaatgagggtactgtcacctgccttaatgtaggtaggcccagagtcttacatttaagatcttacatgcagttataaaaccgccacagtcttcaatccagatttgaagactcatgccataggtgacattctaaaataccattaaagccacttaaatgttaaataagaatatacatgcacatcagctcaatgtctttgagtattaattttatgtaagcattctatttaacatgaatataggacaaatcatggctatatctatagaccttggataaactggattgaccaattatacactcacggtgacttttttattggtgggaaggggattggggtggggcaggctggcttaatgtaatatgagcaaccaaagtgggacttctgtctccccgctatattcccattgctctgaatggttgattgaagggtcagggaactagattttatggctttagttcactgtgattgtacatttatacttggcctatgtgctggccgcacctgaacatagctggtgcttatgccgagttatttgcgatgagtaaatatttagtttctttttcttcatatttataatgttgatctggcatcctcaggctgcagctttattagcttataacttactcatctctatctttaccagcaggctctgtattgttgatatttgcaacttgttttgcttttccattggtggaattgaaataattagtttttaattacataagatgcctgtttgctatttggtggaagatagatgttcatattgaagcagtcacatttgtactgtagttcaataaaagaaaaatgaagtattctgtagcctatatttttcatagagctcatgagcatttactgtacttgctgggtcttgccaagatcatttattccgctgcattgccaaagtgtcttcataccaaattaaaggtggttttaatatatgtttcatggaagttgtttataaaattcaaaggtatttcatttaggtgaaaagtcttatttattaaagtggtttgaataaagtagatcaaaacttccagagatcttaatggctatataggaagaaatatcactcaccataatttaaataaagaataaaaatacttgtattttgtggtggcaaatgtttggtagaactgtaattagaaaaatacaagtatatttgcgtgatggttacactagaagcccagactttacgactacacaatatattcatgtatctaaactgtacttgtaccccctaaatttatttttaaaaaaggaaaaataaaagtatcatgaaaaaacctatttttttttccactgtccttccactactcccataacaaacttatccatggttggtaaaattttacatatttctatccttgaaatgaaggcttcttttaaattccaaagaagtcatggaggcctgtgcatttgaattgtatatgctagtgaggaaaagatttagacatttcaagagcagggttggccaggcgcggtggctcacacctgtaatcccagcactttgggaggccgaggagggcggatcacgaggtcaggagatcgagaccatcctggctaacacagtgaaaccccatctctactaaa

SEQ ID NO: 356994 - DNA, 2651 bp, Homo sapiens
gaggaaacacactgcagtggcttttggggctcagcattcaggagttttcagcataaggtgaactactgagttcttcattatgtctgatggagattatgattacctcatcaagtttttagctttgggagactctggtgtagggaagaccagtgtactttaccaatatacagatggtaaatttaactccaaatttatcacaacagtgggcattgatttcagggaaaaaagagtggtgtacagagccagtgggccggatggagccactggcagaggccagagaatccacctgcagttatgggacacagcagggcaggagaggtttcgtagcttaacgacagcgttcttcagagatgctatgggttttcttctactttttgatctgacaaatgagcaaagtttcctcaatgtcagaaactggataagccagctacagatgcatgcatattgtgaaaacccagatatagtgctgtgtggaaacaagagtgatctggaggaccagagagtagtgaaagaggaggaagccatagcactcgcagagaaatatggaatcccctactttgaaactagtgctgccaatgggacaaacataagccaagcaattgagatgcttctggacctgataatgaagcgaatggaacggtgtgtggacaagtcctggattcctgaaggagtggtgcgatcaaatggtcatgcctctacggatcagttaagtgaagaaaaggagaaaggggcatgtggctgttgagaagtcaagtaagcgacatagtagttcaggtggcccatgcctgggatcttctctatgattgatacatggcacagtgagagattaatgggcattgtgtacaaattgcttctcaccatccccattagacctacgaataaagcatccggttctaaaattaatttgttgcagctttgtaaatatttctttaagattcagcctgagagttaggagaaatatttcagagccaaaagtgccttatacaaccttagcctattatagtaaatcattcaaggattcagaattttgcagtcacagaagagtgtatttattatgtagaatgaatgagggtactgtcacctgccttaatgtaggtaggcccagagtcttacatttaagatcttacatgcagttataaaaccgccacagtcttcaatccagatttgaagactcatgccataggtgacattctaaaataccattaaagccacttaaatgttaaataagaatatacatgcacatcagctcaatgtctttgagtattaattttatgtaagcattctatttaacatgaatataggacaaatcatggctatatctatagaccttggataaactggattgaccaattatacactcacggtgacttttttattggtgggaaggggattggggtggggcaggctggcttaatgtaatatgagcaaccaaagtgggacttctgtctccccgctatattcccattgctctgaatggttgattgaagggtcagggaactagattttatggctttagttcactgtgattgtacatttatacttggcctatgtgctggccgcacctgaacatagctggtgcttatgccgagttatttgcgatgagtaaatatttagtttctttttcttcatatttataatgttgatctggcatcctcaggctgcagctttattagcttataacttactcatctctatctttaccagcaggctctgtattgttgatatttgcaacttgttttgcttttccattggtggaattgaaataattagtttttaattacataagatgcctgtttgctatttggtggaagatagatgttcatattgaagcagtcacatttgtactgtagttcaataaaagaaaaatgaagtattctgtagcctatatttttcatagagctcatgagcatttactgtacttgctgggtcttgccaagatcatttattccgctgcattgccaaagtgtcttcataccaaattaaaggtggttttaatatatgtttcatggaagttgtttataaaattcaaaggtatttcatttaggtgaaaagtcttatttattaaagtggtttgaataaagtagatcaaaacttccagagatcttaatggctatataggaagaaatatcactcaccataatttaaataaagaataaaaatacttgtattttgtggtggcaaatgtttggtagaactgtaattagaaaaatacaagtatatttgcgtgatggttacactagaagcccagactttacgactacacaatatattcatgtatctaaactgtacttgtaccccctaaatttatttttaaaaaaggaaaaataaaagtatcatgaaaaaacctatttttttttccactgtccttccactactcccataacaaacttatccatggttggtaaaattttacatatttctatccttgaaatgaaggcttcttttaaattccaaagaagtcatggaggcctgtgcatttgaattgtatatgctagtgaggaaaagatttagacatttcaagagcagggttggccaggcgcggtggctcacacctgtaatcccagcactttgggaggccgaggagggcggatcacgaggtcaggagatcgagaccatcctggctaacacagtgaaaccccatctctactaaa

SEQ ID NO: 356995 - DNA, 1519 bp, Homo sapiens
tcattgctctaacactcttagaaatttacagtggttttatattcttgaattacacagtgtgagcagagactccgtttgccatttcctcccggaattacattgatttttttcctgcgaaattttttacttatttttctcccatgttatttccaggaatcctgggcattcccttgccccggaaacgccgtgtccaggccgacctaagccaggagccgcaggggcgggaagccgggggcagggccgggcctgggacgccgcctcaggagccgcgcggactcgggaacctcgggcggggccggcgtgagtacgcccggcacctccggctgctacggtggcgaccgcgaactgatgccgtggaaaacacccttagaacatggctttttggggaggtgaataggggagagtccccaaacgacacctcgccgcgcaccggtccttggtgcagtttgtaaatgtccctcctgtgtcccaaaacgaaaacactcctatattttgtagcgccttccagaatggggcagcggaaactagtgttgggacaaaggaggcgagcggggccttttcggggctcacagaggacccctcggaggcgcggccgccggggagagcgcgacagcaccccgccccccgccagccgggcgggggccgctcccgaggtgacaggagaaggcgggaggtggaggagagaaggtcccgccccacctcgctctcctttacgggaagtgatgtggggccaggcggaaaatacccgccaacgacccaaaaaaggccggcggcgggtggacgcggcgcgcgaggacccgagccaggcggggacaggacggcggggcgagccagacaaaaagtaaccttcctgaagaggacatgtgattggaagttgtcaattgttgaagcattggtaactccagtctctaacgttttagaaaatcataacaagcggttctctaccctgtaaaggtgaactactgagttcttcattatgtctgatggagattatgattacctcatcaagtttttagctttgggagactctggtgtagggaagaccagtgtactttaccaatatacagatggtaaatttaactccaaatttatcacaacagtgggcattgatttcagggaaaaaagagtggtgtacagagccagtgggccggatggagccactggcagaggccagagaatccacctgcagttatgggacacagcagggcaggagaggtttcgtagcttaacgacagcgttcttcagagatgctatgggttttcttctactttttgatctgacaaatgagcaaagtttcctcaatgtcagaaactggataagccagctacagatgcatgcatattgtgaaaacccagatatagtgctgtgtggaaacaagagtgatctggaggaccagagagtagtgaaagaggaggaagccatagcactcgcagagaaatatggatccctactttgaacgatggtgccaagggacaacgcagcaatggaagtctggcccgtagcatgacggggggcaccg

SEQ ID NO: 356996 - DNA, 1066 bp, Homo sapiens
agctcccacccgacgtggtggcctccttgcggtttcctttcgccgtttccgaaccgagggattgctactcgcctttggcttggcggtctctgtgctcgggggtccgaaaactgctggaaggcccccggtctctggaggggagcaggcggtagcgagtttagtgacgtggagcaggcgcagaacagtcggaggtacctgagtggttattaaaaacggtaacggtaattgtagacgtcagtgttggtgttaacatttcagatttgaagagatttcctgggtgtggagtgtgactttccaaaaccagcttttccttgagctgtatttgttgcagcaatgtttaggagattgacttttgcacaactgctttttgccactgtccttggaattgctggaggagtatatatttttcaaccagtatttgaacagtatgccaaagatcagaaggaattaaaagaaaagatgcagttggtacaagaatcagaagagaagaaaagttaatactacatggagttaggcctggcgcagtggctcacgcctgtaatcccagcactttgggaggccgaggcgggtggatcaggtggtcaggagttcaagaccagcctgaccaacatggtgaaaccctgtctctactgaaaatacaaaaatcagccaggcttggtggcatgcgcctgtaatcccagctacttgggaggctgaggcaggagcatcacttgaacctgggaggcagaggtggcagtgagtcaagatcacgctgctgcactccagcctgggtgacagagcgagactccatctaaaaaaacaaaaagcaaaaaaacccacaaatacctcatggagatgaactgtaataattgcttaaagttccatttaattatgttaactctaatctagcaaaaacatagatgtacttaaaaataaatcatggataatgattttttaacctaaaactgttaattttaatgtttattgtatatttgtcattttatgtctttttaccaggacagataagtaatttccttttaaacaaaagtgaatattttaggaatattttctacttgaggtttatttt

SEQ ID NO: 356997 - DNA, 973 bp, Homo sapiens
agctcccacccgacgtggtggcctccttgcggtttcctttcgccgtttccgaaccgagggattgctactcgcctttggcttggcggtctctgtgctcgggggtccgaaaactgctggaaggcccccggtctctggaggggagcaggcggtagcgagtttagtgacgtggagcaggcgcagaacagtcggaggtacctgagtggttattaaaaacggccttgagctgtatttgttgcagcaatgtttaggagattgacttttgcacaactgctttttgccactgtccttggaattgctggaggagtatatatttttcaaccagtatttgaacagtatgccaaagatcagaaggaattaaaagaaaagatgcagttggtacaagaatcagaagagaagaaaagttaatactacatggagttaggcctggcgcagtggctcacgcctgtaatcccagcactttgggaggccgaggcgggtggatcaggtggtcaggagttcaagaccagcctgaccaacatggtgaaaccctgtctctactgaaaatacaaaaatcagccaggcttggtggcatgcgcctgtaatcccagctacttgggaggctgaggcaggagcatcacttgaacctgggaggcagaggtggcagtgagtcaagatcacgctgctgcactccagcctgggtgacagagcgagactccatctaaaaaaacaaaaagcaaaaaaacccacaaatacctcatggagatgaactgtaataattgcttaaagttccatttaattatgttaactctaatctagcaaaaacatagatgtacttaaaaataaatcatggataatgattttttaacctaaaactgttaattttaatgtttattgtatatttgtcattttatgtctttttaccaggacagataagtaatttccttttaaacaaaagtgaatattttaggaatattttctacttgaggtttatttt

SEQ ID NO: 356998 - DNA, 640 bp, Homo sapiens
aaaaaaattacgtttctgagtcctgaaaaattattaataaatatttgttatatagtttctttgaacatgtggtcactctgcctgcaaacgtaaagacttttaattttcatagagtgaaatatacacatattcctctgaagataaaccttaggtgtaagaaaattatgaagtgagtgtttggtaaatatgcatttgtacatattttcagaagaaaacacaattattggaacaaaataagtttttaggtgattaatggaaaactaaacaccttgaatatgctgaaagcaaatgtatactttctgctttgtatggaatttattaatataaaattttatggcttatggctcggattctccccagaatccgtgtattaaagcacaggcaactttgtctccagaaataacactcttgagtacaacaataaaagccctcttcaaacacactcaaaaaattatttttaacgcttattttaataaaaatttaaccaaaattgaataattggatacatttttattgttctatgtgtgtgtgaatgtataaaatgacacataaaggaataataatttaagccagaaaaaaagatgttagttaatatttgtaatgaataaaactggaaagtagttattatttgcagatgaca

SEQ ID NO: 356999 - DNA, 1587 bp, Homo sapiens
acagaattaccttaaaagggagtcttatgaaactgtattataaaatactttgttaagcaaaattgcatgtgtgtgttgaacccccaaacactcaaagtactttgcttaacaaaagtattttataatacagtttcatacagaattaccttaaaagggagtcttatgttttcaactacagatagttgtaagggatcatacagaagatattgatgatagttgaaatattcttagaaggggtgtgtatgtctagctgtgtctaccatgtgtatgtattcttgacaagcagtataaaatacctgtgatttttctttacattagggataatgcataaggaattaatcttcatatatattatcatccctaatgtagcagggggaagtatttaattgcccatgatatgtattttacttatactatgccagagaggaaactataaagtaattacacatgtaatcttgggtttttcacatatgtaggtattcattttgagtaggttgaagaagaaaaaaaatatttaaatgaattgaattcctgatgggatagtatcaataagtatttaaaagccagtattctaaaaataataaagggtagggtcatttttgagtttgtttttcttttgctattgttaatattcaaaattaaagtgttacattggtacctgttgtcttaatgcatttattgagaacagcattgagatgatgaacaaggggttagcaatagcaaactctataattattttgactaattacttaagaggaaaacagtataagtatctcattcagtatttagcaattctgtaaaataagtattatctctatttttcagatgaggaagtaagggtttagcaaggttaagagatctatccaatttacacagcaagttagtagttgagcctgaccatgagtcttctgactctgttcttttcactatgcaatacgcaaacaataaaatgttatacaaatggaatataaagttatttattctttaaaaatgcacatatgatatgatttcagtaagtgtgtggctgtttattttggctatgttaagaatacgggatacagtagatgacaggggaaccatcctcaaaacaggggacatttacatgatggataagaaagccagaatcctccttttcttactgaatcctggcagccagatctttaccatcccatggtggaataccgaagagtcttctctgtgaaatctgaccaatgcaagtgaaaaggcctcattaagatcttgatgtcagacatgtcccggctaaactgcccagctagatgacactacagtgaaaatcatagttggcaatcccaccatcccacgcattatgtctagaccttgcagttagtcttttagtcctgtgctcttaaaaatgagcaaacaaccaaggattacaaataaatgaaagagaaaaaacagtctggggaaaacagaggaaacaggctatgaagggtaaggagaacatcaaaagaaaaagtattttcagaaggatgttgcaaccatgagtgagtcaagggcagggtacttttaaaaagttgggtttcaaaaaaacaaaaagagctcttagaaaataatatgacagcatag

SEQ ID NO: 357000 - DNA, 596 bp, Homo sapiens
gctgaagaaaagccttggaggaagtagaccaaattttaaacaggagctgtttttgagtggtgggactattggtaattttttaaacacttttgtgtcttatctatatttttctttaatgggaaaatgagtttgctcagcattttattggaaatattttgttttttagttttgataaaagtatggttgataagcaattaacatagtaccaagtaattttaatgtaattaacaagcttttaattaacaagatttttgtttttattttatttttaggccagaaatgtacacacaggagagctggctgcagtaaaaatcattaaattggagcctggagatgatttttctttgattcaacaagaaatatttatggttaaagaatgtaaacattgtaacatcgttgcctactttgggagttatcttaggtaagagaaaaaaaagcatcatctctctctgtattttatatattctttgctactacactctctcccttgtatgtaagtgctactatatttgtatgtttttaaacactgcaaagttctaaattttttaaggttttcctatttctacggttttcccctattacatattaataatggt

SEQ ID NO: 357001 - DNA, 499 bp, Homo sapiens
taatcccggctacttgggaggcggaggcaagtgaatcacttgaacccaggagatggcagctgcagtgagccaaaatcactgccactgcactccagcctgggcagtgagactctgtctcaaaaacaaaaacaaatctttaaaatatagtaaacattgatttacttatctaggtttttttctccccaaaaaagacattctagtttttcttattcaataagaatttaagtagaaaatttaggagtcacatttacagttttgctgatacattctttttttttttttttaaacttttagggtcttgcctatttgcatactaaaggcaaaatgcatagagatatcaaaggtgctaatattttattgacagaccatggcgatgtaaaattagctgactttggtgtggctgcaaaaataacagctaccattgcaaaacgaaaatctttcattggcaccccttactggtaagacattactgtgattgaatttgatccattttcatttc

SEQ ID NO: 357002 - DNA, 4926 bp, Homo sapiens
ggcgccgacccatgctggctgggaacgtgtctcccggtgacgcagccccgggtggggaacgtggtgcggcggcggcggcggcggcgactgtacgcgcctccgccgcccccgagaggacgcgccgtgcagcggctgagtggcggcggcggcgacggcaaacccggagctgccggccggcgcgcgggaggaggacgcgggtgcggtctaggaaacggagctgcgggcggaggctccatgttgggaagcggcgccgttcgtgcttgttagcgggaatccgggagccgcggggtgagctggcgggggccgggccctaagtgaagatggaggccccgctgcggcctgccgcggacatcctgaggcggaacccgcagcaggactacgaactcgtccagagggtcggcagcggcacctacggggacgtctataaggccagaaatgtacacacaggagagctggctgcagtaaaaatcattaaattggagcctggagatgatttttctttgattcaacaagaaatatttatggttaaagaatgtaaacattgtaacatcgttgcctactttgggagttatcttagtcgggaaaaactatggatttgtatggaatactgtggtggcggatcacttcaagatatttaccatgttactggaccattatcagaattgcaaatagcctatgtatgcagagaaaccttacagggtcttgcctatttgcatactaaaggcaaaatgcatagagatatcaaaggtgctaatattttattgacagaccatggcgatgtaaaattagctgactttggtgtggctgcaaaaataacagctaccattgcaaaacgaaaatctttcattggcaccccttactggatggccccagaagttgcagcagtagagaagaatggtggctacaaccaactctgtgatatctgggcagtaggaataacagcaattgaacttggagaacttcagccacctatgtttgatctccacccaatgagggctctcttcttaatgtcaaaaagtaattttcagcctccaaaactaaaggacaaaacaaaatggtcatcaacattccataattttgtcaaaatagcactaaccaaaaacccaaaaaaaagaccaactgctgaaagacttctgactcacacttttgttgcacagccaggtctctctagagccctagcagttgaactgttagacaaagtgaacaatccagataaccacgcacattacactgaagcagatgacgatgactttgagccccatgcaatcattcgtcataccattagatctacaaacaggaatgccagagctgaacggacagcttcagaaataaattttgacaaattacaatttgaacctcctctgagaaaagaaacagaagcacgagatgaaatgggattgtcatcagacccaaatttcatgttacagtggaatccttttgttgatggtgcaaatactggcaaatcaacctcaaaacgtgcaataccacctcccctacctcctaagccaaggataagcagttaccctgaagacaactttccggatgaagaaaaagcatcaaccataaaacattgtcctgattcagaaagcagagctccccaaattctcagaagacagagtagcccaagttgtgggcctgtggcagagacttcttctattggaaatggtgatggtatttcaaaactgatgagtgaaaatacagaaggatcagcacaagcaccacagttaccacgaaaaaaggacaaacgagacttccctaaaccagccatcaatggccttccacccaccccaaaagttctgatgggagcatgcttttcaaaagtttttgatggctgtcctttgaaaattaattgtgcaacatcctggatacatcctgatacaaaagatcagtacattatttttggaactgaagatggtatttacacactgaatctcaatgagctacatgaggcaacgatggaacagttatttccacggaagtgtacttggctgtatgttatcaataatactttaatgtcattatcagaaggaaaaacctttcagctctactctcacaatcttatagctttgtttgaacatgccaaaaaaccaggattagctgcccatattcaaactcacaggtttccagaccgaatactaccaagaaaattcgctttaacaacaaagattcctgatacaaaaggctgccacaaatgttgcatagtcagaaacccttacacgggacataaatacctctgtggagctttacagtctggaattgttttacttcagtggtatgagccaatgcagaaattcatgttgataaagcactttgattttcctttgccaagtcctttgaatgtttttgaaatgctggtgatacctgaacaggaataccctatggtctgtgtagctattagcaaaggcactgaatcgaatcaggtagttcagtttgagacaatcaatttgaactctgcatcttcatggtttacagaaattggtgcaggcagccagcagttagattccattcatgtaacacagttggagagagataccgttttagtgtgtttagacaaatttgtgaaaattgtaaatctacaaggaaaattaaaatcaagtaagaaactggcctctgagttaagttttgattttcgcattgaatctgtagtatgccttcaagacagtgtgttggctttctggaaacatgggatgcagggtaaaagcttcaagtcagatgaggttacccaggagatttcagatgaaacaagagttttccgcttattaggatcagacagggttgtcgttttggaaagtaggccaacagaaaatcctactgcacacagcaatctctacatcttggctggacatgaaaatagttactaagcaacagaaactgatctcaaatgacaggaaaatgaatatactccattgaaaggaaaaataaggaaattcaatacaaactgcactatgatttgctttaactattatgggttatattgcaaatgatctgtactttagggtagaattcaatattttctgcagctggaaacagctagtctatctcttgccactgtgtggtggttatatcaagtttgcttaataaaagctatgagacaaatagtcctctagttccaggaaacacagtctttttttaaaaaaaacaatgtttgtaacaagggtgccatggtatttttagataactcgtgattatcttaagagaggtaaatttagtgatcattttatatcatgtcttattccttcttaatgaacataatttgttaaattctcaagcaaggttttcacttttatattggccattctgtatgtttttgtatctaacttttagcaaaggagggttgcagagcagcttaaattttttttataatgtataagaattttgtttatcttttaagagtagtaaagtactttgagtgtttgggggttcaacacacacatgcaattttgcttaacaaaagtattttataatacagtttcatacagaattaccttaaaagggagtcttatgttttcaactacagatagttgtaagggatcatacagaagatattgatgatagttgaaatattcttagaaggggtgtgtatgtctagctgtgtctaccatgtgtatgtattcttgacaagcagtataaaatacctgtgatttttctttacattagggataatgcataaggaattaatcttcatatatattatcatccctaatgtagcagggggaagtatttaattgcccatgatatgtattttacttatactatgccagagaggaaactataaagtaattacacatgtaatcttgggtttttcacatatgtaggtattcattttgagtaggttgaagaagaaaaaaaatatttaaatgaattgaattcctgatgggatagtatcaataagtatttaaaagccagtattctaaaaataataaagggtagggtcatttttgagtttgtttttcttttgctattgttaatattcaaaattaaagtgttacattggtacctgttgtcttaatgcatttattgagaacagcattgagatgatgaacaaggggttagcaatagcaaactctataattattttgactaattacttaagaggaaaacagtataagtatctcattcagtatttagcaattctgtaaaataagtattatctctatttttcagatgaggaagtaagggtttagcaaggttaagagatctatccaatttacacagcaagttagtagttgagcctgaccatgagtcttctgactctgttcttttcactatgcaatacgcaaacaataaaatgttatacaaatggaatataaagttatttattctttaaaaatgcacatatgatatgatttcagtaagtgtgtggctgtttattttggctatgttaagaatacgggatacagtagatgacaggggaaccatcctcaaaacaggggacatttacatgatggataagaaagccagaatcctccttttcttactgaatcctggcagccagatctttaccatcccatggtggaataccgaagagtcttctctgtgaaatctgaccaatgcaagtgaaaaggcctcattaagatcttgatgtcagacatgtcccggctaaactgcccagctagatgacactacagtgaaaatcatagttggcaatcccaccatcccacgcattatgtctagaccttgcagttagtcttttagtcctgtgctcttaaaaatgagcaaacaaccaaggattacaaataaatgaaagagaaaaaacagtctggggaaaacagaggaaacaggctatgaagggtaaggagaacatcaaaagaaaaagtattttcagaaggatgttgcaaccatgagtgagtcaagggcagggtacttttaaaaagttgggtttcaaaaaaacaaaaagagctcttagaaaataatatgacagcatag

SEQ ID NO: 357003 - DNA, 4050 bp, Homo sapiens
ggcgccgacccatgctggctgggaacgtgtctcccggtgacgcagccccgggtggggaacgtggtgcggcggcggcggcggcggcgactgtacgcgcctccgccgcccccgagaggacgcgccgtgcagcggctgagtggcggcggcggcgacggcaaacccggagctgccggccggcgcgcgggaggaggacgcgggtgcggtctaggaaacggagctgcgggcggaggctccatgttgggaagcggcgccgttcgtgcttgttagcgggaatccgggagccgcggggtgagctggcgggggccgggccctaagtgaagatggaggccccgctgcggcctgccgcggacatcctgaggcggaacccgcagcaggactacgaactcgtccagagggtcggcagcggcacctacggggacgtctataaggccagaaatgtacacacaggagagctggctgcagtaaaaatcattaaattggagcctggagatgatttttctttgattcaacaagaaatatttatggttaaagaatgtaaacattgtaacatcgttgcctactttgggagttatcttagtcgggaaaaactatggatttgtatggaatactgtggtggcggatcacttcaagatatttaccatgttactggaccattatcagaattgcaaatagcctatgtatgcagagaaaccttacagggtcttgcctatttgcatactaaaggcaaaatgcatagagatatcaaaggtgctaatattttattgacagaccatggcgatgtaaaattagctgactttggtgtggctgcaaaaataacagctaccattgcaaaacgaaaatctttcattggcaccccttactggatggccccagaagttgcagcagtagagaagaatggtggctacaaccaactctgtgatatctgggcagtaggaataacagcaattgaacttggagaacttcagccacctatgtttgatctccacccaatgagggctctcttcttaatgtcaaaaagtaattttcagcctccaaaactaaaggacaaaacaaaatggtcatcaacattccataattttgtcaaaatagcactaaccaaaaacccaaaaaaaagaccaactgctgaaagacttctgactcacacttttgttgcacagccaggtctctctagagccctagcagttgaactgttagacaaagtgaacaatccagataaccacgcacattacactgaagcagatgacgatgactttgagccccatgcaatcattcgtcataccattagatctacaaacaggaatgccagagctgaacggacagcttcagaaataaattttgacaaattacaatttgaacctcctctgagaaaagaaacagaagcacgagatgaaatgggattgtcatcagacccaaatttcatgttacagtggaatccttttgttgatggtgcaaatactggcaaatcaacctcaaaacgtgcaataccacctcccctacctcctaagccaaggataagcagttaccctgaagacaactttccggatgaagaaaaagcatcaaccataaaacattgtcctgattcagaaagcagagctccccaaattctcagaagacagagtagcccaagttgtgggcctgtggcagagacttcttctattggaaatggtgatggtatttcaaaactgatgagtgaaaatacagaaggatcagcacaagcaccacagttaccacgaaaaaaggacaaacgagacttccctaaaccagccatcaatggccttccacccaccccaaaagttctgatgggagcatgcttttcaaaagtttttgatggctgtcctttgaaaattaattgtgcaacatcctggatacatcctgatacaaaagatcagtacattatttttggaactgaagatggtatttacacactgaatctcaatgagctacatgaggcaacgatggaacagttatttccacggaagtgtacttggctgtatgttatcaataatactttaatgtcattatcagaaggaaaaacctttcagctctactctcacaatcttatagctttgtttgaacatgccaaaaaaccaggattagctgcccatattcaaactcacaggtttccagaccgaatactaccaagaaaattcgctttaacaacaaagattcctgatacaaaaggctgccacaaatgttgcatagtcagaaacccttacacgggacataaatacctctgtggagctttacagtctggaattgttttacttcagtggtatgagccaatgcagaaattcatgttgataaagcactttgattttcctttgccaagtcctttgaatgtttttgaaatgctggtgatacctgaacaggaataccctatggtctgtgtagctattagcaaaggcactgaatcgaatcaggtagttcagtttgagacaatcaatttgaactctgcatcttcatggtttacagaaattggtgcaggcagccagcagttagattccattcatgtaacacagttggagagagataccgttttagtgtgtttagacaaatttgtgaaaattgtaaatctacaaggaaaattaaaatcaagtaagaaactggcctctgagttaagttttgattttcgcattgaatctgtagtatgccttcaagacagtgtgttggctttctggaaacatgggatgcagggtaaaagcttcaagtcagatgaggttacccaggagatttcagatgaaacaagagttttccgcttattaggatcagacagggttgtcgttttggaaagtaggccaacagaaaatcctactgcacacagcaatctctacatcttggctggacatgaaaatagttactaagcaacagaaactgatctcaaatgacaggaaaatgaatatactccattgaaaggaaaaataaggaaattcaatacaaactgcactatgatttgctttaactattatgggttatattgcaaatgatctgtactttagggtagaattcaatattttctgcagctggaaacagctagtctatctcttgccactgtgtggtggttatatcaagtttgcttaataaaagctatgagacaaatagtcctctagttccaggaaacacagtctttttttaaaaaaaacaatgtttgtaacaagggtgccatggtatttttagataactcgtgattatcttaagagaggtaaatttagtgatcattttatatcatgtcttattccttcttaatgaacataatttgttaaattctcaagcaaggttttcacttttatattggccattctgtatgtttttgtaaaacagaatatttaatccttatttattaatctcttgctggagtggtgtaatgtatctaacttttagcaaaggagggttgcagagcagcttaaattttttttataatgtataagaattttgtttatcttttaagagtagtaaagtactttgagtgtttgggggttcaacacacacatgcaattttgcttaacaaaagtattttataatacagtttcatacagaattaccttaaaagggagtcttatgttttcaactacagatagttgtaagggatcatacagaagatattgatgatagttgaaatattcttagaaggggtgtgtatgtctagctgtgtctaccatgtgtatgtattcttgacaagcagtataaaatacctgtgatttttctttacattagggataatgcataaggaattaatcttcatatatattatcatccctaatgtagcagggggaagtatttaattgcccatgatatgtattttacttatactatgccagagaggaaactataaagtaattacacatgtaatcttgggtttttcacatatgtaggtattcattttgagtaggttgaagaagaaaaaaaatatttaaatgaattgaattcctgatgggatagtatcaataagtatttaaaagccagtattctaaaaataataaagggtagggtcatttttgagtttgtttttcttttgctattgttaatattcaaaattaaagtgttacattggta

SEQ ID NO: 357004 - DNA, 5028 bp, Homo sapiens
ggcgccgacccatgctggctgggaacgtgtctcccggtgacgcagccccgggtggggaacgtggtgcggcggcggcggcggcggcgactgtacgcgcctccgccgcccccgagaggacgcgccgtgcagcggctgagtggcggcggcggcgacggcaaacccggagctgccggccggcgcgcgggaggaggacgcgggtgcggtctaggaagtaggtcccgggctccgcgctcaacaaagacggggccgcccccattagacggagctgcgggcggaggctccatgttgggaagcggcgccgttcgtgcttgttagcgggaatccgggagccgcggggtgagctggcgggggccgggccctaagtgaagatggaggccccgctgcggcctgccgcggacatcctgaggcggaacccgcagcaggactacgaactcgtccagagggtcggcagcggcacctacggggacgtctataaggccagaaatgtacacacaggagagctggctgcagtaaaaatcattaaattggagcctggagatgatttttctttgattcaacaagaaatatttatggttaaagaatgtaaacattgtaacatcgttgcctactttgggagttatcttagtcgggaaaaactatggatttgtatggaatactgtggtggcggatcacttcaagatatttaccatgttactggaccattatcagaattgcaaatagcctatgtatgcagagaaaccttacagggtcttgcctatttgcatactaaaggcaaaatgcatagagatatcaaaggtgctaatattttattgacagaccatggcgatgtaaaattagctgactttggtgtggctgcaaaaataacagctaccattgcaaaacgaaaatctttcattggcaccccttactggatggccccagaagttgcagcagtagagaagaatggtggctacaaccaactctgtgatatctgggcagtaggaataacagcaattgaacttggagaacttcagccacctatgtttgatctccacccaatgagggctctcttcttaatgtcaaaaagtaattttcagcctccaaaactaaaggacaaaacaaaatggtcatcaacattccataattttgtcaaaatagcactaaccaaaaacccaaaaaaaagaccaactgctgaaagacttctgactcacacttttgttgcacagccaggtctctctagagccctagcagttgaactgttagacaaagtgaacaatccagataaccacgcacattacactgaagcagatgacgatgactttgagccccatgcaatcattcgtcataccattagatctacaaacaggaatgccagagctgaacggacagcttcagaaataaattttgacaaattacaatttgaacctcctctgagaaaagaaacagaagcacgagatgaaatgggattgtcatcagacccaaatttcatgttacagtggaatccttttgttgatggtgcaaatactggcaaatcaacctcaaaacgtgcaataccacctcccctacctcctaagccaaggataagcagttaccctgaagacaactttccggatgaagaaaaagcatcaaccataaaacattgtcctgattcagaaagcagagctccccaaattctcagaagacagagtagcccaagttgtgggcctgtggcagagacttcttctattggaaatggtgatggtatttcaaaactgatgagtgaaaatacagaaggatcagcacaagcaccacagttaccacgaaaaaaggacaaacgagacttccctaaaccagccatcaatggccttccacccaccccaaaagttctgatgggagcatgcttttcaaaagtttttgatggctgtcctttgaaaattaattgtgcaacatcctggatacatcctgatacaaaagatcagtacattatttttggaactgaagatggtatttacacactgaatctcaatgagctacatgaggcaacgatggaacagttatttccacggaagtgtacttggctgtatgttatcaataatactttaatgtcattatcagaaggaaaaacctttcagctctactctcacaatcttatagctttgtttgaacatgccaaaaaaccaggattagctgcccatattcaaactcacaggtttccagaccgaatactaccaagaaaattcgctttaacaacaaagattcctgatacaaaaggctgccacaaatgttgcatagtcagaaacccttacacgggacataaatacctctgtggagctttacagtctggaattgttttacttcagtggtatgagccaatgcagaaattcatgttgataaagcactttgattttcctttgccaagtcctttgaatgtttttgaaatgctggtgatacctgaacaggaataccctatggtctgtgtagctattagcaaaggcactgaatcgaatcaggtagttcagtttgagacaatcaatttgaactctgcatcttcatggtttacagaaattggtgcaggcagccagcagttagattccattcatgtaacacagttggagagagataccgttttagtgtgtttagacaaatttgtgaaaattgtaaatctacaaggaaaattaaaatcaagtaagaaactggcctctgagttaagttttgattttcgcattgaatctgtagtatgccttcaagacagtgtgttggctttctggaaacatgggatgcagggtaaaagcttcaagtcagatgaggttacccaggagatttcagatgaaacaagagttttccgcttattaggatcagacagggttgtcgttttggaaagtaggccaacagaaaatcctactgcacacagcaatctctacatcttggctggacatgaaaatagttactaagcaacagaaactgatctcaaatgacaggaaaatgaatatactccattgaaaggaaaaataaggaaattcaatacaaactgcactatgatttgctttaactattatgggttatattgcaaatgatctgtactttagggtagaattcaatattttctgcagctggaaacagctagtctatctcttgccactgtgtggtggttatatcaagtttgcttaataaaagctatgagacaaatagtcctctagttccaggaaacacagtctttttttaaaaaaaacaatgtttgtaacaagggtgccatggtatttttagataactcgtgattatcttaagagaggtaaatttagtgatcattttatatcatgtcttattccttcttaatgaacataatttgttaaattctcaagcaaggttttcacttttatattggccattctgtatgtttttgtaaaacagaatatttaatccttatttattaatctcttgctggagtggtgtaatgtatctaacttttagcaaaggagggttgcagagcagcttaaattttttttataatgtataagaattttgtttatcttttaagagtagtaaagtactttgagtgtttgggggttcaacacacacatgcaattttgcttaacaaaagtattttataatacagtttcatacagaattaccttaaaagggagtcttatgttttcaactacagatagttgtaagggatcatacagaagatattgatgatagttgaaatattcttagaaggggtgtgtatgtctagctgtgtctaccatgtgtatgtattcttgacaagcagtataaaatacctgtgatttttctttacattagggataatgcataaggaattaatcttcatatatattatcatccctaatgtagcagggggaagtatttaattgcccatgatatgtattttacttatactatgccagagaggaaactataaagtaattacacatgtaatcttgggtttttcacatatgtaggtattcattttgagtaggttgaagaagaaaaaaaatatttaaatgaattgaattcctgatgggatagtatcaataagtatttaaaagccagtattctaaaaataataaagggtagggtcatttttgagtttgtttttcttttgctattgttaatattcaaaattaaagtgttacattggtacctgttgtcttaatgcatttattgagaacagcattgagatgatgaacaaggggttagcaatagcaaactctataattattttgactaattacttaagaggaaaacagtataagtatctcattcagtatttagcaattctgtaaaataagtattatctctatttttcagatgaggaagtaagggtttagcaaggttaagagatctatccaatttacacagcaagttagtagttgagcctgaccatgagtcttctgactctgttcttttcactatgcaatacgcaaacaataaaatgttatacaaatggaatataaagttatttattctttaaaaatgcacatatgatatgatttcagtaagtgtgtggctgtttattttggctatgttaagaatacgggatacagtagatgacaggggaaccatcctcaaaacaggggacatttacatgatggataagaaagccagaatcctccttttcttactgaatcctggcagccagatctttaccatcccatggtggaataccgaagagtcttctctgtgaaatctgaccaatgcaagtgaaaaggcctcattaagatcttgatgtcagacatgtcccggctaaactgcccagctagatgacactacagtgaaaatcatagttggcaatcccaccatcccacgcattatgtctagaccttgcagttagtcttttagtcctgtgctcttaaaaatgagcaaacaaccaaggattacaaataaatgaaagagaaaaaacagtctggggaaaacagaggaaacaggctatgaagggtaaggagaacatcaaaagaaaaagtattttcagaaggatgttgcaaccatgagtgagtcaagggcagggtacttttaaaaagttgggtttcaaaaaaacaaaaagagctcttagaaaataatatgacagcatag

SEQ ID NO: 357005 - DNA, 4886 bp, Homo sapiens
  misc_feature (56)..(56): n is a, c, g, or t
taaggatccggactgttggatgccagaagtgcagcagtagagagaatgtgctacancactctgtgatatctggcgtaggatacagcattgacttggggactcagccacttatgtttgatctccaccaatgagggctctcttcttatgtcaaaagtaatttcagcctccaaaactaaaggacaaaacgaaatggtcattcacattccataatttttgtcaaaatagcactaaccaaaaacccaaaaaaaagaccaactgctgaaagacttctgactcacacttttgttgcacagccaggtctctctagagccctagcagttgaactgttagacaaagtgaacaatccagataaccacgcacattacactgaagcagatgacgatgactttgaggagatgatttttctttgattcaacaagaaatatttatggttaaagaatgtaaacattgtaacatcgttgcctactttgggagttatcttagtcgggaaaaactatggatttgtatggaatactgtggtggcggatcacttcaagatatttaccatgttactggaccattatcagaattgcaaatagcctatgtatgcagagaaaccttacagggtcttgcctatttgcatactaaaggcaaaatgcatagagatatcaaaggtgctaatattttattgacagaccatggcgatgtaaaattagctgactttggtgtggctgcaaaaataacagctaccattgcaaaacgaaaatctttcattggcaccccttactggatggccccagaagttgcagcagtagagaagaatggtggctacaaccaactctgtgatatctgggcagtaggaataacagcaattgaacttggagaacttcagccacctatgtttgatctccacccaatgagggctctcttcttaatgtcaaaaagtaattttcagcctccaaaactaaaggacaaaacaaaatggtcatcaacattccataattttgtcaaaatagcactaaccaaaaacccaaaaaaaagaccaactgctgaaagacttctgactcacacttttgttgcacagccaggtctctctagagccctagcagttgaactgttagacaaagtgaacaatccagataaccacgcacattacactgaagcagatgacgatgactttgagccccatgcaatcattcgtcataccattagatctacaaacaggaatgccagagctgaacggacagcttcagaaataaattttgacaaattacaatttgaacctcctctgagaaaagaaacagaagcacgagatgaaatgggattgtcatcagacccaaatttcatgttacagtggaatccttttgttgatggtgcaaatactggcaaatcaacctcaaaacgtgcaataccacctcccctacctcctaagccaaggataagcagttaccctgaagacaactttccggatgaagaaaaagcatcaaccataaaacattgtcctgattcagaaagcagagctccccaaattctcagaagacagagtagcccaagttgtgggcctgtggcagagacttcttctattggaaatggtgatggtatttcaaaactgatgagtgaaaatacagaaggatcagcacaagcaccacagttaccacgaaaaaaggacaaacgagacttccctaaaccagccatcaatggccttccacccaccccaaaagttctgatgggagcatgcttttcaaaagtttttgatggctgtcctttgaaaattaattgtgcaacatcctggatacatcctgatacaaaagatcagtacattatttttggaactgaagatggtatttacacactgaatctcaatgagctacatgaggcaacgatggaacagttatttccacggaagtgtacttggctgtatgttatcaataatactttaatgtcattatcagaaggaaaaacctttcagctctactctcacaatcttatagctttgtttgaacatgccaaaaaaccaggattagctgcccatattcaaactcacaggtttccagaccgaatactaccaagaaaattcgctttaacaacaaagattcctgatacaaaaggctgccacaaatgttgcatagtcagaaacccttacacgggacataaatacctctgtggagctttacagtctggaattgttttacttcagtggtatgagccaatgcagaaattcatgttgataaagcactttgattttcctttgccaagtcctttgaatgtttttgaaatgctggtgatacctgaacaggaataccctatggtctgtgtagctattagcaaaggcactgaatcgaatcaggtagttcagtttgagacaatcaatttgaactctgcatcttcatggtttacagaaattggtgcaggcagccagcagttagattccattcatgtaacacagttggagagagataccgttttagtgtgtttagacaaatttgtgaaaattgtaaatctacaaggaaaattaaaatcaagtaagaaactggcctctgagttaagttttgattttcgcattgaatctgtagtatgccttcaagacagtgtgttggctttctggaaacatgggatgcagggtaaaagcttcaagtcagatgaggttacccaggagatttcagatgaaacaagagttttccgcttattaggatcagacagggttgtcgttttggaaagtaggccaacagaaaatcctactgcacacagcaatctctacatcttggctggacatgaaaatagttactaagcaacagaaactgatctcaaatgacaggaaaatgaatatactccattgaaaggaaaaataaggaaattcaatacaaactgcactatgatttgctttaactattatgggttatattgcaaatgatctgtactttagggtagaattcaatattttctgcagctggaaacagctagtctatctcttgccactgtgtggtggttatatcaagtttgcttaataaaagctatgagacaaatagtcctctagttccaggaaacacagtctttttttaaaaaaaacaatgtttgtaacaagggtgccatggtatttttagataactcgtgattatcttaagagaggtaaatttagtgatcattttatatcatgtcttattccttcttaatgaacataatttgttaaattctcaagcaaggttttcacttttatattggccattctgtatgtttttgtaaaacagaatatttaatccttatttattaatctcttgctggagtggtgtaatgtatctaacttttagcaaaggagggttgcagagcagcttaaattttttttataatgtataagaattttgtttatcttttaagagtagtaaagtactttgagtgtttgggggttcaacacacacatgcaattttgcttaacaaaagtattttataatacagtttcatacagaattaccttaaaagggagtcttatgttttcaactacagatagttgtaagggatcatacagaagatattgatgatagttgaaatattcttagaaggggtgtgtatgtctagctgtgtctaccatgtgtatgtattcttgacaagcagtataaaatacctgtgatttttctttacattagggataatgcataaggaattaatcttcatatatattatcatccctaatgtagcagggggaagtatttaattgcccatgatatgtattttacttatactatgccagagaggaaactataaagtaattacacatgtaatcttgggtttttcacatatgtaggtattcattttgagtaggttgaagaagaaaaaaaatatttaaatgaattgaattcctgatgggatagtatcaataagtatttaaaagccagtattctaaaaataataaagggtagggtcatttttgagtttgtttttcttttgctattgttaatattcaaaattaaagtgttacattggtacctgttgtcttaatgcatttattgagaacagcattgagatgatgaacaaggggttagcaatagcaaactctataattattttgactaattacttaagaggaaaacagtataagtatctcattcagtatttagcaattctgtaaaataagtattatctctatttttcagatgaggaagtaagggtttagcaaggttaagagatctatccaatttacacagcaagttagtagttgagcctgaccatgagtcttctgactctgttcttttcactatgcaatacgcaaacaataaaatgttatacaaatggaatataaagttatttattctttaaaaatgcacatatgatatgatttcagtaagtgtgtggctgtttattttggctatgttaagaatacgggatacagtagatgacaggggaaccatcctcaaaacaggggacatttacatgatggataagaaagccagaatcctccttttcttactgaatcctggcagccagatctttaccatcccatggtggaataccgaagagtcttctctgtgaaatctgaccaatgcaagtgaaaaggcctcattaagatcttgatgtcagacatgtcccggctaaactgcccagctagatgacactacagtgaaaatcatagttggcaatcccaccatcccacgcattatgtctagaccttgcagttagtcttttagtcctgtgctcttaaaaatgagcaaacaaccaaggattacaaataaatgaaagagaaaaaacagtctggggaaaacagaggaaacaggctatgaagggtaaggagaacatcaaaagaaaaagtattttcagaaggatgttgcaaccatgagtgagtcaagggcagggtacttttaaaaagttgggtttcaaaaaaacaaaaagagctcttagaaaataatatgacagcatag

SEQ ID NO: 357006 - DNA, 4795 bp, Homo sapiens
  misc_feature (56)..(56): n is a, c, g, or t
taaggatccggactgttggatgccagaagtgcagcagtagagagaatgtgctacancactctgtgatatctggcgtaggatacagcattgacttggggactcagccacttatgtttgatctccaccaatgagggctctcttcttatgtcaaaagtaatttcagcctccaaaactaaaggacaaaacgaaatggtcattcacattccataatttttgtcaaaatagcactaaccaaaaacccaaaaaaaagaccaactgctgaaagacttctgactcacacttttgttgcacagccaggtctctctagagccctagcagttgaactgttagacaaagtgaacaatccagataaccacgcacattacactgaagcagatgacgatgactttgaggagatgatttttctttgattcaacaagaaatatttatggttaaagaatgtaaacattgtaacatcgttgcctactttgggagttatcttagtcgggaaaaactatggatttgtatggaatactgtggtggcggatcacttcaagatatttaccatgttactggaccattatcagaattgcaaatagcctatgtatgcagagaaaccttacagctgactttggtgtggctgcaaaaataacagctaccattgcaaaacgaaaatctttcattggcaccccttactggatggccccagaagttgcagcagtagagaagaatggtggctacaaccaactctgtgatatctgggcagtaggaataacagcaattgaacttggagaacttcagccacctatgtttgatctccacccaatgagggctctcttcttaatgtcaaaaagtaattttcagcctccaaaactaaaggacaaaacaaaatggtcatcaacattccataattttgtcaaaatagcactaaccaaaaacccaaaaaaaagaccaactgctgaaagacttctgactcacacttttgttgcacagccaggtctctctagagccctagcagttgaactgttagacaaagtgaacaatccagataaccacgcacattacactgaagcagatgacgatgactttgagccccatgcaatcattcgtcataccattagatctacaaacaggaatgccagagctgaacggacagcttcagaaataaattttgacaaattacaatttgaacctcctctgagaaaagaaacagaagcacgagatgaaatgggattgtcatcagacccaaatttcatgttacagtggaatccttttgttgatggtgcaaatactggcaaatcaacctcaaaacgtgcaataccacctcccctacctcctaagccaaggataagcagttaccctgaagacaactttccggatgaagaaaaagcatcaaccataaaacattgtcctgattcagaaagcagagctccccaaattctcagaagacagagtagcccaagttgtgggcctgtggcagagacttcttctattggaaatggtgatggtatttcaaaactgatgagtgaaaatacagaaggatcagcacaagcaccacagttaccacgaaaaaaggacaaacgagacttccctaaaccagccatcaatggccttccacccaccccaaaagttctgatgggagcatgcttttcaaaagtttttgatggctgtcctttgaaaattaattgtgcaacatcctggatacatcctgatacaaaagatcagtacattatttttggaactgaagatggtatttacacactgaatctcaatgagctacatgaggcaacgatggaacagttatttccacggaagtgtacttggctgtatgttatcaataatactttaatgtcattatcagaaggaaaaacctttcagctctactctcacaatcttatagctttgtttgaacatgccaaaaaaccaggattagctgcccatattcaaactcacaggtttccagaccgaatactaccaagaaaattcgctttaacaacaaagattcctgatacaaaaggctgccacaaatgttgcatagtcagaaacccttacacgggacataaatacctctgtggagctttacagtctggaattgttttacttcagtggtatgagccaatgcagaaattcatgttgataaagcactttgattttcctttgccaagtcctttgaatgtttttgaaatgctggtgatacctgaacaggaataccctatggtctgtgtagctattagcaaaggcactgaatcgaatcaggtagttcagtttgagacaatcaatttgaactctgcatcttcatggtttacagaaattggtgcaggcagccagcagttagattccattcatgtaacacagttggagagagataccgttttagtgtgtttagacaaatttgtgaaaattgtaaatctacaaggaaaattaaaatcaagtaagaaactggcctctgagttaagttttgattttcgcattgaatctgtagtatgccttcaagacagtgtgttggctttctggaaacatgggatgcagggtaaaagcttcaagtcagatgaggttacccaggagatttcagatgaaacaagagttttccgcttattaggatcagacagggttgtcgttttggaaagtaggccaacagaaaatcctactgcacacagcaatctctacatcttggctggacatgaaaatagttactaagcaacagaaactgatctcaaatgacaggaaaatgaatatactccattgaaaggaaaaataaggaaattcaatacaaactgcactatgatttgctttaactattatgggttatattgcaaatgatctgtactttagggtagaattcaatattttctgcagctggaaacagctagtctatctcttgccactgtgtggtggttatatcaagtttgcttaataaaagctatgagacaaatagtcctctagttccaggaaacacagtctttttttaaaaaaaacaatgtttgtaacaagggtgccatggtatttttagataactcgtgattatcttaagagaggtaaatttagtgatcattttatatcatgtcttattccttcttaatgaacataatttgttaaattctcaagcaaggttttcacttttatattggccattctgtatgtttttgtaaaacagaatatttaatccttatttattaatctcttgctggagtggtgtaatgtatctaacttttagcaaaggagggttgcagagcagcttaaattttttttataatgtataagaattttgtttatcttttaagagtagtaaagtactttgagtgtttgggggttcaacacacacatgcaattttgcttaacaaaagtattttataatacagtttcatacagaattaccttaaaagggagtcttatgttttcaactacagatagttgtaagggatcatacagaagatattgatgatagttgaaatattcttagaaggggtgtgtatgtctagctgtgtctaccatgtgtatgtattcttgacaagcagtataaaatacctgtgatttttctttacattagggataatgcataaggaattaatcttcatatatattatcatccctaatgtagcagggggaagtatttaattgcccatgatatgtattttacttatactatgccagagaggaaactataaagtaattacacatgtaatcttgggtttttcacatatgtaggtattcattttgagtaggttgaagaagaaaaaaaatatttaaatgaattgaattcctgatgggatagtatcaataagtatttaaaagccagtattctaaaaataataaagggtagggtcatttttgagtttgtttttcttttgctattgttaatattcaaaattaaagtgttacattggtacctgttgtcttaatgcatttattgagaacagcattgagatgatgaacaaggggttagcaatagcaaactctataattattttgactaattacttaagaggaaaacagtataagtatctcattcagtatttagcaattctgtaaaataagtattatctctatttttcagatgaggaagtaagggtttagcaaggttaagagatctatccaatttacacagcaagttagtagttgagcctgaccatgagtcttctgactctgttcttttcactatgcaatacgcaaacaataaaatgttatacaaatggaatataaagttatttattctttaaaaatgcacatatgatatgatttcagtaagtgtgtggctgtttattttggctatgttaagaatacgggatacagtagatgacaggggaaccatcctcaaaacaggggacatttacatgatggataagaaagccagaatcctccttttcttactgaatcctggcagccagatctttaccatcccatggtggaataccgaagagtcttctctgtgaaatctgaccaatgcaagtgaaaaggcctcattaagatcttgatgtcagacatgtcccggctaaactgcccagctagatgacactacagtgaaaatcatagttggcaatcccaccatcccacgcattatgtctagaccttgcagttagtcttttagtcctgtgctcttaaaaatgagcaaacaaccaaggattacaaataaatgaaagagaaaaaacagtctggggaaaacagaggaaacaggctatgaagggtaaggagaacatcaaaagaaaaagtattttcagaaggatgttgcaaccatgagtgagtcaagggcagggtacttttaaaaagttgggtttcaaaaaaacaaaaagagctcttagaaaataatatgacagcatag

SEQ ID NO: 357007 - DNA, 3954 bp, Homo sapiens
gaattttatattctacgaacatacaagacacgcagcactaccctcttaaccaccaatggaagatgtaaacctataactcgtaaaaaagaccaactgctgaaagacttctgactcacacttttgttgcacagccaggtctctctagagccctagcagttgaactgttagacaaagtgaacaatccagataaccacgcacattacactgaagcagatgacgatgactttgagccccatgcaatcattcgtcataccattagatctacaaacaggaatgccagagctgaacggacagcttcagaaataaattttgacaaattacaatttgaacctcctctgagaaaagaaacagaagcacgagatgaaatgggattgtcatcagacccaaatttcatgttacagtggaatccttttgttgatggtgcaaatactggcaaatcaacctcaaaacgtgcaataccacctcccctacctcctaagccaaggataagcagttaccctgaagacaactttccggatgaagaaaaagcatcaaccataaaacattgtcctgattcagaaagcagagctccccaaattctcagaagacagagtagcccaagttgtgggcctgtggcagagacttcttctattggaaatggtgatggtatttcaaaactgatgagtgaaaatacagaaggatcagcacaagcaccacagttaccacgaaaaaaggacaaacgagacttccctaaaccagccatcaatggccttccacccaccccaaaagttctgatgggagcatgcttttcaaaagtttttgatggctgtcctttgaaaattaattgtgcaacatcctggatacatcctgatacaaaagatcagtacattatttttggaactgaagatggtatttacacactgaatctcaatgagctacatgaggcaacgatggaacagttatttccacggaagtgtacttggctgtatgttatcaataatactttaatgtcattatcagaaggaaaaacctttcagctctactctcacaatcttatagctttgtttgaacatgccaaaaaaccaggattagctgcccatattcaaactcacaggtttccagaccgaatactaccaagaaaattcgctttaacaacaaagattcctgatacaaaaggctgccacaaatgttgcatagtcagaaacccttacacgggacataaatacctctgtggagctttacagtctggaattgttttacttcagtggtatgagccaatgcagaaattcatgttgataaagcactttgattttcctttgccaagtcctttgaatgtttttgaaatgctggtgatacctgaacaggaataccctatggtctgtgtagctattagcaaaggcactgaatcgaatcaggtagttcagtttgagacaatcaatttgaactctgcatcttcatggtttacagaaattggtgcaggcagccagcagttagattccattcatgtaacacagttggagagagataccgttttagtgtgtttagacaaatttgtgaaaattgtaaatctacaaggaaaattaaaatcaagtaagaaactggcctctgagttaagttttgattttcgcattgaatctgtagtatgccttcaagacagtgtgttggctttctggaaacatgggatgcagggtaaaagcttcaagtcagatgaggttacccaggagatttcagatgaaacaagagttttccgcttattaggatcagacagggttgtcgttttggaaagtaggccaacagaaaatcctactgcacacagcaatctctacatcttggctggacatgaaaatagttactaagcaacagaaactgatctcaaatgacaggaaaatgaatatactccattgaaaggaaaaataaggaaattcaatacaaactgcactatgatttgctttaactattatgggttatattgcaaatgatctgtactttagggtagaattcaatattttctgcagctggaaacagctagtctatctcttgccactgtgtggtggttatatcaagtttgcttaataaaagctatgagacaaatagtcctctagttccaggaaacacagtctttttttaaaaaaaacaatgtttgtaacaagggtgccatggtatttttagataactcgtgattatcttaagagaggtaaatttagtgatcattttatatcatgtcttattccttcttaatgaacataatttgttaaattctcaagcaaggttttcacttttatattggccattctgtatgtttttgtaaaacagaatatttaatccttatttattaatctcttgctggagtggtgtaatgtatctaacttttagcaaaggagggttgcagagcagcttaaattttttttataatgtataagaattttgtttatcttttaagagtagtaaagtactttgagtgtttgggggttcaacacacacatgcaattttgcttaacaaaagtattttataatacagtttcatacagaattaccttaaaagggagtcttatgttttcaactacagatagttgtaagggatcatacagaagatattgatgatagttgaaatattcttagaaggggtgtgtatgtctagctgtgtctaccatgtgtatgtattcttgacaagcagtataaaatacctgtgatttttctttacattagggataatgcataaggaattaatcttcatatatattatcatccctaatgtagcagggggaagtatttaattgcccatgatatgtattttacttatactatgccagagaggaaactataaagtaattacacatgtaatcttgggtttttcacatatgtaggtattcattttgagtaggttgaagaagaaaaaaaatatttaaatgaattgaattcctgatgggatagtatcaataagtatttaaaagccagtattctaaaaataataaagggtagggtcatttttgagtttgtttttcttttgctattgttaatattcaaaattaaagtgttacattggtacctgttgtcttaatgcatttattgagaacagcattgagatgatgaacaaggggttagcaatagcaaactctataattattttgactaattacttaagaggaaaacagtataagtatctcattcagtatttagcaattctgtaaaataagtattatctctatttttcagatgaggaagtaagggtttagcaaggttaagagatctatccaatttacacagcaagttagtagttgagcctgaccatgagtcttctgactctgttcttttcactatgcaatacgcaaacaataaaatgttatacaaatggaatataaagttatttattctttaaaaatgcacatatgatatgatttcagtaagtgtgtggctgtttattttggctatgttaagaatacgggatacagtagatgacaggggaaccatcctcaaaacaggggacatttacatgatggataagaaagccagaatcctccttttcttactgaatcctggcagccagatctttaccatcccatggtggaataccgaagagtcttctctgtgaaatctgaccaatgcaagtgaaaaggcctcattaagatcttgatgtcagacatgtcccggctaaactgcccagctagatgacactacagtgaaaatcatagttggcaatcccaccatcccacgcattatgtctagaccttgcagttagtcttttagtcctgtgctcttaaaaatgagcaaacaaccaaggattacaaataaatgaaagagaaaaaacagtctggggaaaacagaggaaacaggctatgaagggtaaggagaacatcaaaagaaaaagtattttcagaaggatgttgcaaccatgagtgagtcaagggcagggtacttttaaaaagttgggtttcaaaaaaacaaaaagagctcttagaaaataatatgacagcatag

SEQ ID NO: 357008 - DNA, 3265 bp, Homo sapiens
gagaaataataatatagctttatagaattttccatcttgtattaaaataatcacatgtacatcattgtaactcagtccataacataagattttgtacaacaatttctttttgtgtgctggcatcattaaggtttagtctgcccagatcacctattagtacctaatttatatattctgaattaaaattatctgttaatttaaaaacattttatctattgtctttcaaaatagtattaactgagggtttttttgtgtgtgtttttctattttgcttggctttttgaacattactggactctcgttttagaagaaggaaaaacctttcagctctactctcacaatcttatagctttgtttgaacatgccaaaaaaccaggattagctgcccatattcaaactcacaggtttccagaccgaatactaccaagaaaattcgctttaacaacaaagattcctgatacaaaaggctgccacaaatgttgcatagtcagaaacccttacacgggacataaatacctctgtggagctttacagtctggaattgttttacttcagtggtatgagccaatgcagaaattcatgttgataaagcactttgattttcctttgccaagtcctttgaatgtttttgaaatgctggtgatacctgaacaggaataccctatggtctgtgtagctattagcaaaggcactgaatcgaatcaggtagttcagtttgagacaatcaatttgaactctgcatcttcatggtttacagaaattggtgcaggcagccagcagttagattccattcatgtaacacagttggagagagataccgttttagtgtgtttagacaaatttgtgaaaattgtaaatctacaaggaaaattaaaatcaagtaagaaactggcctctgagttaagttttgattttcgcattgaatctgtagtatgccttcaagacagtgtgttggctttctggaaacatgggatgcagggtaaaagcttcaagtcagatgaggttacccaggagatttcagatgaaacaagagttttccgcttattaggatcagacagggttgtcgttttggaaagtaggccaacagaaaatcctactgcacacagcaatctctacatcttggctggacatgaaaatagttactaagcaacagaaactgatctcaaatgacaggaaaatgaatatactccattgaaaggaaaaataaggaaattcaatacaaactgcactatgatttgctttaactattatgggttatattgcaaatgatctgtactttagggtagaattcaatattttctgcagctggaaacagctagtctatctcttgccactgtgtggtggttatatcaagtttgcttaataaaagctatgagacaaatagtcctctagttccaggaaacacagtctttttttaaaaaaaacaatgtttgtaacaagggtgccatggtatttttagataactcgtgattatcttaagagaggtaaatttagtgatcattttatatcatgtcttattccttcttaatgaacataatttgttaaattctcaagcaaggttttcacttttatattggccattctgtatgtttttgtaaaacagaatatttaatccttatttattaatctcttgctggagtggtgtaatgtatctaacttttagcaaaggagggttgcagagcagcttaaattttttttataatgtataagaattttgtttatcttttaagagtagtaaagtactttgagtgtttgggggttcaacacacacatgcaattttgcttaacaaaagtattttataatacagtttcatacagaattaccttaaaagggagtcttatgttttcaactacagatagttgtaagggatcatacagaagatattgatgatagttgaaatattcttagaaggggtgtgtatgtctagctgtgtctaccatgtgtatgtattcttgacaagcagtataaaatacctgtgatttttctttacattagggataatgcataaggaattaatcttcatatatattatcatccctaatgtagcagggggaagtatttaattgcccatgatatgtattttacttatactatgccagagaggaaactataaagtaattacacatgtaatcttgggtttttcacatatgtaggtattcattttgagtaggttgaagaagaaaaaaaatatttaaatgaattgaattcctgatgggatagtatcaataagtatttaaaagccagtattctaaaaataataaagggtagggtcatttttgagtttgtttttcttttgctattgttaatattcaaaattaaagtgttacattggtacctgttgtcttaatgcatttattgagaacagcattgagatgatgaacaaggggttagcaatagcaaactctataattattttgactaattacttaagaggaaaacagtataagtatctcattcagtatttagcaattctgtaaaataagtattatctctatttttcagatgaggaagtaagggtttagcaaggttaagagatctatccaatttacacagcaagttagtagttgagcctgaccatgagtcttctgactctgttcttttcactatgcaatacgcaaacaataaaatgttatacaaatggaatataaagttatttattctttaaaaatgcacatatgatatgatttcagtaagtgtgtggctgtttattttggctatgttaagaatacgggatacagtagatgacaggggaaccatcctcaaaacaggggacatttacatgatggataagaaagccagaatcctccttttcttactgaatcctggcagccagatctttaccatcccatggtggaataccgaagagtcttctctgtgaaatctgaccaatgcaagtgaaaaggcctcattaagatcttgatgtcagacatgtcccggctaaactgcccagctagatgacactacagtgaaaatcatagttggcaatcccaccatcccacgcattatgtctagaccttgcagttagtcttttagtcctgtgctcttaaaaatgagcaaacaaccaaggattacaaataaatgaaagagaaaaaacagtctggggaaaacagaggaaacaggctatgaagggtaaggagaacatcaaaagaaaaagtattttcagaaggatgttgcaaccatgagtgagtcaagggcagggtacttttaaaaagttgggtttcaaaaaaacaaaaagagctcttagaaaataatatgacagcatag

SEQ ID NO: 357009 - DNA, 2123 bp, Homo sapiens
agcactttgggaggccaaggagggtggatcacgaggtcaggagattgaggccatcctggctaacacggtgaaaccctgtctctactaaaaataaaaaaattagccgggcgtggtggcaggcgcctgtagtcccagctacttgggaggctgaggcaggagaatggtgtgaacccgggaggcggagcttgccactgtgtggtggttatatcaagtttgcttaataaaagctatgagacaaatagtcctctagttccaggaaacacagtctttttttaaaaaaaacaatgtttgtaacaagggtgccatggtatttttagataactcgtgattatcttaagagaggtaaatttagtgatcattttatatcatgtcttattccttcttaatgaacataatttgttaaattctcaagcaaggttttcacttttatattggccattctgtatgtttttgtaaaacagaatatttaatccttatttattaatctcttgctggagtggtgtaatgtatctaacttttagcaaaggagggttgcagagcagcttaaattttttttataatgtataagaattttgtttatcttttaagagtagtaaagtactttgagtgtttgggggttcaacacacacatgcaattttgcttaacaaaagtattttataatacagtttcatacagaattaccttaaaagggagtcttatgttttcaactacagatagttgtaagggatcatacagaagatattgatgatagttgaaatattcttagaaggggtgtgtatgtctagctgtgtctaccatgtgtatgtattcttgacaagcagtataaaatacctgtgatttttctttacattagggataatgcataaggaattaatcttcatatatattatcatccctaatgtagcagggggaagtatttaattgcccatgatatgtattttacttatactatgccagagaggaaactataaagtaattacacatgtaatcttgggtttttcacatatgtaggtattcattttgagtaggttgaagaagaaaaaaaatatttaaatgaattgaattcctgatgggatagtatcaataagtatttaaaagccagtattctaaaaataataaagggtagggtcatttttgagtttgtttttcttttgctattgttaatattcaaaattaaagtgttacattggtacctgttgtcttaatgcatttattgagaacagcattgagatgatgaacaaggggttagcaatagcaaactctataattattttgactaattacttaagaggaaaacagtataagtatctcattcagtatttagcaattctgtaaaataagtattatctctatttttcagatgaggaagtaagggtttagcaaggttaagagatctatccaatttacacagcaagttagtagttgagcctgaccatgagtcttctgactctgttcttttcactatgcaatacgcaaacaataaaatgttatacaaatggaatataaagttatttattctttaaaaatgcacatatgatatgatttcagtaagtgtgtggctgtttattttggctatgttaagaatacgggatacagtagatgacaggggaaccatcctcaaaacaggggacatttacatgatggataagaaagccagaatcctccttttcttactgaatcctggcagccagatctttaccatcccatggtggaataccgaagagtcttctctgtgaaatctgaccaatgcaagtgaaaaggcctcattaagatcttgatgtcagacatgtcccggctaaactgcccagctagatgacactacagtgaaaatcatagttggcaatcccaccatcccacgcattatgtctagaccttgcagttagtcttttagtcctgtgctcttaaaaatgagcaaacaaccaaggattacaaataaatgaaagagaaaaaacagtctggggaaaacagaggaaacaggctatgaagggtaaggagaacatcaaaagaaaaagtattttcagaaggatgttgcaaccatgagtgagtcaagggcagggtacttttaaaaagttgggtttcaaaaaaacaaaaagagctcttagaaaataatatgacagcatag

SEQ ID NO: 357010 - DNA, 4980 bp, Homo sapiens
ggcgccgacccatgctggctgggaacgtgtctcccggtgacgcagccccgggtggggaacgtggtgcggcggcggcggcggcggcgactgtacgcgcctccgccgcccccgagaggacgcgccgtgcagcggctgagtggcggcggcggcgacggcaaacccggagctgccggccggcgcgcgggaggaggacgcgggtgcggtctaggaaacggagctgcgggcggaggctccatgttgggaagcggcgccgttcgtgcttgttagcgggaatccgggagccgcggggtgagctggcgggggccgggccctaagtgaagatggaggccccgctgcggcctgccgcggacatcctgaggcggaacccgcagcaggactacgaactcgtccagagggtcggcagcggcacctacggggacgtctataaggccagaaatgtacacacaggagagctggctgcagtaaaaatcattaaattggagcctggagatgatttttctttgattcaacaagaaatatttatggttaaagaatgtaaacattgtaacatcgttgcctactttgggagttatcttagtcgggaaaaactatggatttgtatggaatactgtggtggcggatcacttcaagatatttaccatgttactggaccattatcagaattgcaaatagcctatgtatgcagagaaaccttacagggtcttgcctatttgcatactaaaggcaaaatgcatagagatatcaaaggtgctaatattttattgacagaccatggcgatgtaaaattagctgactttggtgtggctgcaaaaataacagctaccattgcaaaacgaaaatctttcattggcaccccttactggatggccccagaagttgcagcagtagagaagaatggtggctacaaccaactctgtgatatctgggcagtaggaataacagcaattgaacttggagaacttcagccacctatgtttgatctccacccaatgagggctctcttcttaatgtcaaaaagtaattttcagcctccaaaactaaaggacaaaacaaaatggtcatcaacattccataattttgtcaaaatagcactaaccaaaaacccaaaaaaaagaccaactgctgaaagacttctgactcacacttttgttgcacagccaggtctctctagagccctagcagttgaactgttagacaaagtgaacaatccagataaccacgcacattacactgaagcagatgacgatgactttgagccccatgcaatcattcgtcataccattagatctacaaacaggaatgccagagctgaacggacagcttcagaaataaattttgacaaattacaatttgaacctcctctgagaaaagaaacagaagcacgagatgaaatgggattgtcatcagacccaaatttcatgttacagtggaatccttttgttgatggtgcaaatactggcaaatcaacctcaaaacgtgcaataccacctcccctacctcctaagccaaggataagcagttaccctgaagacaactttccggatgaagaaaaagcatcaaccataaaacattgtcctgattcagaaagcagagctccccaaattctcagaagacagagtagcccaagttgtgggcctgtggcagagacttcttctattggaaatggtgatggtatttcaaaactgatgagtgaaaatacagaaggatcagcacaagcaccacagttaccacgaaaaaaggacaaacgagacttccctaaaccagccatcaatggccttccacccaccccaaaagttctgatgggagcatgcttttcaaaagtttttgatggctgtcctttgaaaattaattgtgcaacatcctggatacatcctgatacaaaagatcagtacattatttttggaactgaagatggtatttacacactgaatctcaatgagctacatgaggcaacgatggaacagttatttccacggaagtgtacttggctgtatgttatcaataatactttaatgtcattatcagaaggaaaaacctttcagctctactctcacaatcttatagctttgtttgaacatgccaaaaaaccaggattagctgcccatattcaaactcacaggtttccagaccgaatactaccaagaaaattcgctttaacaacaaagattcctgatacaaaaggctgccacaaatgttgcatagtcagaaacccttacacgggacataaatacctctgtggagctttacagtctggaattgttttacttcagtggtatgagccaatgcagaaattcatgttgataaagcactttgattttcctttgccaagtcctttgaatgtttttgaaatgctggtgatacctgaacaggaataccctatggtctgtgtagctattagcaaaggcactgaatcgaatcaggtagttcagtttgagacaatcaatttgaactctgcatcttcatggtttacagaaattggtgcaggcagccagcagttagattccattcatgtaacacagttggagagagataccgttttagtgtgtttagacaaatttgtgaaaattgtaaatctacaaggaaaattaaaatcaagtaagaaactggcctctgagttaagttttgattttcgcattgaatctgtagtatgccttcaagacagtgtgttggctttctggaaacatgggatgcagggtaaaagcttcaagtcagatgaggttacccaggagatttcagatgaaacaagagttttccgcttattaggatcagacagggttgtcgttttggaaagtaggccaacagaaaatcctactgcacacagcaatctctacatcttggctggacatgaaaatagttactaagcaacagaaactgatctcaaatgacaggaaaatgaatatactccattgaaaggaaaaataaggaaattcaatacaaactgcactatgatttgctttaactattatgggttatattgcaaatgatctgtactttagggtagaattcaatattttctgcagctggaaacagctagtctatctcttgccactgtgtggtggttatatcaagtttgcttaataaaagctatgagacaaatagtcctctagttccaggaaacacagtctttttttaaaaaaaacaatgtttgtaacaagggtgccatggtatttttagataactcgtgattatcttaagagaggtaaatttagtgatcattttatatcatgtcttattccttcttaatgaacataatttgttaaattctcaagcaaggttttcacttttatattggccattctgtatgtttttgtaaaacagaatatttaatccttatttattaatctcttgctggagtggtgtaatgtatctaacttttagcaaaggagggttgcagagcagcttaaattttttttataatgtataagaattttgtttatcttttaagagtagtaaagtactttgagtgtttgggggttcaacacacacatgcaattttgcttaacaaaagtattttataatacagtttcatacagaattaccttaaaagggagtcttatgttttcaactacagatagttgtaagggatcatacagaagatattgatgatagttgaaatattcttagaaggggtgtgtatgtctagctgtgtctaccatgtgtatgtattcttgacaagcagtataaaatacctgtgatttttctttacattagggataatgcataaggaattaatcttcatatatattatcatccctaatgtagcagggggaagtatttaattgcccatgatatgtattttacttatactatgccagagaggaaactataaagtaattacacatgtaatcttgggtttttcacatatgtaggtattcattttgagtaggttgaagaagaaaaaaaatatttaaatgaattgaattcctgatgggatagtatcaataagtatttaaaagccagtattctaaaaataataaagggtagggtcatttttgagtttgtttttcttttgctattgttaatattcaaaattaaagtgttacattggtacctgttgtcttaatgcatttattgagaacagcattgagatgatgaacaaggggttagcaatagcaaactctataattattttgactaattacttaagaggaaaacagtataagtatctcattcagtatttagcaattctgtaaaataagtattatctctatttttcagatgaggaagtaagggtttagcaaggttaagagatctatccaatttacacagcaagttagtagttgagcctgaccatgagtcttctgactctgttcttttcactatgcaatacgcaaacaataaaatgttatacaaatggaatataaagttatttattctttaaaaatgcacatatgatatgatttcagtaagtgtgtggctgtttattttggctatgttaagaatacgggatacagtagatgacaggggaaccatcctcaaaacaggggacatttacatgatggataagaaagccagaatcctccttttcttactgaatcctggcagccagatctttaccatcccatggtggaataccgaagagtcttctctgtgaaatctgaccaatgcaagtgaaaaggcctcattaagatcttgatgtcagacatgtcccggctaaactgcccagctagatgacactacagtgaaaatcatagttggcaatcccaccatcccacgcattatgtctagaccttgcagttagtcttttagtcctgtgctcttaaaaatgagcaaacaaccaaggattacaaataaatgaaagagaaaaaacagtctggggaaaacagaggaaacaggctatgaagggtaaggagaacatcaaaagaaaaagtattttcagaaggatgttgcaaccatgagtgagtcaagggcagggtacttttaaaaagttgggtttcaaaaaaacaaaaagagctcttagaaaataatatgacagcatag

SEQ ID NO: 357011 - DNA, 4972 bp, Homo sapiens
ggcgccgacccatgctggctgggaacgtgtctcccggtgacgcagccccgggtggggaacgtggtgcggcggcggcggcggcggcgactgtacgcgcctccgccgcccccgagaggacgcgccgtgcagcggctgagtggcggcggcggcgacggcaaacccggagctgccggccggcgcgcgggaggaggacgcgggtgcggtctaggaagtaggtcccgggctccgcgctcaacaaagacggggccgcccccattagacggagctgcgggcggaggctccatgttgggaagcggcgccgttcgtgcttgttagcgggaatccgggagccgcggggtgagctggcgggggccgggccctaagtgaagatggaggccccgctgcggcctgccgcggacatcctgaggcggaacccgcagcaggactacgaactcgtccagagggtcggcagcggcacctacggggacgtctataaggccagaaatgtacacacaggagagctggctgcagtaaaaatcattaaattggagcctggagatgatttttctttgattcaacaagaaatatttatggttaaagaatgtaaacattgtaacatcgttgcctactttgggagttatcttagtcgggaaaaactatggatttgtatggaatactgtggtggcggatcacttcaagatatttaccatgttactggaccattatcagaattgcaaatagcctatgtatgcagagaaaccttacagggtcttgcctatttgcatactaaaggcaaaatgcatagagatatcaaaggtgctaatattttattgacagaccatggcgatgtaaaattagctgactttggtgtggctgcaaaaataacagctaccattgcaaaacgaaaatctttcattggcaccccttactggatggccccagaagttgcagcagtagagaagaatggtggctacaaccaactctgtgatatctgggcagtaggaataacagcaattgaacttggagaacttcagccacctatgtttgatctccacccaatgagggctctcttcttaatgtcaaaaagtaattttcagcctccaaaactaaaggacaaaacaaaatggtcatcaacattccataattttgtcaaaatagcactaaccaaaaacccaaaaaaaagaccaactgctgaaagacttctgactcacacttttgttgcacagccaggtctctctagagccctagcagttgaactgttagacaaagtgaacaatccagataaccacgcacattacactgaagcagatgacgatgactttgagccccatgcaatcattcgtcataccattagatctacaaacaggaatgccagagctgaacggacagcttcagaaataaattttgacaaattacaatttgaacctcctctgagaaaagaaacagaagcacgagatgaaatgggattgtcatcagacccaaatttcatgttacagtggaatccttttgttgatggtgcaaatactggcaaatcaacctcaaaacgtgcaataccacctcccctacctcctaagccaaggataagcagttaccctgaagacaactttccggatgaagaaaaagcatcaaccataaaacattgtcctgattcagaaagcagagctccccaaattctcagaagacagagtagcccaagttgtgggcctgtggcagagacttcttctattggaaatggtgatggtatttcaaaactgatgagtgaaaatacagaaggatcagcacaagcaccacagttaccacgaaaaaaggacaaacgagacttccctaaaccagccatcaatggccttccacccaccccaaaagttctgatgggagcatgcttttcaaaagtttttgatggctgtcctttgaaaattaattgtgcaacatcctggatacatcctgatacaaaagatcagtacattatttttggaactgaagatggtatttacacactgaatctcaatgagctacatgaggcaacgatggaacagttatttccacggaagtgtacttggctgtatgttatcaataatactttaatgtcattatcagaaggaaaaacctttcagctctactctcacaatcttatagctttgtttgaacatgccaaaaaaccaggattagctgcccatattcaaactcacaggtttccagaccgaatactaccaagaaaattcgctttaacaacaaagattcctgatacaaaaggctgccacaaatgttgcatagtcagaaacccttacacgggacataaatacctctgtggagctttacagtctggaattgttttacttcagtggtatgagccaatgcagaaattcatgttgataaagcactttgattttcctttgccaagtcctttgaatgtttttgaaatgctggtgatacctgaacaggaataccctatggtctgtgtagctattagcaaaggcactgaatcgaatcaggtagttcagtttgagacaatcaatttgaactctgcatcttcatggtttacagaaattggtgcaggcagccagcagttagattccattcatgtaacacagttggagagagataccgttttagtgtgtttagacaaatttgtgaaaattgtaaatctacaaggaaaattaaaatcaagtaagaaactggcctctgagttaagttttgattttcgcattgaatctgtagtatgccttcaagacagtgtgttggctttctggaaacatgggatgcagggtaaaagcttcaagtcagatgagggttgtcgttttggaaagtaggccaacagaaaatcctactgcacacagcaatctctacatcttggctggacatgaaaatagttactaagcaacagaaactgatctcaaatgacaggaaaatgaatatactccattgaaaggaaaaataaggaaattcaatacaaactgcactatgatttgctttaactattatgggttatattgcaaatgatctgtactttagggtagaattcaatattttctgcagctggaaacagctagtctatctcttgccactgtgtggtggttatatcaagtttgcttaataaaagctatgagacaaatagtcctctagttccaggaaacacagtctttttttaaaaaaaacaatgtttgtaacaagggtgccatggtatttttagataactcgtgattatcttaagagaggtaaatttagtgatcattttatatcatgtcttattccttcttaatgaacataatttgttaaattctcaagcaaggttttcacttttatattggccattctgtatgtttttgtaaaacagaatatttaatccttatttattaatctcttgctggagtggtgtaatgtatctaacttttagcaaaggagggttgcagagcagcttaaattttttttataatgtataagaattttgtttatcttttaagagtagtaaagtactttgagtgtttgggggttcaacacacacatgcaattttgcttaacaaaagtattttataatacagtttcatacagaattaccttaaaagggagtcttatgttttcaactacagatagttgtaagggatcatacagaagatattgatgatagttgaaatattcttagaaggggtgtgtatgtctagctgtgtctaccatgtgtatgtattcttgacaagcagtataaaatacctgtgatttttctttacattagggataatgcataaggaattaatcttcatatatattatcatccctaatgtagcagggggaagtatttaattgcccatgatatgtattttacttatactatgccagagaggaaactataaagtaattacacatgtaatcttgggtttttcacatatgtaggtattcattttgagtaggttgaagaagaaaaaaaatatttaaatgaattgaattcctgatgggatagtatcaataagtatttaaaagccagtattctaaaaataataaagggtagggtcatttttgagtttgtttttcttttgctattgttaatattcaaaattaaagtgttacattggtacctgttgtcttaatgcatttattgagaacagcattgagatgatgaacaaggggttagcaatagcaaactctataattattttgactaattacttaagaggaaaacagtataagtatctcattcagtatttagcaattctgtaaaataagtattatctctatttttcagatgaggaagtaagggtttagcaaggttaagagatctatccaatttacacagcaagttagtagttgagcctgaccatgagtcttctgactctgttcttttcactatgcaatacgcaaacaataaaatgttatacaaatggaatataaagttatttattctttaaaaatgcacatatgatatgatttcagtaagtgtgtggctgtttattttggctatgttaagaatacgggatacagtagatgacaggggaaccatcctcaaaacaggggacatttacatgatggataagaaagccagaatcctccttttcttactgaatcctggcagccagatctttaccatcccatggtggaataccgaagagtcttctctgtgaaatctgaccaatgcaagtgaaaaggcctcattaagatcttgatgtcagacatgtcccggctaaactgcccagctagatgacactacagtgaaaatcatagttggcaatcccaccatcccacgcattatgtctagaccttgcagttagtcttttagtcctgtgctcttaaaaatgagcaaacaaccaaggattacaaataaatgaaagagaaaaaacagtctggggaaaacagaggaaacaggctatgaagggtaaggagaacatcaaaagaaaaagtattttcagaaggatgttgcaaccatgagtgagtcaagggcagggtacttttaaaaagttgggtttcaaaaaaacaaaaagagctcttagaaaataatatgacagcatag

SEQ ID NO: 357012 - DNA, 2908 bp, Homo sapiens
ggcgccgacccatgctggctgggaacgtgtctcccggtgacgcagccccgggtggggaacgtggtgcggcggcggcggcggcggcgactgtacgcgcctccgccgcccccgagaggacgcgccgtgcagcggctgagtggcggcggcggcgacggcaaacccggagctgccggccggcgcgcgggaggaggacgcgggtgcggtctaggaagtaggtcccgggctccgcgctcaacaaagacggggccgcccccattagacggagctgcgggcggaggctccatgttgggaagcggcgccgttcgtgcttgttagcgggaatccgggagccgcggggtgagctggcgggggccgggccctaagtgaagatggaggccccgctgcggcctgccgcggacatcctgaggcggaacccgcagcaggactacgaactcgtccagagggtcggcagcggcacctacggggacgtctataaggccagaaatgtacacacaggagagctggctgcagtaaaaatcattaaattggagcctggagatgatttttctttgattcaacaagaaatatttatggttaaagaatgtaaacattgtaacatcgttgcctactttgggagttatcttagtcgggaaaaactatggatttgtatggaatactgtggtggcggatcacttcaagatatttaccatgttactggaccattatcagaattgcaaatagcctatgtatgcagagaaaccttacagggtcttgcctatttgcatactaaaggcaaaatgcatagagatatcaaaggtgctaatattttattgacagaccatggcgatgtaaaattagctgactttggtgtggctgcaaaaataacagctaccattgcaaaacgaaaatctttcattggcaccccttactggatggccccagaagttgcagcagtagagaagaatggtggctacaaccaactctgtgatatctgggcagtaggaataacagcaattgaacttggagaacttcagccacctatgtttgatctccacccaatgagggctctcttcttaatgtcaaaaagtaattttcagcctccaaaactaaaggacaaaacaaaatggtcatcaacattccataattttgtcaaaatagcactaaccaaaaacccaaaaaaaagaccaactgctgaaagacttctgactcacacttttgttgcacagccaggtctctctagagccctagcagttgaactgttagacaaagtgaacaatccagataaccacgcacattacactgaagcagatgacgatgactttgagccccatgcaatcattcgtcataccattagatctacaaacaggaatgccagagctgaacggacagcttcagaaataaattttgacaaattacaatttgaacctcctctgagaaaagaaacagaagcacgagatgaaatgggattgtcatcagacccaaatttcatgttacagtggaatccttttgttgatggtgcaaatactggcaaatcaacctcaaaacgtgcaataccacctcccctacctcctaagccaaggataagcagttaccctgaagacaactttccggatgaagaaaaagcatcaaccataaaacattgtcctgattcagaaagcagagctccccaaattctcagaagacagagtagcccaagttgtgggcctgtggcagagacttcttctattggaaatggtgatggtatttcaaaactgatgagtgaaaatacagaaggatcagcacaagcaccacagttaccacgaaaaaaggacaaacgagacttccctaaaccagccatcaatggccttccacccaccccaaaagttctgatgggagcatgcttttcaaaagtttttgatggctgtcctttgaaaattaattgtgcaacatcctggatacatcctgatacaaaagatcagtacattatttttggaactgaagatggtatttacacactgaatctcaatgagctacatgaggcaacgatggaacagttatttccacggaagtgtacttggctgtatgttatcaataatactttaatgtcattatcagaaggaaaaacctttcagctctactctcacaatcttatagctttgtttgaacatgccaaaaaaccaggattagctgcccatattcaaactcacaggtttccagaccgaatactaccaagaaaattcgctttaacaacaaagattcctgatacaaaaggctgccacaaatgttgcatagtcagaaacccttacacgggacataaatacctctgtggagctttacagtctggaattgttttacttcagtggtatgagccaatgcagaaattcatgttgataaagcactttgattttcctttgccaagtcctttgaatgtttttgaaatgctggtgatacctgaacaggaataccctatggtctgtgtagctattagcaaaggcactgaatcgaatcaggtagttcagtttgagacaatcaatttgaactctgcatcttcatggtttacagaaattggtgcaggcagccagcagttagattccattcatgtaacacagttggagagagataccgttttagtgtgtttagacaattgtgacctgtcatctacacgcacattcaatcagctagcaactggcctctgagtaaggttcgatttcgcattgatctgtagatgcttcagaccagggttggcctccggacctggatgccggaaacctacattcagtggggtccgggattcattaacaaaggttccgcttgacacacgagtctccttggagaggcacaaaccctgggatcttctgtggggtagtttacacacgctcgcgatactcggagaacaccttcttatctagacggactgcccgtgtctatatttcattcaaacctcttattg

SEQ ID NO: 357013 - DNA, 2113 bp, Homo sapiens
ggcgccgacccatgctggctgggaacgtgtctcccggtgacgcagccccgggtggggaacgtggtgcggcggcggcggcggcggcgactgtacgcgcctccgccgcccccgagaggacgcgccgtgcagcggctgagtggcggcggcggcgacggcaaacccggagctgccggccggcgcgcgggaggaggacgcgggtgcggtctaggaagtaggtcccgggctccgcgctcaacaaagacggggccgcccccattagacggagctgcgggcggaggctccatgttgggaagcggcgccgttcgtgcttgttagcgggaatccgggagccgcggggtgagctggcgggggccgggccctaagtgaagatggaggccccgctgcggcctgccgcggacatcctgaggcggaacccgcagcaggactacgaactcgtccagagggtcggcagcggcacctacggggacgtctataaggccagaaatgtacacacaggagagctggctgcagtaaaaatcattaaattggagcctggagatgatttttctttgattcaacaagaaatatttatggttaaagaatgtaaacattgtaacatcgttgcctactttgggagttatcttagtcgggaaaaactatggatttgtatggaatactgtggtggcggatcacttcaagatatttaccatgttactggaccattatcagaattgcaaatagcctatgtatgcagagaaaccttacagggtcttgcctatttgcatactaaaggcaaaatgcatagagatatcaaaggtgctaatattttattgacagaccatggcgatgtaaaattagctgactttggtgtggctgcaaaaataacagctaccattgcaaaacgaaaatctttcattggcaccccttactggatggccccagaagttgcagcagtagagaagaatggtggctacaaccaactctgtgatatctgggcagtaggaataacagcaattgaacttggagaacttcagccacctatgtttgatctccacccaatgagggctctcttcttaatgtcaaaaagtaattttcagcctccaaaactaaaggacaaaacaaaatggtcatcaacattccataattttgtcaaaatagcactaaccaaaaacccaaaaaaaagaccaactgctgaaagacttctgactcacacttttgttgcacagccaggtctctctagagccctagcagttgaactgttagacaaagtgaacaatccagataaccacgcacattacactgaagcagatgacgatgactttgagccccatgcaatcattcgtcataccattagatctacaaacaggaatgccagagctgaacggacagcttcagaaataaattttgacaaattacaatttgaacctcctctgagaaaagaaacagaagcacgagatgaaatgggattgtcatcagacccaaatttcatgttacagtggaatccttttgttgatggtgcaaatactggcaaatcaacctcaaaacgtgcaataccacctcccctacctcctaagccaaggataagcagttaccctgaagacaactttccggatgaagaaaaagcatcaaccataaaacattgtcctgattcagaaagcagagctccccaaattctcagaagacagagtagcccaagttgtgggcctgtggcagagacttcttctattggaaatggtgatggtatttcaaaactgatgagtgaaaatacagaaggatcagcacaagcaccacagttaccacgaaaaaaggacaaacgagacttccctaaaccagccatcaatggccttccacccaccccaaaagttctgatgggagcatgcttttcaaaagtttttgatggctgtcctttgaaaattaattgtgcaacatcctggatacatcctgatacaaaagatcagtacattatttttggaactgaagatggtatttacacactgaatctcaatgagctacatgaggcaacgatggaacagttatttccacggaagtgtacttggctgtatgttatcaataatactttaatgtcattatcaggtatgtatgtgatgatgaaaaataaaccatagataagcag

SEQ ID NO: 357014 - DNA, 906 bp, Homo sapiens
cacgagtagaagagaaaaataataatggcgaaagtgatcctatagttaacacttaagcattctatattaagaaattttaagattctgtgtttaaggaagatcacctttacttcatccattccgctagtaaatcagtattttaatctttttcatgtttctcagaaaggggtataatcatgtgccacataaggacattttggtcaacgatggaccccatatacagtggtggtcccataagattagaatggagctgaaaaattcctatcacttagtaatgttgtagctatcataatgtcctagcacagtgctttactcacatgcttgtggtgatgctggtgtaaacaaacttacctcattgccagttgtataaaaggtataacacatggttatatatagtgcctaatacctattcatgctaataaatgattatgttacaggcttatgtatttactctacttcttattgtttttgtagagtgtacctcgtgccgaattcggcacgagtgcacgttggaggtataaggtatctgtcacactgtctggaaaaaaggttacaggacacatactagtttctttgttcggaaataaaggaaactctaagcagtatgaaattttcaagggcactctcaaaccagatagtactcattccaatgaatttgactcagatgtggatgttggggacttgcagatggttaaatttatttggtataacaatgtgatcaacccaactttacctagagtgggagcatccaagattatagtggagacaaatgttggaaaacagttcaacttctgtagtccagaaaccgtcagggaggaagttctgctcaccctcacaccgtgttaggagactactgttatttgaccaatgaattgacttctaataaaatctagtggtgatgcatta

SEQ ID NO: 357015 - DNA, 569 bp, Homo sapiens
  misc_feature (22)..(22): n is a, c, g, or t
ctagataaaatttctggcccanatcatttgttttcccaggatatctatcagcatagtgacccatctgtgggcagcctccacttggacaagggaaacacttgtttgcagtgaagacgttgtaagaggcacagaaattttatctagacactggtgatgccagtaattttgcacgttggaggtataaggtatctgtcacactgtctggaaaaaaggttacaggacacatactagtttctttgttcggaaataaaggaaactctaagcagtatgaaattttcaagggcactctcaaaccagatagtactcattccaatgaatttgactcagatgtggatgttggggacttgcagatggttaaatttatttggtataacaatgtgatcaacccaactttacctagagtgggagcatccaagattatagtggagacaaatgttggaaaacagttcaacttctgtagtccagaaaccgtcagggaggaagttctgctcaccctcacaccgtgttaggagactactgttatttgaccaatgaattgacttctaataaaatctagtggtgatgcatta

SEQ ID NO: 357016 - DNA, 1493 bp, Homo sapiens
agcggccgctcgcgatctagaacggaactgccacgatgctgccactttggactctttcactgctgctgggagcagtagcaggaaaagaagtttgctacgaaagactcggctgcttcagtgatgactccccatggtcaggaattacggaaagacccctccatatattgccttggtctccaaaagatgtcaacacccgcttcctcctatatactaatgagaacccaaacaactttcaagaagttgccgcagattcatcaagcatcagtggctccaatttcaaaacaaatagaaaaactcgctttattattcatggattcatagacaagggagaagaaaactggctggccaatgtgtgcaagaatctgttcaaggtggaaagtgtgaactgtatctgtgtggactggaaaggtggctcccgaactggatacacacaagcctcgcagaacatcaggatcgtgggagcagaagtggcatattttgttgaatttcttcagtcggcgttcggttactcaccttccaacgtgcatgtcattggccacagcctgggtgcccacgctgctggggaggctggaaggagaaccaatgggaccattggacgcatcacagggttggacccagcagaaccttgctttcagggcacacctgaattagtccgattggaccccagcgatgccaaatttgtggatgtaattcacacggatggtgcccccatagtccccaatttggggtttggaatgagccaagtcgtgggccacctagatttctttccaaatggaggagtggaaatgcctggatgtaaaaagaacattctctctcagattgtggacatagacggaatctgggaagggactcgagactttgcggcctgtaatcacttaagaagctacaaatattacactgatagcatcgtcaaccctgatggctttgctggattcccctgtgcctcttacaacgtcttcactgcaaacaagtgtttcccttgtccaagtggaggctgcccacagatgggtcactatgctgatagatatcctgggaaaacaaatgatgtgggccagaaattttatctagacactggtgatgccagtaattttgcacgttggaggtataaggtatctgtcacactgtctggaaaaaaggttacaggacacatactagtttctttgttcggaaataaaggaaactctaagcagtatgaaattttcaagggcactctcaaaccagatagtactcattccaatgaatttgactcagatgtggatgttggggacttgcagatggttaaatttatttggtataacaatgtgatcaacccaactttacctagagtgggagcatccaagattatagtggagacaaatgttggaaaacagttcaacttctgtagtccagaaaccgtcagggaggaagttctgctcaccctcacaccgtgttaggagactactgttatttgaccaatgaattgacttctaataaaatctagtggtgatgcatta

SEQ ID NO: 357017 - DNA, 201 bp, Homo sapiens
  misc_feature (16)..(16): n is a, c, g, or t
  misc_feature (19)..(19): n is a, c, g, or t
  misc_feature (42)..(42): n is a, c, g, or t
gtagatcccccggggngcnggaattcggcacgagtgggagcntccaacattcgtctccactataatcttggataacagttcaacttctgtagtccagaaaccgtcagggaggaagttctgctcaccctcacaccgtgttaggagactactgttatttgaccaatgaattgacttctaataaaatctagtggtgatgcatta

SEQ ID NO: 357018 - DNA, 1917 bp, Homo sapiens
agcggccgctcgcgatctagaacggaactgccacgatgctgccactttggactctttcactgctgctgggagcagtagcaggaaaagaagtttgctacgaaagactcggctgcttcagtgatgactccccatggtcaggaattacggaaagacccctccatatattgccttggtctccaaaagatgtcaacacccgcttcctcctatatactaatgagaacccaaacaactttcaagaagttgccgcagattcatcaagcatcagtggctccaatttcaaaacaaatagaaaaactcgctttattattcatggattcatagacaagggagaagaaaactggctggccaatgtgtgcaagaatctgttcaaggtggaaagtgtgaactgtatctgtgtggactggaaaggtggctcccgaactggatacacacaagcctcgcagaacatcaggatcgtgggagcagaagtggcatattttgttgaatttcttcagtcggcgttcggttactcaccttccaacgtgcatgtcattggccacagcctgggtgcccacgctgctggggaggctggaaggagaaccaatgggaccattggacgcatcacagggttggacccagcagaaccttgctttcagggcacacctgaattagtccgattggaccccagcgatgccaaatttgtggatgtaattcacacggatggtgcccccatagtccccaatttggggtttggaatgagccaagtcgtgggccacctagatttctttccaaatggaggagtggaaatgcctggatgtaaaaagaacattctctctcagattgtggacatagacggaatctgggaagggactcgagactttgcggcctgtaatcacttaagaagctacaaatattacactgatagcatcgtcaaccctgatggctttgctggattcccctgtgcctcttacaacgtcttcactgcaaacaagtgtttcccttgtccaagtggaggctgcccacagatgggtcactatgctgatagatatcctgggaaaacaaatgatgtgggccagaaattttatctagacactggtgatgccagtaattttgcacgttggaggtataaggtatctgtcacactgtctggaaaaaaggttacaggacacatactagtttctttgttcggaaataaaggaaactctaagcagtatgaaattttcaagggcactctcaaaccagatagtactcattccaatgaatttgactcagatgtggatgttggggacttgcagatggttaaatttatttggtataacaatgtgatcaacccaactttacctagagtgggagcatccaagattatagtggagacaaatgttggaaaacagttcaacttctgtagtccagaaaccgtcagggaggaagttctgctcaccctcacaccgtgttaggagactactgttatttgaccaatgaattgacttctaataaaatctagtggtgatgcattaaaaaaaaaaaaaaaaaaaaaaaaaaaaaaaaaaaaaaaaaaaaaaaaaaaaaaaaaaaaaaaaaaaaaaaaaaaaaaaaaaaaaaaaaaaaaaaaaaaaagaaaaaaaaaaaaaaaaaaaaaaaaaaaaaaatttggggggggcggggccggaagaaggtcttcctaaaaaccccatctgggttgtgggcggcgcggggcgccacgatgggtatggtagaccgcgtgcgccaacagcgcgtgttcccaaggagaaacccgggcgccacagaactgcggcggctgtggtcttccccaaaaaaaaaacgcgccggggggggcaccgggcgggctcttctgacaaccccagaaggggggtccagaggggcaccaccggggctcactcccgcgaggccctaggacgccaaataaattgcccaccaagg

SEQ ID NO: 357019 - DNA, 1510 bp, Homo sapiens
  misc_feature (9)..(9): n is a, c, g, or t
  misc_feature (11)..(11): n is a, c, g, or t
  misc_feature (15)..(15): n is a, c, g, or t
  misc_feature (33)..(34): n is a, c, g, or t
  misc_feature (36)..(37): n is a, c, g, or t
gaattgggnangggnctttctaaaaagagcgtnngnntgaggaactgccacgatgctgccactttggactctttcactgctgctgggagcagtagcaggaaaagaagtttgctacgaaagactcggctgcttcagtgatgactccccatggtcaggaattacggaaagacccctccatatattgccttggtctccaaaagatgtcaacacccgcttcctcctatatactaatgagaacccaaacaactttcaagaagttgccgcagattcatcaagcatcagtggctccaatttcaaaacaaatagaaaaactcgctttattattcatggattcatagacaagggagaagaaaactggctggccaatgtgtgcaagaatctgttcaaggtggaaagtgtgaactgtatctgtgtggactggaaaggtggctcccgaactggatacacacaagcctcgcagaacatcaggatcgtgggagcagaagtggcatattttgttgaatttcttcagtcggcgttcggttactcaccttccaacgtgcatgtcattggccacagcctgggtgcccacgctgctggggaggctggaaggagaaccaatgggaccattggacgcatcacagggttggacccagcagaaccttgctttcagggcacacctgaattagtccgattggaccccagcgatgccaaatttgtggatgtaattcacacggatggtgcccccatagtccccaatttggggtttggaatgagccaagtcgtgggccacctagatttctttccaaatggaggagtggaaatgcctggatgtaaaaagaacattctctctcagattgtggacatagacggaatctgggaagggactcgagactttgcggcctgtaatcacttaagaagctacaaatattacactgatagcatcgtcaaccctgatggctttgctggattcccctgtgcctcttacaacgtcttcactgcaaacaagtgtttcccttgtccaagtggaggctgcccacagatgggtcactatgctgatagatatcctgggaaaacaaatgatgtgggccagaaattttatctagacactggtgatgccagtaattttgcacgttggaggtataaggtatctgtcacactgtctggaaaaaaggttacaggacacatactagtttctttgttcggaaataaaggaaactctaagcagtatgaaattttcaagggcactctcaaaccagatagtactcattccaatgaatttgactcagatgtggatgttggggacttgcagatggttaaatttatttggtataacaatgtgatcaacccaactttacctagagtgggagcatccaagattatagtggagacaaatgttggaaaacagttcaacttctgtagtccagaaaccgtcagggaggaagttctgctcaccctcacaccgtgttaggagactactgttatttgaccaatgaattgacttctaataaaatctagtggtgatgcatta

SEQ ID NO: 357020 - DNA, 1864 bp, Homo sapiens
agcggccgctcgcgatctagaacggaactgccacgatgctgccactttggactctttcactgctgctgggagcagtagcaggaaaagaagtttgctacgaaagactcggctgcttcagtgatgactccccatggtcaggaattacggaaagacccctccatatattgccttggtctccaaaagatgtcaacacccgcttcctcctatatactaatgagaacccaaacaactttcaagaagttgccgcagattcatcaagcatcagtggctccaatttcaaaacaaatagaaaaactcgctttattattcatggattcatagacaagggagaagaaaactggctggccaatgtgtgcaagaatctgttcaaggtggaaagtgtgaactgtatctgtgtggactggaaaggtggctcccgaactggatacacacaagcctcgcagaacatcaggatcgtgggagcagaagtggcatattttgttgaatttcttcagtcggcgttcggttactcaccttccaacgtgcatgtcattggccacagcctgggtgcccacgctgctggggaggctggaaggagaaccaatgggaccattggacgcatcacagggttggacccagcagaaccttgctttcagggcacacctgaattagtccgattggaccccagcgatgccaaatttgtggatgtaattcacacggatggtgcccccatagtccccaatttggggtttggaatgagccaagtcgtgggccacctagatttctttccaaatggaggagtggaaatgcctggatgtaaaaagaacattctctctcagattgtggacatagacggaatctgggaagggactcgagactttgcggcctgtaatcacttaagaagctacaaatattacactgatagcatcgtcaaccctgatggctttgctggattcccctgtgcctcttacaacgtcttcactgcaaacaagtgtttcccttgtccaagtggaggctgcccacagatgggtcactatgctgatagatatcctgggaaaacaaatgatgtgggccagaaattttatctagacactggtgatgccagtaattttgcacgttggaggtataaggtatctgtcacactgtctggaaaaaaggttacaggacacatactagtttctttgttcggaaataaaggaaactctaagcagtatgaaattttcaagggcactctcaaaccagatagtactcattccaatgaatttgactcagatgtggatgttggggacttgcagatggttaaatttatttggtataacaatgtgatcaacccaactttacctagagtgggagcatccaagattatagtggagacaaatgttggaaaacagttcaacttctgtagtccagaaaccgtcagggaggaagttctgctcaccctcacaccgtgttaggagactactgttatttgaccaatgaattgacttctaataaaatctagtggtgatgcattaacatgagacaatgtccctgataagaacggtaaggggcagatctcgacataaattcatcctccatctcaaaatgaacttggactcctatgtcccgatatgtataatgctgcccactttaaggggcgcctcaaagtttaaacctaaggtcatggactgtgtctctggcaccatactccctaattcgctgtccaggtttttctaacacataatcactgcctgctggaacactggtgtgccaaacaagggcaagatcttccacgtgtggcaacaaaagccgatgggaattagaaattccgccccggggtcctcgcaccttggcacgtccaggttccgtaacaaaccagcacaacctctcccagactcactttatg

SEQ ID NO: 357021 - DNA, 1319 bp, Homo sapiens
tatccttctgggggattgcaggaaaagaagtttgctacgaaagactcggctgcttcagtgatgactccccatggtcaggaattacggaaagaccctccaatttcaaaacaaatagaaaaactcgctttattattcatggattcatagacaagggagaagaaaactggctggccaatgtgtgcaagaatctgttcaaggtggaaagtgtgaactgtatctgtgtggactggaaaggtggctcccgaactggatacacacaagcctcgcagaacatcaggatcgtgggagcagaagtggcatattttgttgaatttcttcagtcggcgttcggttactcaccttccaacgtgcatgtcattggccacagcctgggtgcccacgctgctggggaggctggaaggagaaccaatgggaccattggacgcatcacagggttggacccagcagaaccttgctttcagggcacacctgaattagtccgattggaccccagcgatgccaaatttgtggatgtaattcacacggatggtgcccccatagtccccaatttggggtttggaatgagccaagtcgtgggccacctagatttctttccaaatggaggagtggaaatgcctggatgtaaaaagaacattctctctcagattgtggacatagacggaatctgggaagggactcgagactttgcggcctgtaatcacttaagaagctacaaatattacactgatagcatcgtcaaccctgatggctttgctggattcccctgtgcctcttacaacgtcttcactgcaaacaagtgtttcccttgtccaagtggaggctgcccacagatgggtcactatgctgatagatatcctgggaaaacaaatgatgtgggccagaaattttatctagacactggtgatgccagtaattttgcacgttggaggtataaggtatctgtcacactgtctggaaaaaaggttacaggacacatactagtttctttgttcggaaataaaggaaactctaagcagtatgaaattttcaagggcactctcaaaccagatagtactcattccaatgaatttgactcagatgtggatgttggggacttgcagatggttaaatttatttggtataacaatgtgatcaacccaactttacctagagtgggagcatccaagattatagtggagacaaatgttggaaaacagttcaacttctgtagtccagaaaccgtcagggaggaagttctgctcaccctcacaccgtgttaggagactactgttatttgaccaatgaattgacttctaataaaatctagtggtgatgcatta

SEQ ID NO: 357022 - DNA, 666 bp, Homo sapiens
  misc_feature (9)..(9): n is a, c, g, or t
  misc_feature (11)..(11): n is a, c, g, or t
  misc_feature (15)..(15): n is a, c, g, or t
  misc_feature (33)..(34): n is a, c, g, or t
  misc_feature (36)..(37): n is a, c, g, or t
gaattgggnangggnctttctaaaaagagcgtnngnntgaggaactgccacgatgctgccactttggactctttcactgctgctgggagcagtagcaggaaaagaagtttgctacgaaagactcggctgcttcagtgatgactccccatggtcaggaattacggaaagacccctccatatattgccttggtctccaaaagatgtcaacacccgcttcctcctatatactaatgagaacccaaacaactttcaagaagttgccgcagattcatcaagcatcagtggctccaatttcaaaacaaatagaaaaactcgcgacacatactagtttctttgttcggaaataaaggaaactctaagcagtatgaaattttcaagggcactctcaaaccagatagtactcattccaatgaatttgactcagatgtggatgttggggacttgcagatggttaaatttatttggtataacaatgtgatcaacccaactttacctagagtgggagcatccaagattatagtggagacaaatgttggaaaacagttcaacttctgtagtccagaaaccgtcagggaggaagttctgctcaccctcacaccgtgttaggagactactgttatttgaccaatgaattgacttctaataaaatctagtggtgatgcatta

SEQ ID NO: 357023 - DNA, 605 bp, Homo sapiens
  misc_feature (9)..(9): n is a, c, g, or t
  misc_feature (11)..(11): n is a, c, g, or t
  misc_feature (15)..(15): n is a, c, g, or t
  misc_feature (33)..(34): n is a, c, g, or t
  misc_feature (36)..(37): n is a, c, g, or t
gaattgggnangggnctttctaaaaagagcgtnngnntgaggaactgccacgatgctgccactttggactctttcactgctgctgggagcagtagcaggaaaagaagtttgctacgaaagactcggctgcttcagtgatgactccccatggtcaggaattacggaaagacccctccatatattgccttggtctccaaaagatgtcaacacccgcttcctcctatatactaatgagaacccaaacaactttcaagaagttgccgcagattcatcaagcatcagtggctccaatttcaaaacaaatagaaaaactcgcgggcactctcaaaccagatagtactcattccaatgaatttgactcagatgtggatgttggggacttgcagatggttaaatttatttggtataacaatgtgatcaacccaactttacctagagtgggagcatccaagattatagtggagacaaatgttggaaaacagttcaacttctgtagtccagaaaccgtcagggaggaagttctgctcaccctcacaccgtgttaggagactactgttatttgaccaatgaattgacttctaataaaatctagtggtgatgcatta

SEQ ID NO: 357024 - DNA, 587 bp, Homo sapiens
  misc_feature (9)..(9): n is a, c, g, or t
  misc_feature (11)..(11): n is a, c, g, or t
  misc_feature (15)..(15): n is a, c, g, or t
  misc_feature (33)..(34): n is a, c, g, or t
  misc_feature (36)..(37): n is a, c, g, or t
gaattgggnangggnctttctaaaaagagcgtnngnntgaggaactgccacgatgctgccactttggactctttcactgctgctgggagcagtagcaggaaaagaagtttgctacgaaagactcggctgcttcagtgatgactccccatggtcaggaattacggaaagacccctccatatattgccttggtctccaaaagatgtcaacacccgcttcctcctatatactaatgagaacccaaacaactttcaagaagttgccgcagattcatcaagcatcagtggctccaatttcaaaacaaatagaaaaactcgctttattattcatggattcatagacaagggagaagaaaactggctggccaatgtgtgcaagaatctgttcaaggtggaaagtgtgaactgtatctgtgtggactggaaaggtggctcccgaactggatacacacaagcctcgcagaacatcaggatcgtgggagcagaagtggcatattttgttgaatttcttcagggtaattactcccggattgcataaaagcctgtacacatggttttccagattatctttccaaaaaaaaaaaaaaaag

SEQ ID NO: 357025 - DNA, 1484 bp, Homo sapiens
  misc_feature (9)..(9): n is a, c, g, or t
  misc_feature (11)..(11): n is a, c, g, or t
  misc_feature (15)..(15): n is a, c, g, or t
  misc_feature (33)..(34): n is a, c, g, or t
  misc_feature (36)..(37): n is a, c, g, or t
gaattgggnangggnctttctaaaaagagcgtnngnntgaggaactgccacgatgctgccactttggactctttcactgctgctgggagcagtagcaggaaaagaagtttgctacgaaagactcggctgcttcagtgatgactccccatggtcaggaattacggaaagacccctccatatattgccttggtctccaaaagatgtcaacacccgcttcctcctatatactaatgagaacccaaacaactttcaagaagttgccgcagattcatcaagcatcagtggctccaatttcaaaacaaatagaaaaactcgctttattattcatggattcatagacaagggagaagaaaactggctggccaatgtgtgcaagaatctgttcaaggtggaaagtgtgaactgtatctgtgtggactggaaaggtggctcccgaaatcaggatcgtgggagcagaagtggcatattttgttgaatttcttcagtcggcgttcggttactcaccttccaacgtgcatgtcattggccacagcctgggtgcccacgctgctggggaggctggaaggagaaccaatgggaccattggacgcatcacagggttggacccagcagaaccttgctttcagggcacacctgaattagtccgattggaccccagcgatgccaaatttgtggatgtaattcacacggatggtgcccccatagtccccaatttggggtttggaatgagccaagtcgtgggccacctagatttctttccaaatggaggagtggaaatgcctggatgtaaaaagaacattctctctcagattgtggacatagacggaatctgggaagggactcgagactttgcggcctgtaatcacttaagaagctacaaatattacactgatagcatcgtcaaccctgatggctttgctggattcccctgtgcctcttacaacgtcttcactgcaaacaagtgtttcccttgtccaagtggaggctgcccacagatgggtcactatgctgatagatatcctgggaaaacaaatgatgtgggccagaaattttatctagacactggtgatgccagtaattttgcacgttggaggtataaggtatctgtcacactgtctggaaaaaaggttacaggacacatactagtttctttgttcggaaataaaggaaactctaagcagtatgaaattttcaagggcactctcaaaccagatagtactcattccaatgaatttgactcagatgtggatgttggggacttgcagatggttaaatttatttggtataacaatgtgatcaacccaactttacctagagtgggagcatccaagattatagtggagacaaatgttggaaaacagttcaacttctgtagtccagaaaccgtcagggaggaagttctgctcaccctcacaccgtgttaggagactactgttatttgaccaatgaattgacttctaataaaatctagtggtgatgcatta

SEQ ID NO: 357026 - DNA, 1029 bp, Homo sapiens
aggagcaacaggctgtaccacacagcccagtcggcgttcggttactcaccttccaacgtgcatgtcattggccacagcctgggtgcccacgctgctggggaggctggaaggagaaccaatgggaccattggacgcatcacagggttggacccagcagaaccttgctttcagggcacacctgaattagtccgattggaccccagcgatgccaaatttgtggatgtaattcacacggatggtgcccccatagtccccaatttggggtttggaatgagccaagtcgtgggccacctagatttctttccaaatggaggagtggaaatgcctggatgtaaaaagaacattctctctcagattgtggacatagacggaatctgggaagggactcgagactttgcggcctgtaatcacttaagaagctacaaatattacactgatagcatcgtcaaccctgatggctttgctggattcccctgtgcctcttacaacgtcttcactgcaaacaagtgtttcccttgtccaagtggaggctgcccacagatgggtcactatgctgatagatatcctgggaaaacaaatgatgtgggccagaaattttatctagacactggtgatgccagtaattttgcacgttggaggtataaggtatctgtcacactgtctggaaaaaaggttacaggacacatactagtttctttgttcggaaataaaggaaactctaagcagtatgaaattttcaagggcactctcaaaccagatagtactcattccaatgaatttgactcagatgtggatgttggggacttgcagatggttaaatttatttggtataacaatgtgatcaacccaactttacctagagtgggagcatccaagattatagtggagacaaatgttggaaaacagttcaacttctgtagtccagaaaccgtcagggaggaagttctgctcaccctcacaccgtgttaggagactactgttatttgaccaatgaattgacttctaataaaatctagtggtgatgcatta

SEQ ID NO: 357027 - DNA, 591 bp, Homo sapiens
  misc_feature (9)..(9): n is a, c, g, or t
  misc_feature (11)..(11): n is a, c, g, or t
  misc_feature (15)..(15): n is a, c, g, or t
  misc_feature (33)..(34): n is a, c, g, or t
  misc_feature (36)..(37): n is a, c, g, or t
gaattgggnangggnctttctaaaaagagcgtnngnntgaggaactgccacgatgctgccactttggactctttcactgctgctgggagcagtagcaggaaaagaagtttgctacgaaagactcggctgcttcagtgatgactccccatggtcaggaattacggaaagacccctccatatattgccttggtctccaaaagatgtcaacacccgcttcctcctatatactaatgagaacccaaacaactttcaagaagttgccgcagattcatcaagcatcagtggctccaatttcaaaacaaatagaaaaactcgctttattattcatggattcatagacaagggagaagaaaactggctggccaatgtgtgcaagaatctgttcaaggtggaaagtgtgaactgtatctgtgtggactggaaaggtggctcccgaactggatacacacaagcctcgcagaacatcaggatcgtgggagcagaagtggcatattttgttgaatttcttcagtaaaggtcgggcggtttcgggtttacttccaaccctttccaaaacgggggcaatgtgtgaatattgggcccaaccaagac

SEQ ID NO: 357028 - DNA, 620 bp, Homo sapiens
  misc_feature (9)..(9): n is a, c, g, or t
  misc_feature (11)..(11): n is a, c, g, or t
  misc_feature (15)..(15): n is a, c, g, or t
  misc_feature (33)..(34): n is a, c, g, or t
  misc_feature (36)..(37): n is a, c, g, or t
gaattgggnangggnctttctaaaaagagcgtnngnntgaggaactgccacgatgctgccactttggactctttcactgctgctgggagcagtagcaggaaaagaagtttgctacgaaagactcggctgcttcagtgatgactccccatggtcaggaattacggaaagacccctccatatattgccttggtctccaaaagatgtcaacacccgcttcctcctatatactaatgagaacccaaacaactttcaagaagttgccgcagattcatcaagcatcagtggctccaatttcaaaacaaatagaaaaactcgcaaaaaaaaaaaatttggggggggcggggccggaagaaggtcttcctaaaaaccccatctgggttgtgggcggcgcggggcgccacgatgggtatggtagaccgcgtgcgccaacagcgcgtgttcccaaggagaaacccgggcgccacagaactgcggcggctgtggtcttccccaaaaaaaaaacgcgccggggggggcaccgggcgggctcttctgacaaccccagaaggggggtccagaggggcaccaccggggctcactcccgcgaggccctaggacgccaaataaattgcccaccaagg

SEQ ID NO: 357029 - DNA, 443 bp, Homo sapiens
tttctaggtgggacattccaagagaaatggccttttttctatgtgctaaatgcttggatttcttatctgccagaggtggtttgaacaatgaataatttaaatggactgagctttgtatagagattggcttcggatgactcactaaaaatgtgtcattttattatgctagatggacttaagtgatattaaaaattcatatataagaaaaaaagagattccattcagttcagagcagaagtggatggcggtgaaatgcagtctgaagactgaggtgagacctttcaatcttcaacctcttctctcaaattgacgatatctgcaaaggcgctattccaaatcaggtcacattcagaggttccgaggttaggacttcaacatatcttttgtggggtacaattcaaccccactaaggagatggtttaggcatttcttccctaatcacc

SEQ ID NO: 357030 - DNA, 4713 bp, Homo sapiens
gaatcaacagaatttgtctttttgtgactggtttatttcacttaacttcatcctcaaggttcaacttaaaggtgtatccatgttgtagcacgtgtcagcattttctttcgttctcaggctaaatagtatttcattgtgtgtgtacaccatgtttcatgcattcattcatcccttgaaagattggtgggttgtttcctcctttttgcttttgtgaacagtgctacgaacatggttgtacaaacatctcttggagccccactagcagttcctttgggtatataccccaaagtggaattgctggatctggtagctccctttttaattttttgaggaatcgccacacagtttccataacagctgcaccattttacattcccaagaccttttttttttttttttttttaagaagaaaagatgtgtttctgcatttctggaagtctatgctgcatttccatttgttgaaatttaagaccagagtcatcttttctgctgtaattataatggtcactggcttgtgccttttcctcctctctctgccccatctgcacggggtctttgaacaagtcccagcaccttggtggacaagcctgtgtccctggcccatcatggaagccgctgcctttcagagtgggagtctgtaccctgttgcctcattccttgctgcgcccatgagtgagcttgtgcctgacctctccttccaggtggacttacacactgggctgtcggagttctcggtgacgcagcgccggctggcccatggctggaatgagtttgttgctgacaacagcgaacctgtgtggaagaaatacctggatcagtttaagaaccccctgatcctgctgctgctgggctctgccctggtgagtgtcctcaccaaggagtatgaggacgccgtcagcatcgccacggcagtgcttgtcgtggtcactgtcgccttcatccaggagtacaggtcggagaaatctctggaagagctgaccaagctggttcctccagaatgtaactgcctaagagaaggaaaactccagcacctgcttgctcgagaactggttcctggtgatgtcgtatctctctcgatcggagaccggatccctgcagacatccgactcactgaggtcacggacctcttggtggatgaatccagtttcaccggggaagccgagccatgtagtaaaacagacagccccttgacaggcggtggggacctcaccaccctcagcaacatcgtcttcatggggaccctggtgcagtatgggaggggccagggggtcgtgattggaacaggggaaagctctcagttcggagaagtgtttaagatgatgcaggctgaagagacacctaaaactcctttgcagaaaagcatggacaggctaggaaagcaactgacactcttctcctttggcataatcggtctcatcatgctcattggctggtcgcaagggaaacaactcctgagtatgttcacgatcggggtcagcctggctgtggcggccattccagagggtctgcccatcgtcgtcatggtgacgctggtcctgggagtgctgcggatggccaagaagcgggtcatcgtgaagaagttacccatcgtggagactttaggttgctgcagcgttctctgttctgacaagacggggactctgactgccaatgaaatgacagtgacccagcttgtaacgtcagatgggcttcgtgccgaggtcagcggagttgggtatgacggtcaagggactgtgtgtcttctaccatccaaggaagtcattaaggaattttccaatgtctcagtgggaaagttagtggaggcgggctgtgttgccaacaatgcggtcatcagaaagaacgccgtgatggggcagcccaccgagggtgcattgatggccctggcgatgaagatggacttaagtgatattaaaaattcatatataagaaaaaaagagattccattcagttcagagcagaagtggatggcggtgaaatgcagtctgaagactgaggatcaggaagacatttacttcatgaaaggggccttggaagaggtgatccgctactgcaccatgtacaacaacgggggcatccccctgccgctgacgccccagcagaggtcattctgcctgcaggaagagaagaggatggggtcgctcggtttgcgggtgctggccctggcttctgggcccgagctggggcggctgacgtttctaggtcttgtgggcatcattgaccccccgagagttggcgtgaaggaagcagtccaggttctctccgagtctggtgtgtctgtgaagatgataacgggggatgccctggagacggccttggccataggaagaaacatcggcctgtgcaacgggaagctgcaagccatgtccggggaggaggtggacagcgtggagaagggcgagctggccgaccgcgtggggaaggtgtccgtgttcttcaggaccagcccaaagcacaagctcaaaatcatcaaggctctgcaggagtcaggggcgatcgtggccatgactggggatggggtgaacgacgcagtggccctgaagtctgcagacattgggatcgccatggggcagacagggacggacgtcagcaaagaggccgccaacatgatcctggtggatgatgacttctcagccatcatgaatgcagtggaggaaggcaagggtattttttacaacatcaaaaactttgtccgattccagctgagcacgagcatctccgccctgagtctcatcactctgtccaccgtgttcaacctgcccagccccctcaacgccatgcagatcctatggatcaacatcatcatggatgggccaccggcgcagagcttgggggtagagcccgttgacaaagacgccttcaggcagccaccacggagtgtgcgggacaccatcctcagcagagccctcatcctgaagatcctcatgtccgcggccatcatcttcagcgggaccctctttatcttctggaaggagatgcctgaagacagagcaagcactccccgcaccacgacgatgacgttcacttgttttgtgtttttcgatctcttcaacgccttgacctgccgctctcagaccaagctgatatttgagatcggctttctcaggaaccacatgttcctctactccgtcctggggtccatcctggggcagctggcggtcatttacatccccccgctgcagagggtcttccagacggagaacctgggagcgcttgatttgctgtttttaactggattggcctcatccgtcttcattttgtcagagctcctcaaactatgtgaaaaatactgttgcagccccaagagagtccagatgcaccctgaagatgtgtagtggaccgcactccgcggcaccttccctaatcatctcgatctggttgtgactgtggcccctgccgtgtctcctcgtcaggggagacttttaggaggccgcagccttccatcaccggatcagtttttcctcttaggaaagctgcaggaacctcgtgggctccagggacccaggcccacatccatccagcgttcccgctggctgtgggacagacagggaggggcctgtacagaaacaccacactgtttattaaatcacaatgatttttattaaccatgtctaactacgtatctgtgccacagcttgcagtgaggcaggccactcgtggcagatacaaggggctcctgagaggcagtgggtaggatggtcacactctgcccattgccctcctggaggccccatttcctcatcataaaatgagggacttttaaataaagtgctatgccgggggataattattttgatgtgtttacctagggtttttcatacaaggggccaggttggaaacccacagccatgtgttaatggccacgtggggtgagcagcaatccatcatgaatggcctacaggaaggcctcggcttttggagataaagagtagggctgggcatggtggctcacgcctgtaatcccagcactttgcaaggccaaggcaggcagattcactttgaggccagcctggccaacacagcaaaaccctgtctgtctctactaaaagtttaaaaaaaaaaacagttgccaggcgtgatgatgcacacctgttaatcccagctactcgggaggctgaggcaggagaatggcttgagtccaggaggtggagattgtaccactgcactgcagcatgggcaacaaagcaagagtctctctcagaaagtggcccttctctccggaaccaggaactgtagtatctcctgctgcctgcagacaagcttgatttcccactgccccaaagacttccaaaaaccgatctgctcttccacgtgacagatggcagaggagagaggtctccatgctgttcttctgcctgaagccacgccagaaccaccaaagggaaccagaagggggactccgtccccatctctcaggaaataaggccagagctagaaccccccatttactagtcaggcctcactagagaaactgaagtgtgccacttccacagtctgctaaggagtgcctccccctgagtcagggacaattcttgctctacttttcaggatccttgggcacactgctggcccgagacatttacttcccatttaaaattaagtaatcaaaataccagggtcgattactctgaactcttgcttatgtaaactttagggataaaactgtagtaagacacaaaatgctaacaataaaatataaattagactacattaaaa

SEQ ID NO: 357031 - DNA, 3963 bp, Homo sapiens
gaatcaacagaatttgtctttttgtgactggtttatttcacttaacttcatcctcaaggttcaacttaaaggtgtatccatgttgtagcacgtgtcagcattttctttcgttctcaggctaaatagtatttcattgtgtgtgtacaccatgtttcatgcattcattcatcccttgaaagattggtgggttgtttcctcctttttgcttttgtgaacagtgctacgaacatggttgtacaaacatctcttggagccccactagcagttcctttgggtatataccccaaagtggaattgctggatctggtagctccctttttaattttttgaggaatcgccacacagtttccataacagctgcaccattttacattcccaagaccttttttttttttttttttttaagaagaaaagatgtgtttctgcatttctggaagtctatgctgcatttccatttgttgaaatttaagaccagagtcatcttttctgctgtaattataatggtcactggcttgtgccttttcctcctctctctgccccatctgcacggggtctttgaacaagtcccagcaccttggtggacaagcctgtgtccctggcccatcatggaagccgctgcctttcagagtgggagtctgtaccctgttgcctcattccttgctgcgcccatgagtgagcttgtgcctgacctctccttccaggtggacttacacactgggctgtcggagttctcggtgacgcagcgccggctggcccatggctggaatgagtttgttgctgacaacagcgaacctgtgtggaagaaatacctggatcagtttaagaaccccctgatcctgctgctgctgggctctgccctggtgagtgtcctcaccaaggagtatgaggacgccgtcagcatcgccacggcagtgcttgtcgtggtcactgtcgccttcatccaggtgagtatttcctgaggtcccagtcagggtaagctgggcgggacaggagcttcatggagtccccacctttaaacagcacatctgatgtgcttcctgccaggagtacaggtcggagaaatctctggaagagctgaccaagctggttcctccagaatgtaactgcctaagagaaggaaaactccagcacctgcttgctcgagaactggttcctggtgatgtcgtatctctctcgatcggagaccggatccctgcagacatccgactcactgaggtcacggacctcttggtggatgaatccagtttcaccggggaagccgagccatgtagtaaaacagacagccccttgacaggcggtggggacctcaccaccctcagcaacatcgtcttcatggggaccctggtgcagtatgggaggggccagggggtcgtgattggaacaggggaaagctctcagttcggagaagtgtttaagatgatgcaggctgaagagacacctaaaactcctttgcagaaaagcatggacaggctaggaaagcaactgacactcttctcctttggcataatcggtctcatcatgctcattggctggtcgcaagggaaacaactcctgagtatgttcacgatcggggtcagcctggctgtggcggccattccagagggtctgcccatcgtcgtcatggtgacgctggtcctgggagtgctgcggatggccaagaagcgggtcatcgtgaagaagttacccatcgtggagactttaggttgctgcagcgttctctgttctgacaagacggggactctgactgccaatgaaatgacagtgacccagcttgtaacgtcagatgggcttcgtgccgaggtcagcggagttgggtatgacggtcaagggactgtgtgtcttctaccatccaaggaagtcattaaggaattttccaatgtctcagtgggaaagttagtggaggcgggctgtgttgccaacaatgcggtcatcagaaagaacgccgtgatggggcagcccaccgagggtgcattgatggccctggcgatgaagatggacttaagtgatattaaaaattcatatataagaaaaaaagagattccattcagttcagagcagaagtggatggcggtgaaatgcagtctgaagactgaggatcaggaagacatttacttcatgaaaggggccttggaagaggtgatccgctactgcaccatgtacaacaacgggggcatccccctgccgctgacgccccagcagaggtcattctgcctgcaggaagagaagaggatggggtcgctcggtttgcgggtgctggccctggcttctgggcccgagctggggcggctgacgtttctaggtcttgtgggcatcattgaccccccgagagttggcgtgaaggaagcagtccaggttctctccgagtctggtgtgtctgtgaagatgataacgggggatgccctggagacggccttggccataggaagaaacatcggcctgtgcaacgggaagctgcaagccatgtccggggaggaggtggacagcgtggagaagggcgagctggccgaccgcgtggggaaggtgtccgtgttcttcaggaccagcccaaagcacaagctcaaaatcatcaaggctctgcaggagtcaggggcgatcgtggccatgactggggatggggtgaacgacgcagtggccctgaagtctgcagacattgggatcgccatggggcagacagggacggacgtcagcaaagaggccgccaacatgatcctggtggatgatgacttctcagccatcatgaatgcagtggaggaaggcaagggtattttttacaacatcaaaaactttgtccgattccagctgagcacgtaagtagaggccagcattccgagtgtcattaagcaccacgcctggcgggcggccgctgactggctgcgtgtgccccgcaggagcatctccgccctgagtctcatcactctgtccaccgtgttcaacctgcccagccccctcaacgccatgcagatcctatggatcaacatcatcatggatgggccaccggcgcagagcttgggggtagagcccgttgacaaagacgccttcaggcagccaccacggagtgtgcgggacaccatcctcagcagagccctcatcctgaagatcctcatgtccgcggccatcatcttcagcgggaccctctttatcttctggaaggagatgcctgaagacagagcaagcactccccgcaccacgacgatgacgttcacttgttttgtgtttttcgatctcttcaacgccttgacctgccgctctcagaccaagctgatatttgagatcggctttctcaggaaccacatgttcctctactccgtcctggggtccatcctggggcagctggcggtcatttacatccccccgctgcagagggtcttccagacggagaacctgggagcgcttgatttgctgtttttaactggattggcctcatccgtcttcattttgtcagagctcctcaaactatgtgaaaaatactgttgcagccccaagagagtccagatgcaccctgaagatgtgtagtggaccgcactccgcggcaccttccctaatcatctcgatctggttgtgactgtggcccctgccgtgtctcctcgtcaggggagacttttaggaggccgcagccttccatcaccggatcagtttttcctcttaggaaagctgcaggaacctcgtgggctccagggacccaggcccacatccatccagcgttcccgctggctgtgggacagacagggaggggcctgtacagaaacaccacactgtttattaaatcacaatgatttttattaaccatgtctaactacgtatctgtgccacagcttgcagtgaggcaggccactcgtggcagatacaaggggctcctgagaggcagtgggtaggatggtcacactctgcccattgccctcctggaggccccatttcctcatcataaaatgagggacttttaaataaagtgctatgccgggggat

SEQ ID NO: 357032 - DNA, 2360 bp, Homo sapiens
ccataggaagaaacatcggcctgtgcaacgggaagctgcaagccatgtccggggaggaggtggacagcgtgaagaagttacccatcgtggagactttaggttgctgcagcgttctctgttctgacaagacggggactctgactgccaatgaaatgacagtgacccagcttgtaacgtcagatgggcttcgtgccgaggtcagcggagttgggtatgacggtcaagggactgtgtgtcttctaccatccaaggaagtcattaaggaattttccaatgtctcagtgggaaagttagtggaggcgggctgtgttgccaacaatgcggtcatcagaaagaacgccgtgatggggcagcccaccgagggtgcattgatggccctggcgatgaagatggacttaagtgatattaaaaattcatatataagaaaaaaagagattccattcagttcagagcagaagtggatggcggtgaaatgcagtctgaagactgaggatcaggaagacatttacttcatgaaaggggccttggaagaggtgatccgctactgcaccatgtacaacaacgggggcatccccctgccgctgacgccccagcagaggtcattctgcctgcaggaagagaagaggatggggtcgctcggtttgcgggtgctggccctggcttctgggcccgagctggggcggctgacgtttctaggtcttgtgggcatcattgaccccccgagagttggcgtgaaggaagcagtccaggttctctccgagtctggtgtgtctgtgaagatgataacgggggatgccctggagacggccttggccataggaagaaacatcggcctgtgcaacgggaagctgcaagccatgtccggggaggaggtggacagcgtggagaagggcgagctggccgaccgcgtggggaaggtgtccgtgttcttcaggaccagcccaaagcacaagctcaaaatcatcaaggctctgcaggagtcaggggcgatcgtggccatgactggggatggggtgaacgacgcagtggccctgaagtctgcagacattgggatcgccatggggcagacagggacggacgtcagcaaagaggccgccaacatgatcctggtggatgatgacttctcagccatcatgaatgcagtggaggaaggcaagggtattttttacaacatcaaaaactttgtccgattccagctgagcacgtaagtagaggccagcattccgagtgtcattaagcaccacgcctggcgggcggccgctgactggctgcgtgtgccccgcaggagcatctccgccctgagtctcatcactctgtccaccgtgttcaacctgcccagccccctcaacgccatgcagatcctatggatcaacatcatcatggatgggccaccggcgcagagcttgggggtagagcccgttgacaaagacgccttcaggcagccaccacggagtgtgcgggacaccatcctcagcagagccctcatcctgaagatcctcatgtccgcggccatcatcttcagcgggaccctctttatcttctggaaggagatgcctgaagacagagcaagcactccccgcaccacgacgatgacgttcacttgttttgtgtttttcgatctcttcaacgccttgacctgccgctctcagaccaagctgatatttgagatcggctttctcaggaaccacatgttcctctactccgtcctggggtccatcctggggcagctggcggtcatttacatccccccgctgcagagggtcttccagacggagaacctgggagcgcttgatttgctgtttttaactggattggcctcatccgtcttcattttgtcagagctcctcaaactatgtgaaaaatactgttgcagccccaagagagtccagatgcaccctgaagatgtgtagtggaccgcactccgcggcaccttccctaatcatctcgatctggttgtgactgtggcccctgccgtgtctcctcgtcaggggagacttttaggaggccgcagccttccatcaccggatcagtttttcctcttaggaaagctgcaggaacctcgtgggctccagggacccaggcccacatccatccagcgttcccgctggctgtgggacagacagggaggggcctgtacagaaacaccacactgtttattaaatcacaatgatttttattaaccatgtctaactacgtatctgtgccacagcttgcagtgaggcaggccactcgtggcagatacaaggggctcctgagaggcagtgggtaggatggtcacactctgcccattgccctcctggaggccccatttcctcatcataaaatgagggacttttaaataaagtgctatgccgggggat

SEQ ID NO: 357033 - DNA, 2734 bp, Homo sapiens
tagttcttttcaaaatattttagtaaaatctggcggtgggggcacccacggtgcgtaattgtttttctacattagtgaccccaggtcaaggtttaaaagggcttccgcgaagagccttctaaagacagaagcaggcgatgtccttcagcctccccatccctccctccttaccgtcctccggacctcatttttaggccgaactggttttgctgcgtctctctctcctctttggtaaatcgcggagatgcacggcgcacttcgggagtctgggcagggatgggggccccctgggctcggccggagagtaattcatggtctgattggaggcatcaggtgtacccttggcacagaagggcgaacatggctcaaggatcagttcccagtggccgaggggcacctgttagaacaccaccgtctcctacaaatgtgtccccaagaatgccagcaaggggaaccagcaggggcccaagtataacatcaatctgggcgagtcaccactgccccttgcagcaaccgatgcactggtccagccctcacgcaggcccgctccgtgagtaaatggctctcttctcttgcaggaatgcagtggaggaaggcaagggtattttttacaacatcaaaaactttgtccgattccagctgagcacgtaagtagaggccagcattccgagtgtcattaagcaccacgcctggcgggcggccgctgactggctgcgtgtgccccgcaggagcatctccgccctgagtctcatcactctgtccaccgtgttcaacctgcccagccccctcaacgccatgcagatcctatggatcaacatcatcatggatgggccaccggcgcagagcttgggggtagagcccgttgacaaagacgccttcaggcagccaccacggagtgtgcgggacaccatcctcagcagagccctcatcctgaagatcctcatgtccgcggccatcatcttcagcgggaccctctttatcttctggaaggagatgcctgaagacagagcaagcactccccgcaccacgacgatgacgttcacttgttttgtgtttttcgatctcttcaacgccttgacctgccgctctcagaccaagctgatatttgagatcggctttctcaggaaccacatgttcctctactccgtcctggggtccatcctggggcagctggcggtcatttacatccccccgctgcagagggtcttccagacggagaacctgggagcgcttgatttgctgtttttaactggattggcctcatccgtcttcattttgtcagagctcctcaaactatgtgaaaaatactgttgcagccccaagagagtccagatgcaccctgaagatgtgtagtggaccgcactccgcggcaccttccctaatcatctcgatctggttgtgactgtggcccctgccgtgtctcctcgtcaggggagacttttaggaggccgcagccttccatcaccggatcagtttttcctcttaggaaagctgcaggaacctcgtgggctccagggacccaggcccacatccatccagcgttcccgctggctgtgggacagacagggaggggcctgtacagaaacaccacactgtttattaaatcacaatgatttttattaaccatgtctaactacgtatctgtgccacagcttgcagtgaggcaggccactcgtggcagatacaaggggctcctgagaggcagtgggtaggatggtcacactctgcccattgccctcctggaggccccatttcctcatcataaaatgagggacttttaaataaagtgctatgccgggggataattattttgatgtgtttacctagggtttttcatacaaggggccaggttggaaacccacagccatgtgttaatggccacgtggggtgagcagcaatccatcatgaatggcctacaggaaggcctcggcttttggagataaagagtagggctgggcatggtggctcacgcctgtaatcccagcactttgcaaggccaaggcaggcagattcactttgaggccagcctggccaacacagcaaaaccctgtctgtctctactaaaagtttaaaaaaaaaaacagttgccaggcgtgatgatgcacacctgttaatcccagctactcgggaggctgaggcaggagaatggcttgagtccaggaggtggagattgtaccactgcactgcagcatgggcaacaaagcaagagtctctctcagaaagtggcccttctctccggaaccaggaactgtagtatctcctgctgcctgcagacaagcttgatttcccactgccccaaagacttccaaaaaccgatctgctcttccacgtgacagatggcagaggagagaggtctccatgctgttcttctgcctgaagccacgccagaaccaccaaagggaaccagaagggggactccgtccccatctctcaggaaataaggccagagctagaaccccccatttactagtcaggcctcactagagaaactgaagtgtgccacttccacagtctgctaaggagtgcctccccctgagtcagggacaattcttgctctacttttcaggatccttgggcacactgctggcccgagacatttacttcccatttaaaattaagtaatcaaaataccagggtcgattactctgaactcttgcttatgtaaactttagggataaaactgtagtaagacacaaaatgctaacaataaaatataaattagactacattaaaa

SEQ ID NO: 357034 - DNA, 5101 bp, Homo sapiens
gaatcaacagaatttgtctttttgtgactggtttatttcacttaacttcatcctcaaggttcaacttaaaggtgtatccatgttgtagcacgtgtcagcattttctttcgttctcaggctaaatagtatttcattgtgtgtgtacaccatgtttcatgcattcattcatcccttgaaagattggtgggttgtttcctcctttttgcttttgtgaacagtgctacgaacatggttgtacaaacatctcttggagccccactagcagttcctttgggtatataccccaaagtggaattgctggatctggtagctccctttttaattttttgaggaatcgccacacagtttccataacagctgcaccattttacattcccaagaccttttttttttttttttttttaagaagaaaagatgtgtttctgcatttctggaagtctatgctgcatttccatttgttgaaatttaagaccagagtcatcttttctgctgtaattataatggtcactggcttgtgccttttcctcctctctctgccccatctgcacggggtctttgaacaagtcccagcaccttggtggacaagcctgtgtccctggcccatcatggaagccgctgcctttcagagtgggagtctgtaccctgttgcctcattccttgctgcgcccatgagtgagcttgtgcctgacctctccttccaggtggacttacacactgggctgtcggagttctcggtgacgcagcgccggctggcccatggctggaatgagtttgttgctgacaacagcgaacctgtgtggaagaaatacctggatcagtttaagaaccccctgatcctgctgctgctgggctctgccctggtgagtgtcctcaccaaggagtatgaggacgccgtcagcatcgccacggcagtgcttgtcgtggtcactgtcgccttcatccaggtgagtatttcctgaggtcccagtcagggtaagctgggcgggacaggagcttcatggagtccccacctttaaacagcacatctgatgtgcttcctgccaggagtacaggtcggagaaatctctggaagagctgaccaagctggttcctccagaatgtaactgcctaagagaaggaaaactccagcacctgcttgctcgagaactggttcctggtgatgtcgtatctctctcgatcggagaccggatccctgcagacatccgactcactgaggtcacggacctcttggtggatgaatccagtttcaccggggaagccgagccatgtagtaaaacagacagccccttgacaggcggtggggacctcaccaccctcagcaacatcgtcttcatggggaccctggtgcagtatgggaggggccagggggtcgtgattggaacaggggaaagctctcagttcggagaagtgtttaagatgatgcaggctgaagagacacctaaaactcctttgcagaaaagcatggacaggctaggaaagcaactgacactcttctcctttggcataatcggtctcatcatgctcattggctggtcgcaagggaaacaactcctgagtatgttcacgatcggggtcagcctggctgtggcggccattccagagggtctgcccatcgtcgtcatggtgacgctggtcctgggagtgctgcggatggccaagaagcgggtcatcgtgaagaagttacccatcgtggagactttaggttgctgcagcgttctctgttctgacaagacggggactctgactgccaatgaaatgacagtgacccagcttgtaacgtcagatgggcttcgtgccgaggtcagcggagttgggtatgacggtcaagggactgtgtgtcttctaccatccaaggaagtcattaaggaattttccaatgtctcagtgggaaagttagtggaggcgggctgtgttgccaacaatgcggtcatcagaaagaacgccgtgatggggcagcccaccgagggtgcattgatggccctggcgatgaagatggacttaagtgatattaaaaattcatatataagaaaaaaagagattccattcagttcagagcagaagtggatggcggtgaaatgcagtctgaagactgaggatcaggaagacatttacttcatgaaaggggccttggaagaggtgatccgctactgcaccatgtacaacaacgggggcatccccctgccgctgacgccccagcagaggtcattctgcctgcaggaagagaagaggatggggtcgctcggtttgcgggtgctggccctggcttctgggcccgagctggggcggctgacgtttctaggtcttgtgggcatcattgaccccccgagagttggcgtgaaggaagcagtccaggttctctccgagtctggtgtgtctgtgaagatgataacgggggatgccctggagacggccttggccataggaagaaacatcggcctgtgcaacgggaagctgcaagccatgtccggggaggaggtggacagcgtggagaagggcgagctggccgaccgcgtggggaaggtgtccgtgttcttcaggaccagcccaaagcacaagctcaaaatcatcaaggctctgcaggagtcaggggcgatcgtggccatgactggggatggggtgaacgacgcagtggccctgaagtctgcagacattgggatcgccatggggcagacagggacggacgtcagcaaagaggccgccaacatgatcctggtggatgatgacttctcagccatcatgaatgcagtggaggaaggcaagggtattttttacaacatcaaaaactttgtccgattccagctgagcacgtaagtagaggccagcattccgagtgtcattaagcaccacgcctggcgggcggccgctgactggctgcgtgtgccccgcaggagcatctccgccctgagtctcatcactctgtccaccgtgttcaacctgcccagccccctcaacgccatgcagatcctatggatcaacatcatcatggatgggccaccggcgcagagcttgggggtagagcccgttgacaaagacgccttcaggcagccaccacggagtgtgcgggacaccatcctcagcagagccctcatcctgaagatcctcatgtccgcggccatcatcttcagcgggaccctctttatcttctggaaggaggaaatgaccttcactctgggtttaactggagtggcatcacctcccagggagacagttacttcctggaggaagtggtgtttcctccacccataggtgccctgcccccatcctcatggtggcagcaaatcagcatgtgctggggagaccctggggtagcagccactgacctcacacctggaggaagctgtgtgaccgattcatgagcttatgcctgaagacagagcaagcactccccgcaccacgacgatgacgttcacttgttttgtgtttttcgatctcttcaacgccttgacctgccgctctcagaccaagctgatatttgagatcggctttctcaggaaccacatgttcctctactccgtcctggggtccatcctggggcagctggcggtcatttacatccccccgctgcagagggtcttccagacggagaacctgggagcgcttgatttgctgtttttaactggattggcctcatccgtcttcattttgtcagagctcctcaaactatgtgaaaaatactgttgcagccccaagagagtccagatgcaccctgaagatgtgtagtggaccgcactccgcggcaccttccctaatcatctcgatctggttgtgactgtggcccctgccgtgtctcctcgtcaggggagacttttaggaggccgcagccttccatcaccggatcagtttttcctcttaggaaagctgcaggaacctcgtgggctccagggacccaggcccacatccatccagcgttcccgctggctgtgggacagacagggaggggcctgtacagaaacaccacactgtttattaaatcacaatgatttttattaaccatgtctaactacgtatctgtgccacagcttgcagtgaggcaggccactcgtggcagatacaaggggctcctgagaggcagtgggtaggatggtcacactctgcccattgccctcctggaggccccatttcctcatcataaaatgagggacttttaaataaagtgctatgccgggggataattattttgatgtgtttacctagggtttttcatacaaggggccaggttggaaacccacagccatgtgttaatggccacgtggggtgagcagcaatccatcatgaatggcctacaggaaggcctcggcttttggagataaagagtagggctgggcatggtggctcacgcctgtaatcccagcactttgcaaggccaaggcaggcagattcactttgaggccagcctggccaacacagcaaaaccctgtctgtctctactaaaagtttaaaaaaaaaaacagttgccaggcgtgatgatgcacacctgttaatcccagctactcgggaggctgaggcaggagaatggcttgagtccaggaggtggagattgtaccactgcactgcagcatgggcaacaaagcaagagtctctctcagaaagtggcccttctctccggaaccaggaactgtagtatctcctgctgcctgcagacaagcttgatttcccactgccccaaagacttccaaaaaccgatctgctcttccacgtgacagatggcagaggagagaggtctccatgctgttcttctgcctgaagccacgccagaaccaccaaagggaaccagaagggggactccgtccccatctctcaggaaataaggccagagctagaaccccccatttactagtcaggcctcactagagaaactgaagtgtgccacttccacagtctgctaaggagtgcctccccctgagtcagggacaattcttgctctacttttcaggatccttgggcacactgctggcccgagacatttacttcccatttaaaattaagtaatcaaaataccagggtcgattactctgaactcttgcttatgtaaactttagggataaaactgtagtaagacacaaaatgctaacaataaaatataaattagactacattaaaa

SEQ ID NO: 357035 - DNA, 5320 bp, Homo sapiens
gaatcaacagaatttgtctttttgtgactggtttatttcacttaacttcatcctcaaggttcaacttaaaggtgtatccatgttgtagcacgtgtcagcattttctttcgttctcaggctaaatagtatttcattgtgtgtgtacaccatgtttcatgcattcattcatcccttgaaagattggtgggttgtttcctcctttttgcttttgtgaacagtgctacgaacatggttgtacaaacatctcttggagccccactagcagttcctttgggtatataccccaaagtggaattgctggatctggtagctccctttttaattttttgaggaatcgccacacagtttccataacagctgcaccattttacattcccaagaccttttttttttttttttttttaagaagaaaagatgtgtttctgcatttctggaagtctatgctgcatttccatttgttgaaatttaagaccagagtcatcttttctgctgtaattataatggtcactggcttgtgccttttcctcctctctctgccccatctgcacggggtctttgaacaagtcccagcaccttggtggacaagcctgtgtccctggcccatcatggaagccgctgcctttcagagtgggagtctgtaccctgttgcctcattccttgctgcgcccatgagtgagcttgtgcctgacctctccttccaggtggacttacacactgggctgtcggagttctcggtgacgcagcgccggctggcccatggctggaatgagtttgttgctgacaacagcgaacctgtgtggaagaaatacctggatcagtttaagaaccccctgatcctgctgctgctgggctctgccctggtgagtgtcctcaccaaggagtatgaggacgccgtcagcatcgccacggcagtgcttgtcgtggtcactgtcgccttcatccaggtgagtatttcctgaggtcccagtcagggtaagctgggcgggacaggagcttcatggagtccccacctttaaacagcacatctgatgtgcttcctgccaggagtacaggtcggagaaatctctggaagagctgaccaagctggttcctccagaatgtaactgcctaagagaaggaaaactccagcacctgcttgctcgagaactggttcctggtgatgtcgtatctctctcgatcggagaccggatccctgcagacatccgactcactgaggtcacggacctcttggtggatgaatccagtttcaccggggaagccgagccatgtagtaaaacagacagccccttgacaggcggtggggacctcaccaccctcagcaacatcgtcttcatggggaccctggtgcagtatgggaggggccagggggtcgtgattggaacaggggaaagctctcagttcggagaagtgtttaagatgatgcaggctgaagagacacctaaaactcctttgcagaaaagcatggacaggctaggaaagcaactgacactcttctcctttggcataatcggtctcatcatgctcattggctggtcgcaagggaaacaactcctgagtatgttcacgatcggggtcagcctggctgtggcggccattccagagggtctgcccatcgtcgtcatggtgacgctggtcctgggagtgctgcggatggccaagaagcgggtcatcgtgaagaagttacccatcgtggagactttaggttgctgcagcgttctctgttctgacaagacggggactctgactgccaatgaaatgacagtgacccagcttgtaacgtcagatgggcttcgtgccgaggtcagcggagttgggtatgacggtcaagggactgtgtgtcttctaccatccaaggaagtcattaaggaattttccaatgtctcagtgggaaagttagtggaggcgggctgtgttgccaacaatgcggtcatcagaaagaacgccgtgatggggcagcccaccgagggtgcattgatggccctggcgatgaagatggacttaagtgatattaaaaattcatatataagaaaaaaagagattccattcagttcagagcagaagtggatggcggtgaaatgcagtctgaagactgaggatcaggaagacatttacttcatgaaaggggccttggaagaggtgatccgctactgcaccatgtacaacaacgggggcatccccctgccgctgacgccccagcagaggtcattctgcctgcaggaagagaagaggatggggtcgctcggtttgcgggtgctggccctggcttctgggcccgagctggggcggctgacgtttctaggtcttgtgggcatcattgaccccccgagagttggcgtgaaggaagcagtccaggttctctccgagtctggtgtgtctgtgaagatgataacgggggatgccctggagacggccttggccataggaagaaacatcggcctgtgcaacgggaagctgcaagccatgtccggggaggaggtggacagcgtggagaagggcgagctggccgaccgcgtggggaaggtgtccgtgttcttcaggaccagcccaaagcacaagctcaaaatcatcaaggctctgcaggagtcaggggcgatcgtggccatgactggggatggggtgaacgacgcagtggccctgaagtctgcagacattgggatcgccatggggcagacagggacggacgtcagcaaagaggccgccaacatgatcctggtggatgatgacttctcagccatcatgaatgcagtggaggaaggcaagggtattttttacaacatcaaaaactttgtccgattccagctgagcacgtaagtagaggccagcattccgagtgtcattaagcaccacgcctggcgggcggccgctgactggctgcgtgtgccccgcaggagcatctccgccctgagtctcatcactctgtccaccgtgttcaacctgcccagccccctcaacgccatgcagatcctatggatcaacatcatcatggatgggccaccggcgcagagcttgggggtagagcccgttgacaaagacgccttcaggcagccaccacggagtgtgcgggacaccatcctcagcagagccctcatcctgaagatcctcatgtccgcggccatcatcttcagcgggaccctctttatcttctggaaggagctctccctctactactgacggccatccttcagccttccttgtaggaaatgaccttcactctgggtttaactggagtggcatcacctcccagggagacagttacttcctggaggaagtggtgtttcctccacccataggtgccctgcccccatcctcatggtggcagcaaatcagcatgtgctggggagaccctggggtagcagccactgacctcacacctggaggaagctgtgtgaccgattcatgagcttatgcctgaagacagagcaagcactccccgcaccacgacgatgacgttcacttgttttgtgtttttcgatctcttcaacgccttgacctgccgctctcaggtgagacccgggctgaccctcctcgctgcagagctgctgtgtgttctcgacagcagcgccccgaccctgcccgcagcattgagcggctctggctcagcgtgggcagtcagagctcccctgcctgtacctggggtgtggacagcacacaatcccccgtgtgaccttctccctgcagaccaagctgatatttgagatcggctttctcaggaaccacatgttcctctactccgtcctggggtccatcctggggcagctggcggtcatttacatccccccgctgcagagggtcttccagacggagaacctgggagcgcttgatttgctgtttttaactggattggcctcatccgtcttcattttgtcagagctcctcaaactatgtgaaaaatactgttgcagccccaagagagtccagatgcaccctgaagatgtgtagtggaccgcactccgcggcaccttccctaatcatctcgatctggttgtgactgtggcccctgccgtgtctcctcgtcaggggagacttttaggaggccgcagccttccatcaccggatcagtttttcctcttaggaaagctgcaggaacctcgtgggctccagggacccaggcccacatccatccagcgttcccgctggctgtgggacagacagggaggggcctgtacagaaacaccacactgtttattaaatcacaatgatttttattaaccatgtctaactacgtatctgtgccacagcttgcagtgaggcaggccactcgtggcagatacaaggggctcctgagaggcagtgggtaggatggtcacactctgcccattgccctcctggaggccccatttcctcatcataaaatgagggacttttaaataaagtgctatgccgggggataattattttgatgtgtttacctagggtttttcatacaaggggccaggttggaaacccacagccatgtgttaatggccacgtggggtgagcagcaatccatcatgaatggcctacaggaaggcctcggcttttggagataaagagtagggctgggcatggtggctcacgcctgtaatcccagcactttgcaaggccaaggcaggcagattcactttgaggccagcctggccaacacagcaaaaccctgtctgtctctactaaaagtttaaaaaaaaaaacagttgccaggcgtgatgatgcacacctgttaatcccagctactcgggaggctgaggcaggagaatggcttgagtccaggaggtggagattgtaccactgcactgcagcatgggcaacaaagcaagagtctctctcagaaagtggcccttctctccggaaccaggaactgtagtatctcctgctgcctgcagacaagcttgatttcccactgccccaaagacttccaaaaaccgatctgctcttccacgtgacagatggcagaggagagaggtctccatgctgttcttctgcctgaagccacgccagaaccaccaaagggaaccagaagggggactccgtccccatctctcaggaaataaggccagagctagaaccccccatttactagtcaggcctcactagagaaactgaagtgtgccacttccacagtctgctaaggagtgcctccccctgagtcagggacaattcttgctctacttttcaggatccttgggcacactgctggcccgagacatttacttcccatttaaaattaagtaatcaaaataccagggtcgattactctgaactcttgcttatgtaaactttagggataaaactgtagtaagacacaaaatgctaacaataaaatataaattagactacattaaaa

SEQ ID NO: 357036 - DNA, 3455 bp, Homo sapiens
gaatcaacagaatttgtctttttgtgactggtttatttcacttaacttcatcctcaaggttcaacttaaaggtgtatccatgttgtagcacgtgtcagcattttctttcgttctcaggctaaatagtatttcattgtgtgtgtacaccatgtttcatgcattcattcatcccttgaaagattggtgggttgtttcctcctttttgcttttgtgaacagtgctacgaacatggttgtacaaacatctcttggagccccactagcagttcctttgggtatataccccaaagtggaattgctggatctggtagctccctttttaattttttgaggaatcgccacacagtttccataacagctgcaccattttacattcccaagaccttttttttttttttttttttaagaagaaaagatgtgtttctgcatttctggaagtctatgctgcatttccatttgttgaaatttaagaccagagtcatcttttctgctgtaattataatggtcactggcttgtgccttttcctcctctctctgccccatctgcacggggtctttgaacaagtcccagcaccttggtggacaagcctgtgtccctggcccatcatggaagccgctgcctttcagagtgggagtctgtaccctgttgcctcattccttgctgcgcccatgagtgagcttgtgcctgacctctccttccaggtggacttacacactgggctgtcggagttctcggtgacgcagcgccggctggcccatggctggaatgagtttgttgctgacaacagcgaacctgtgtggaagaaatacctggatcagtttaagaaccccctgatcctgctgctgctgggctctgccctggtgagtgtcctcaccaaggagtatgaggacgccgtcagcatcgccacggcagtgcttgtcgtggtcactgtcgccttcatccaggtgagtatttcctgaggtcccagtcagggtaagctgggcgggacaggagcttcatggagtccccacctttaaacagcacatctgatgtgcttcctgccaggagtacaggtcggagaaatctctggaagagctgaccaagctggttcctccagaatgtaactgcctaagagaaggaaaactccagcacctgcttgctcgagaactggttcctggtgatgtcgtatctctctcgatcggagaccggatccctgcagacatccgactcactgaggtcacggacctcttggtggatgaatccagtttcaccggggaagccgagccatgtagtaaaacagacagccccttgacaggcggtggggacctcaccaccctcagcaacatcgtcttcatggggaccctggtgcagtatgggaggggccagggggtcgtgattggaacaggggaaagctctcagttcggagaagtgtttaagatgatgcaggctgaagagacacctaaaactcctttgcagaaaagcatggacaggctaggaaagcaactgacactcttctcctttggcataatcggtctcatcatgctcattggctggtcgcaagggaaacaactcctgagtatgttcacgatcggggtcagcctggctgtggcggccattccagagggtctgcccatcgtcgtcatggtgacgctggtcctgggagtgctgcggatggccaagaagcgggtcatcgtgaagaagttacccatcgtggagactttaggttgctgcagcgttctctgttctgacaagacggggactctgactgccaatgaaatgacagtgacccagcttgtaacgtcagatgggcttcgtgccgaggtcagcggagttgggtatgacggtcaagggactgtgtgtcttctaccatccaaggaagtcattaaggaattttccaatgtctcagtgggaaagttagtggaggcgggctgtgttgccaacaatgcggtcatcagaaagaacgccgtgatggggcagcccaccgagggtgcattgatggccctggcgatgaagatggacttaagtgatattaaaaattcatatataagaaaaaaagagattccattcagttcagagcagaagtggatggcggtgaaatgcagtctgaagactgaggatcaggaagacatttacttcatgaaaggggccttggaagaggtgatccgctactgcaccatgtacaacaacgggggcatccccctgccgctgacgccccagcagaggtcattctgcctgcaggaagagaagaggatggggtcgctcggtttgcgggtgctggccctggcttctgggcccgagctggggcggctgacgtttctaggtcttgtgggcatcattgaccccccgagagttggcgtgaaggaagcagtccaggttctctccgagtctggtgtgtctgtgaagatgataacgggggatgccctggagacggccttggccataggaagaaacatcggcctgtgcaacgggaagctgcaagccatgtccggggaggaggtggacagcgtggagaagggcgagctggccgaccgcgtggggaaggtgtccgtgttcttcaggaccagcccaaagcacaagctcaaaatcatcaaggctctgcaggagtcaggggcgatcgtggccatgactggggatggggtgaacgacgcagtggccctgaagtctgcagacattgggatcgccatggggcagacagggacggacgtcagcaaagaggccgccaacatgatcctggtggatgatgacttctcagccatcatgaatgcagtggaggaaggcaagggtattttttacaacatcaaaaactttgtccgattccagctgagcacgtaagtagaggccagcattccgagtgtcattaagcaccacgcctggcgggcggccgctgactggctgcgtgtgccccgcaggagcatctccgccctgagtctcatcactctgtccaccgtgttcaacctgcccagccccctcaacgccatgcagatcctatggatcaacatcatcatggatgggccaccggcgcagaggtgaggcagggccggctgggagccctgtgtctctttacctacctgcggggcttcctccaggggctgctggctgtgccccaaggctatagggatgaacaaatacagccactttccatcaggagttcccagaaaactgaagtgtgttgcactggagtgagactgggagtagaaggcagaggagaaagtacctgggccggcagagctgggtgaggatggaactttctgctccctctgcctggatgctctctctgggcaacctgcatggctcattctcatgcttcattccagtcaccagtcactgccttcaggaagtcttccctgattgcactcccactcaatcccctcaccctgctgtatttttccctagagaggaagatacacacagacacacttttccttatggatctgattgtgatctgtctcccctttagaacatcagtttcatggagg

SEQ ID NO: 357037 - DNA, 1575 bp, Homo sapiens
tccaaatctttataacccagttcccccccccccgctgcagaggggtcttccagacggagaaccctgggagcgctgatttgctgtttttaactggattggcctcatccgtcttcattttgtcagagctcctcaaactatgtgaaaaatactgttgcagccccaagagagtccagatgcaccctgaagatgtgtagtggaccgcactccgcggcaccttccctaatcatctcgatctggttgtgactgtggcccctgccgtgtctcctcgtcaggggagacttttaggaggccgcagccttccatcaccggatcagtttttcctcttaggaaagctgcaggaacctcgtgggctccagggacccaggcccacatccatccagcgttcccgctggctgtgggacagacagggaggggcctgtacagaaacaccacactgtttattaaatcacaatgatttttattaaccatgtctaactacgtatctgtgccacagcttgcagtgaggcaggccactcgtggcagatacaaggggctcctgagaggcagtgggtaggatggtcacactctgcccattgccctcctggaggccccatttcctcatcataaaatgagggacttttaaataaagtgctatgccgggggataattattttgatgtgtttacctagggtttttcatacaaggggccaggttggaaacccacagccatgtgttaatggccacgtggggtgagcagcaatccatcatgaatggcctacaggaaggcctcggcttttggagataaagagtagggctgggcatggtggctcacgcctgtaatcccagcactttgcaaggccaaggcaggcagattcactttgaggccagcctggccaacacagcaaaaccctgtctgtctctactaaaagtttaaaaaaaaaaacagttgccaggcgtgatgatgcacacctgttaatcccagctactcgggaggctgaggcaggagaatggcttgagtccaggaggtggagattgtaccactgcactgcagcatgggcaacaaagcaagagtctctctcagaaagtggcccttctctccggaaccaggaactgtagtatctcctgctgcctgcagacaagcttgatttcccactgccccaaagacttccaaaaaccgatctgctcttccacgtgacagatggcagaggagagaggtctccatgctgttcttctgcctgaagccacgccagaaccaccaaagggaaccagaagggggactccgtccccatctctcaggaaataaggccagagctagaaccccccatttactagtcaggcctcactagagaaactgaagtgtgccacttccacagtctgctaaggagtgcctccccctgagtcagggacaattcttgctctacttttcaggatccttgggcacactgctggcccgagacatttacttcccatttaaaattaagtaatcaaaataccagggtcgattactctgaactcttgcttatgtaaactttagggataaaactgtagtaagacacaaaatgctaacaataaaatataaattagactacattaaaa

SEQ ID NO: 357038 - DNA, 1827 bp, Homo sapiens
gaatcaacagaatttgtctttttgtgactggtttatttcacttaacttcatcctcaaggttcaacttaaaggtgtatccatgttgtagcacgtgtcagcattttctttcgttctcaggctaaatagtatttcattgtgtgtgtacaccatgtttcatgcattcattcatcccttgaaagattggtgggttgtttcctcctttttgcttttgtgaacagtgctacgaacatggttgtacaaacatctcttggagccccactagcagttcctttgggtatataccccaaagtggaattgctggatctggtagctccctttttaattttttgaggaatcgccacacagtttccataacagctgcaccattttacattcccaagaccttttttttttttttttttttaagaagaaaagatgtgtttctgcatttctggaagtctatgctgcatttccatttgttgaaatttaagaccagagtcatcttttctgctgtaattataatggtcactggcttgtgccttttcctcctctctctgccccatctgcacggggtctttgaacaagtcccagcaccttggtggacaagcctgtgtccctggcccatcatggaagccgctgcctttcagagtgggagtctgtaccctgttgcctcattccttgctgcgcccatgagtgagcttgtgcctgacctctccttccaggtggacttacacactgggctgtcggagttctcggtgacgcagcgccggctggcccatggctggaatgagtttgttgctgacaacagcgaacctgtgtggaagaaatacctggatcagtttaagaaccccctgatcctgctgctgctgggctctgccctggtgagtgtcctcaccaaggagtatgaggacgccgtcagcatcgccacggcagtgcttgtcgtggtcactgtcgccttcatccaggtgagtatttcctgaggtcccagtcagggtaagctgggcgggacaggagcttcatggagtccccacctttaaacagcacatctgatgtgcttcctgccaggagtacaggtcggagaaatctctggaagagctgaccaagctggttcctccagaatgtaactgcctaagagaaggaaaactccagcacctgcttgctcgagaactggttcctggtgatgtcgtatctctctcgatcggagaccggatccctgcagacatccgactcactgaggtcacggacctcttggtggatgaatccagtttcaccggggaagccgagccatgtagtaaaacagacagccccttgacaggcggtggggacctcaccaccctcagcaacatcgtcttcatggggaccctggtgcagtatgggaggggccagggggtcgtgattggaacaggggaaagctctcagttcggagaagtgtttaagatgatgcaggctgaagagacacctaaaactcctttgcagaaaagcatggacaggctaggaaagcaactgacactcttctcctttggcataatcggtctcatcatgctcattggctggtcgcaagggaaacaactcctgagtatgttcacgatcggggtcaggtaagagtgctatggccgccccttgccttgccagggtggtcaatgggctctgagcccttccctgccgcaagagaaggtggggaggctgcagaataggaagggttgggaaggtgcagccccgtcacccaaactccagcctcccaatagcatgttctccgacaggtacagagtgcccggcgaatgcttgcaaaatgaatgacagcaaatgatccagggtgtcccttttgtattaggctgttcttgcattgct

SEQ ID NO: 357039 - DNA, 181 bp, Homo sapiens
ggtgacgcagcgccggctggcccatggctggaatgagtttgttgctgacaacagcgaacctgtgtggaagaaatacctggatcaggtaggaccagaggtgtcattctttgcattaacatgcataagccagcgagggtggggcagccattccatctttcaatgttgatggaaggcatccttg

SEQ ID NO: 357040 - DNA, 532 bp, Homo sapiens
tcttccctttgtcttttctaaggatcaggaagacatttacttcatgaaaggggccttggaagaggtgatccgctactgcaccatgtacaacaacgggggcatccccctgccgctgacgccccagcagaggtcattctgcctgcaggaagagaagaggatggggtcgctcggtttgcggggtcagtgcctgtggtcccggcccagagctttaagcttgcatgtaacattgacttttaagtgcattcaagcagggtccctagtcaaggaggtcacccgtcccaaggagtcaggcagcatgctgacggcaataatgtgtgcttggaacctgatggtcacatgaaaggcacagaggtccccacctcatcccagttccttagtgacccccattaatccagagaagagggtaccctcccttgctgagtttcctaaggcaggtgaatgggctgcaccccaaacattgattttcccaataggtctttttgctcattgcctcttgtcaggaaaacccgaagttcttttcagtcaaggaaca

SEQ ID NO: 357041 - DNA, 417 bp, Homo sapiens
gaatcttttctgttttctcccttggcagatttgctgtttttaactggattggcctcatccgtcttcattttgtcagagctcctcaaactatgtgaaaaatactgttgcagccccaagagagtccagatgcaccctgaagatgtgtagtggaccgcactccgcggcaccttccctaatcatctcgatctggttgtgactgtggcccctgccgtgtctcctcgtcaggggagacttttaggaggccgcagccttccatcaccggatcagtttttcctcttaggaaagctgcaggaacctcgtgggctccagggacccaggcccacatccatccagcgttcccgctggctgtgggacagacagggaggggcctgtacagaaacaccacactgtttattaaatcacaatgatttttattaa

SEQ ID NO: 357042 - DNA, 3782 bp, Homo sapiens
gaatcaacagaatttgtctttttgtgactggtttatttcacttaacttcatcctcaaggttcaacttaaaggtgtatccatgttgtagcacgtgtcagcattttctttcgttctcaggctaaatagtatttcattgtgtgtgtacaccatgtttcatgcattcattcatcccttgaaagattggtgggttgtttcctcctttttgcttttgtgaacagtgctacgaacatggttgtacaaacatctcttggagccccactagcagttcctttgggtatataccccaaagtggaattgctggatctggtagctccctttttaattttttgaggaatcgccacacagtttccataacagctgcaccattttacattcccaagaccttttttttttttttttttttaagaagaaaagatgtgtttctgcatttctggaagtctatgctgcatttccatttgttgaaatttaagaccagagtcatcttttctgctgtaattataatggtcactggcttgtgccttttcctcctctctctgccccatctgcacggggtctttgaacaagtcccagcaccttggtggacaagcctgtgtccctggcccatcatggaagccgctgcctttcagagtgggagtctgtaccctgttgcctcattccttgctgcgcccatgagtgagcttgtgcctgacctctccttccaggtggacttacacactgggctgtcggagttctcggtgacgcagcgccggctggcccatggctggaatgagtttgttgctgacaacagcgaacctgtgtggaagaaatacctggatcagtttaagaaccccctgatcctgctgctgctgggctctgccctggtgagtgtcctcaccaaggagtatgaggacgccgtcagcatcgccacggcagtgcttgtcgtggtcactgtcgccttcatccaggagtacaggtcggagaaatctctggaagagctgaccaagctggttcctccagaatgtaactgcctaagagaaggaaaactccagcacctgcttgctcgagaactggttcctggtgatgtcgtatctctctcgatcggagaccggatccctgcagacatccgactcactgaggtcacggacctcttggtggatgaatccagtttcaccggggaagccgagccatgtagtaaaacagacagccccttgacaggcggtggggacctcaccaccctcagcaacatcgtcttcatggggaccctggtgcagtatgggaggggccagggggtcgtgattggaacaggggaaagctctcagttcggagaagtgtttaagatgatgcaggctgaagagacacctaaaactcctttgcagaaaagcatggacaggctaggaaagcaactgacactcttctcctttggcataatcggtctcatcatgctcattggctggtcgcaagggaaacaactcctgagtatgttcacgatcggggtcagcctggctgtggcggccattccagagggtctgcccatcgtcgtcatggtgacgctggtcctgggagtgctgcggatggccaagaagcgggtcatcgtgaagaagttacccatcgtggagactttaggttgctgcagcgttctctgttctgacaagacggggactctgactgccaatgaaatgacagtgacccagcttgtaacgtcagatgggcttcgtgccgaggtcagcggagttgggtatgacggtcaagggactgtgtgtcttctaccatccaaggaagtcattaaggaattttccaatgtctcagtgggaaagttagtggaggcgggctgtgttgccaacaatgcggtcatcagaaagaacgccgtgatggggcagcccaccgagggtgcattgatggccctggcgatgaagatggacttaagtgatattaaaaattcatatataagaaaaaaagagattccattcagttcagagcagaagtggatggcggtgaaatgcagtctgaagactgaggatcaggaagacatttacttcatgaaaggggccttggaagaggtgatccgctactgcaccatgtacaacaacgggggcatccccctgccgctgacgccccagcagaggtcattctgcctgcaggaagagaagaggatggggtcgctcggtttgcgggtgctggccctggcttctgggcccgagctggggcggctgacgtttctaggtcttgtgggcatcattgaccccccgagagttggcgtgaaggaagcagtccaggttctctccgagtctggtgtgtctgtgaagatgataacgggggatgccctggagacggccttggccataggaagaaacatcggcctgtgcaacgggaagctgcaagccatgtccggggaggaggtggacagcgtggagaagggcgagctggccgaccgcgtggggaaggtgtccgtgttcttcaggaccagcccaaagcacaagctcaaaatcatcaaggctctgcaggagtcaggggcgatcgtggccatgactggggatggggtgaacgacgcagtggccctgaagtctgcagacattgggatcgccatggggcagacagggacggacgtcagcaaagaggccgccaacatgatcctggtggatgatgacttctcagccatcatgaatgcagtggaggaaggcaagggtattttttacaacatcaaaaactttgtccgattccagctgagcacgagcatctccgccctgagtctcatcactctgtccaccgtgttcaacctgcccagccccctcaacgccatgcagatcctatggatcaacatcatcatggatgggccaccggcgcagagcttgggggtagagcccgttgacaaagacgccttcaggcagccaccacggagtgtgcgggacaccatcctcagcagagccctcatcctgaagatcctcatgtccgcggccatcatcttcagcgggaccctctttatcttctggaaggagatgcctgaagacagagcaagcactccccgcaccacgacgatgacgttcacttgttttgtgtttttcgatctcttcaacgccttgacctgccgctctcagaccaagctgatatttgagatcggctttctcaggaaccacatgttcctctactccgtcctggggtccatcctggggcagctggcggtcatttacatccccccgctgcagagggtcttccagacggagaacctgggagcgcttgatttgctgtttttaactggattggcctcatccgtcttcattttgtcagagctcctcaaactatgtgaaaaatactgttgcagccccaagagagtccagatgcaccctgaagatgtgtagtggaccgcactccgcggcaccttccctaatcatctcgatctggttgtgactgtggcccctgccgtgtctcctcgtcaggggagacttttaggaggccgcagccttccatcaccggatcagtttttcctcttaggaaagctgcaggaacctcgtgggctccagggacccaggcccacatccatccagcgttcccgctggctgtgggacagacagggaggggcctgtacagaaacaccacactgtttattaaatcacaatgatttttattaaccatgtctaactacgtatctgtgccacagcttgcagtgaggcaggccactcgtggcagatacaaggggctcctgagaggcagtgggtaggatggtcacactctgcccattgccctcctggaggccccatttcctcatcataaaatgagggacttttaaataaagtgctatgccgggggat

SEQ ID NO: 357043 - DNA, 2527 bp, Homo sapiens
gatcgaaaaacacaaaacaagtgaacgtcatcgtcgtggtgcggggagtgcttgctctgtcttcaggcatctccttccagaagataaagagggtcccgctgaacgggggatgccctggagacggccttggccataggaagaaacatcggcctgtgcaacgggaagctgcaagccatgtccggggaggaggtggacagcgtggagaagggcgagctggccgaccgcgtggggaaggtgtccgtgttcttcaggaccagcccaaagcacaagctcaaaatcatcaaggctctgcaggagtcaggggcgatcgtggccatgactggggatggggtgaacgacgcagtggccctgaagtctgcagacattgggatcgccatggggcagacagggacggacgtcagcaaagaggccgccaacatgatcctggtggatgatgacttctcagccatcatgaatgcagtggaggaaggcaagggtattttttacaacatcaaaaactttgtccgattccagctgagcacgagcatctccgccctgagtctcatcactctgtccaccgtgttcaacctgcccagccccctcaacgccatgcagatcctatggatcaacatcatcatggatgggccaccggcgcagagcttgggggtagagcccgttgacaaagacgccttcaggcagccaccacggagtgtgcgggacaccatcctcagcagagccctcatcctgaagatcctcatgtccgcggccatcatcttcagcgggaccctctttatcttctggaaggagatgcctgaagacagagcaagcactccccgcaccacgacgatgacgttcacttgttttgtgtttttcgatctcttcaacgccttgacctgccgctctcagaccaagctgatatttgagatcggctttctcaggaaccacatgttcctctactccgtcctggggtccatcctggggcagctggcggtcatttacatccccccgctgcagagggtcttccagacggagaacctgggagcgcttgatttgctgtttttaactggattggcctcatccgtcttcattttgtcagagctcctcaaactatgtgaaaaatactgttgcagccccaagagagtccagatgcaccctgaagatgtgtagtggaccgcactccgcggcaccttccctaatcatctcgatctggttgtgactgtggcccctgccgtgtctcctcgtcaggggagacttttaggaggccgcagccttccatcaccggatcagtttttcctcttaggaaagctgcaggaacctcgtgggctccagggacccaggcccacatccatccagcgttcccgctggctgtgggacagacagggaggggcctgtacagaaacaccacactgtttattaaatcacaatgatttttattaaccatgtctaactacgtatctgtgccacagcttgcagtgaggcaggccactcgtggcagatacaaggggctcctgagaggcagtgggtaggatggtcacactctgcccattgccctcctggaggccccatttcctcatcataaaatgagggacttttaaataaagtgctatgccgggggataattattttgatgtgtttacctagggtttttcatacaaggggccaggttggaaacccacagccatgtgttaatggccacgtggggtgagcagcaatccatcatgaatggcctacaggaaggcctcggcttttggagataaagagtagggctgggcatggtggctcacgcctgtaatcccagcactttgcaaggccaaggcaggcagattcactttgaggccagcctggccaacacagcaaaaccctgtctgtctctactaaaagtttaaaaaaaaaaacagttgccaggcgtgatgatgcacacctgttaatcccagctactcgggaggctgaggcaggagaatggcttgagtccaggaggtggagattgtaccactgcactgcagcatgggcaacaaagcaagagtctctctcagaaagtggcccttctctccggaaccaggaactgtagtatctcctgctgcctgcagacaagcttgatttcccactgccccaaagacttccaaaaaccgatctgctcttccacgtgacagatggcagaggagagaggtctccatgctgttcttctgcctgaagccacgccagaaccaccaaagggaaccagaagggggactccgtccccatctctcaggaaataaggccagagctagaaccccccatttactagtcaggcctcactagagaaactgaagtgtgccacttccacagtctgctaaggagtgcctccccctgagtcagggacaattcttgctctacttttcaggatccttgggcacactgctggcccgagacatttacttcccatttaaaattaagtaatcaaaataccagggtcgattactctgaactcttgcttatgtaaactttagggataaaactgtagtaagacacaaaatgctaacaataaaatataaattagactacattaaaa

SEQ ID NO: 357044 - DNA, 5145 bp, Homo sapiens
gaatcaacagaatttgtctttttgtgactggtttatttcacttaacttcatcctcaaggttcaacttaaaggtgtatccatgttgtagcacgtgtcagcattttctttcgttctcaggctaaatagtatttcattgtgtgtgtacaccatgtttcatgcattcattcatcccttgaaagattggtgggttgtttcctcctttttgcttttgtgaacagtgctacgaacatggttgtacaaacatctcttggagccccactagcagttcctttgggtatataccccaaagtggaattgctggatctggtagctccctttttaattttttgaggaatcgccacacagtttccataacagctgcaccattttacattcccaagaccttttttttttttttttttttaagaagaaaagatgtgtttctgcatttctggaagtctatgctgcatttccatttgttgaaatttaagaccagagtcatcttttctgctgtaattataatggtcactggcttgtgccttttcctcctctctctgccccatctgcacggggtctttgaacaagtcccagcaccttggtggacaagcctgtgtccctggcccatcatggaagccgctgcctttcagagtgggagtctgtaccctgttgcctcattccttgctgcgcccatgagtgagcttgtgcctgacctctccttccaggtggacttacacactgggctgtcggagttctcggtgacgcagcgccggctggcccatggctggaatgagtttgttgctgacaacagcgaacctgtgtggaagaaatacctggatcagtttaagaaccccctgatcctgctgctgctgggctctgccctggtgagtgtcctcaccaaggagtatgaggacgccgtcagcatcgccacggcagtgcttgtcgtggtcactgtcgccttcatccaggtgagtatttcctgaggtcccagtcagggtaagctgggcgggacaggagcttcatggagtccccacctttaaacagcacatctgatgtgcttcctgccaggagtacaggtcggagaaatctctggaagagctgaccaagctggttcctccagaatgtaactgcctaagagaaggaaaactccagcacctgcttgctcgagaactggttcctggtgatgtcgtatctctctcgatcggagaccggatccctgcagacatccgactcactgaggtcacggacctcttggtggatgaatccagtttcaccggggaagccgagccatgtagtaaaacagacagccccttgacaggcggtggggacctcaccaccctcagcaacatcgtcttcatggggaccctggtgcagtatgggaggggccagggggtcgtgattggaacaggggaaagctctcagttcggagaagtgtttaagatgatgcaggctgaagagacacctaaaactcctttgcagaaaagcatggacaggctaggaaagcaactgacactcttctcctttggcataatcggtctcatcatgctcattggctggtcgcaagggaaacaactcctgagtatgttcacgatcggggtcagcctggctgtggcggccattccagagggtctgcccatcgtcgtcatggtgacgctggtcctgggagtgctgcggatggccaagaagcgggtcatcgtgaagaagttacccatcgtggagactttaggttgctgcagcgttctctgttctgacaagacggggactctgactgccaatgaaatgacagtgacccagcttgtaacgtcagatgggcttcgtgccgaggtcagcggagttgggtatgacggtcaagggactgtgtgtcttctaccatccaaggaagtcattaaggaattttccaatgtctcagtgggaaagttagtggaggcgggctgtgttgccaacaatgcggtcatcagaaagaacgccgtgatggggcagcccaccgagggtgcattgatggccctggcgatgaagatggacttaagtgatattaaaaattcatatataagaaaaaaagagattccattcagttcagagcagaagtggatggcggtgaaatgcagtctgaagactgaggatcaggaagacatttacttcatgaaaggggccttggaagaggtgatccgctactgcaccatgtacaacaacgggggcatccccctgccgctgacgccccagcagaggtcattctgcctgcaggaagagaagaggatggggtcgctcggtttgcgggtgctggccctggcttctgggcccgagctggggcggctgacgtttctaggtcttgtgggcatcattgaccccccgagagttggcgtgaaggaagcagtccaggttctctccgagtctggtgtgtctgtgaagatgataacgggggatgccctggagacggccttggccataggaagaaacatcggcctgtgcaacgggaagctgcaagccatgtccggggaggaggtggacagcgtggagaagggcgagctggccgaccgcgtggggaaggtgtccgtgttcttcaggaccagcccaaagcacaagctcaaaatcatcaaggctctgcaggagtcaggggcgatcgtggccatgactggggatggggtgaacgacgcagtggccctgaagtctgcagacattgggatcgccatggggcagacagggacggacgtcagcaaagaggccgccaacatgatcctggtggatgatgacttctcagccatcatgaatgcagtggaggaaggcaagggtattttttacaacatcaaaaactttgtccgattccagctgagcacgtaagtagaggccagcattccgagtgtcattaagcaccacgcctggcgggcggccgctgactggctgcgtgtgccccgcaggagcatctccgccctgagtctcatcactctgtccaccgtgttcaacctgcccagccccctcaacgccatgcagatcctatggatcaacatcatcatggatgggccaccggcgcagagcttgggggtagagcccgttgacaaagacgccttcaggcagccaccacggagtgtgcgggacaccatcctcagcagagccctcatcctgaagatcctcatgtccgcggccatcatcttcagcgggaccctctttatcttctggaaggagctctccctctactactgacggccatccttcagccttccttgtaggaaatgaccttcactctgggtttaactggagtggcatcacctcccagggagacagttacttcctggaggaagtggtgtttcctccacccataggtgccctgcccccatcctcatggtggcagcaaatcagcatgtgctggggagaccctggggtagcagccactgacctcacacctggaggaagctgtgtgaccgattcatgagcttatgcctgaagacagagcaagcactccccgcaccacgacgatgacgttcacttgttttgtgtttttcgatctcttcaacgccttgacctgccgctctcagaccaagctgatatttgagatcggctttctcaggaaccacatgttcctctactccgtcctggggtccatcctggggcagctggcggtcatttacatccccccgctgcagagggtcttccagacggagaacctgggagcgcttgatttgctgtttttaactggattggcctcatccgtcttcattttgtcagagctcctcaaactatgtgaaaaatactgttgcagccccaagagagtccagatgcaccctgaagatgtgtagtggaccgcactccgcggcaccttccctaatcatctcgatctggttgtgactgtggcccctgccgtgtctcctcgtcaggggagacttttaggaggccgcagccttccatcaccggatcagtttttcctcttaggaaagctgcaggaacctcgtgggctccagggacccaggcccacatccatccagcgttcccgctggctgtgggacagacagggaggggcctgtacagaaacaccacactgtttattaaatcacaatgatttttattaaccatgtctaactacgtatctgtgccacagcttgcagtgaggcaggccactcgtggcagatacaaggggctcctgagaggcagtgggtaggatggtcacactctgcccattgccctcctggaggccccatttcctcatcataaaatgagggacttttaaataaagtgctatgccgggggataattattttgatgtgtttacctagggtttttcatacaaggggccaggttggaaacccacagccatgtgttaatggccacgtggggtgagcagcaatccatcatgaatggcctacaggaaggcctcggcttttggagataaagagtagggctgggcatggtggctcacgcctgtaatcccagcactttgcaaggccaaggcaggcagattcactttgaggccagcctggccaacacagcaaaaccctgtctgtctctactaaaagtttaaaaaaaaaaacagttgccaggcgtgatgatgcacacctgttaatcccagctactcgggaggctgaggcaggagaatggcttgagtccaggaggtggagattgtaccactgcactgcagcatgggcaacaaagcaagagtctctctcagaaagtggcccttctctccggaaccaggaactgtagtatctcctgctgcctgcagacaagcttgatttcccactgccccaaagacttccaaaaaccgatctgctcttccacgtgacagatggcagaggagagaggtctccatgctgttcttctgcctgaagccacgccagaaccaccaaagggaaccagaagggggactccgtccccatctctcaggaaataaggccagagctagaaccccccatttactagtcaggcctcactagagaaactgaagtgtgccacttccacagtctgctaaggagtgcctccccctgagtcagggacaattcttgctctacttttcaggatccttgggcacactgctggcccgagacatttacttcccatttaaaattaagtaatcaaaataccagggtcgattactctgaactcttgcttatgtaaactttagggataaaactgtagtaagacacaaaatgctaacaataaaatataaattagactacattaaaa

SEQ ID NO: 357045 - DNA, 5008 bp, Homo sapiens
gaatcaacagaatttgtctttttgtgactggtttatttcacttaacttcatcctcaaggttcaacttaaaggtgtatccatgttgtagcacgtgtcagcattttctttcgttctcaggctaaatagtatttcattgtgtgtgtacaccatgtttcatgcattcattcatcccttgaaagattggtgggttgtttcctcctttttgcttttgtgaacagtgctacgaacatggttgtacaaacatctcttggagccccactagcagttcctttgggtatataccccaaagtggaattgctggatctggtagctccctttttaattttttgaggaatcgccacacagtttccataacagctgcaccattttacattcccaagaccttttttttttttttttttttaagaagaaaagatgtgtttctgcatttctggaagtctatgctgcatttccatttgttgaaatttaagaccagagtcatcttttctgctgtaattataatggtcactggcttgtgccttttcctcctctctctgccccatctgcacggggtctttgaacaagtcccagcaccttggtggacaagcctgtgtccctggcccatcatggaagccgctgcctttcagagtgggagtctgtaccctgttgcctcattccttgctgcgcccatgagtgagcttgtgcctgacctctccttccaggtggacttacacactgggctgtcggagttctcggtgacgcagcgccggctggcccatggctggaatgagtttgttgctgacaacagcgaacctgtgtggaagaaatacctggatcagtttaagaaccccctgatcctgctgctgctgggctctgccctggtgagtgtcctcaccaaggagtatgaggacgccgtcagcatcgccacggcagtgcttgtcgtggtcactgtcgccttcatccaggtgagtatttcctgaggtcccagtcagggtaagctgggcgggacaggagcttcatggagtccccacctttaaacagcacatctgatgtgcttcctgccaggagtacaggtcggagaaatctctggaagagctgaccaagctggttcctccagaatgtaactgcctaagagaaggaaaactccagcacctgcttgctcgagaactggttcctggtgatgtcgtatctctctcgatcggagaccggatccctgcagacatccgactcactgaggtcacggacctcttggtggatgaatccagtttcaccggggaagccgagccatgtagtaaaacagacagccccttgacaggcggtggggacctcaccaccctcagcaacatcgtcttcatggggaccctggtgcagtatgggaggggccagggggtcgtgattggaacaggggaaagctctcagttcggagaagtgtttaagatgatgcaggctgaagagacacctaaaactcctttgcagaaaagcatggacaggctaggaaagcaactgacactcttctcctttggcataatcggtctcatcatgctcattggctggtcgcaagggaaacaactcctgagtatgttcacgatcggggtcagcctggctgtggcggccattccagagggtctgcccatcgtcgtcatggtgacgctggtcctgggagtgctgcggatggccaagaagcgggtcatcgtgaagaagttacccatcgtggagactttaggttgctgcagcgttctctgttctgacaagacggggactctgactgccaatgaaatgacagtgacccagcttgtaacgtcagatgggcttcgtgccgaggtcagcggagttgggtatgacggtcaagggactgtgtgtcttctaccatccaaggaagtcattaaggaattttccaatgtctcagtgggaaagttagtggaggcgggctgtgttgccaacaatgcggtcatcagaaagaacgccgtgatggggcagcccaccgagggtgcattgatggccctggcgatgaagatggacttaagtgatattaaaaattcatatataagaaaaaaagagattccattcagttcagagcagaagtggatggcggtgaaatgcagtctgaagactgaggatcaggaagacatttacttcatgaaaggggccttggaagaggtgatccgctactgcaccatgtacaacaacgggggcatccccctgccgctgacgccccagcagaggtcattctgcctgcaggaagagaagaggatggggtcgctcggtttgcgggtgctggccctggcttctgggcccgagctggggcggctgacgtttctaggtcttgtgggcatcattgaccccccgagagttggcgtgaaggaagcagtccaggttctctccgagtctggtgtgtctgtgaagatgataacgggggatgccctggagacggccttggccataggaagaaacatcggcctgtgcaacgggaagctgcaagccatgtccggggaggaggtggacagcgtggagaagggcgagctggccgaccgcgtggggaaggtgtccgtgttcttcaggaccagcccaaagcacaagctcaaaatcatcaaggctctgcaggagtcaggggcgatcgtggccatgactggggatggggtgaacgacgcagtggccctgaagtctgcagacattgggatcgccatggggcagacagggacggacgtcagcaaagaggccgccaacatgatcctggtggatgatgacttctcagccatcatgaatgcagtggaggaaggcaagggtattttttacaacatcaaaaactttgtccgattccagctgagcacgtaagtagaggccagcattccgagtgtcattaagcaccacgcctggcgggcggccgctgactggctgcgtgtgccccgcaggagcatctccgccctgagtctcatcactctgtccaccgtgttcaacctgcccagccccctcaacgccatgcagatcctatggatcaacatcatcatggatgggccaccggcgcagagcttgggggtagagcccgttgacaaagacgccttcaggcagccaccacggagtgtgcgggacaccatcctcagcagagccctcatcctgaagatcctcatgtccgcggccatcatcttcagcgggaccctctttatcttctggaaggaggtgccctgcccccatcctcatggtggcagcaaatcagcatgtgctggggagaccctggggtagcagccactgacctcacacctggaggaagctgtgtgaccgattcatgagcttatgcctgaagacagagcaagcactccccgcaccacgacgatgacgttcacttgttttgtgtttttcgatctcttcaacgccttgacctgccgctctcagaccaagctgatatttgagatcggctttctcaggaaccacatgttcctctactccgtcctggggtccatcctggggcagctggcggtcatttacatccccccgctgcagagggtcttccagacggagaacctgggagcgcttgatttgctgtttttaactggattggcctcatccgtcttcattttgtcagagctcctcaaactatgtgaaaaatactgttgcagccccaagagagtccagatgcaccctgaagatgtgtagtggaccgcactccgcggcaccttccctaatcatctcgatctggttgtgactgtggcccctgccgtgtctcctcgtcaggggagacttttaggaggccgcagccttccatcaccggatcagtttttcctcttaggaaagctgcaggaacctcgtgggctccagggacccaggcccacatccatccagcgttcccgctggctgtgggacagacagggaggggcctgtacagaaacaccacactgtttattaaatcacaatgatttttattaaccatgtctaactacgtatctgtgccacagcttgcagtgaggcaggccactcgtggcagatacaaggggctcctgagaggcagtgggtaggatggtcacactctgcccattgccctcctggaggccccatttcctcatcataaaatgagggacttttaaataaagtgctatgccgggggataattattttgatgtgtttacctagggtttttcatacaaggggccaggttggaaacccacagccatgtgttaatggccacgtggggtgagcagcaatccatcatgaatggcctacaggaaggcctcggcttttggagataaagagtagggctgggcatggtggctcacgcctgtaatcccagcactttgcaaggccaaggcaggcagattcactttgaggccagcctggccaacacagcaaaaccctgtctgtctctactaaaagtttaaaaaaaaaaacagttgccaggcgtgatgatgcacacctgttaatcccagctactcgggaggctgaggcaggagaatggcttgagtccaggaggtggagattgtaccactgcactgcagcatgggcaacaaagcaagagtctctctcagaaagtggcccttctctccggaaccaggaactgtagtatctcctgctgcctgcagacaagcttgatttcccactgccccaaagacttccaaaaaccgatctgctcttccacgtgacagatggcagaggagagaggtctccatgctgttcttctgcctgaagccacgccagaaccaccaaagggaaccagaagggggactccgtccccatctctcaggaaataaggccagagctagaaccccccatttactagtcaggcctcactagagaaactgaagtgtgccacttccacagtctgctaaggagtgcctccccctgagtcagggacaattcttgctctacttttcaggatccttgggcacactgctggcccgagacatttacttcccatttaaaattaagtaatcaaaataccagggtcgattactctgaactcttgcttatgtaaactttagggataaaactgtagtaagacacaaaatgctaacaataaaatataaattagactacattaaaa

SEQ ID NO: 357046 - DNA, 2467 bp, Homo sapiens
gaatcaacagaatttgtctttttgtgactggtttatttcacttaacttcatcctcaaggttcaacttaaaggtgtatccatgttgtagcacgtgtcagcattttctttcgttctcaggctaaatagtatttcattgtgtgtgtacaccatgtttcatgcattcattcatcccttgaaagattggtgggttgtttcctcctttttgcttttgtgaacagtgctacgaacatggttgtacaaacatctcttggagccccactagcagttcctttgggtatataccccaaagtggaattgctggatctggtagctccctttttaattttttgaggaatcgccacacagtttccataacagctgcaccattttacattcccaagaccttttttttttttttttttttaagaagaaaagatgtgtttctgcatttctggaagtctatgctgcatttccatttgttgaaatttaagaccagagtcatcttttctgctgtaattataatggtcactggcttgtgccttttcctcctctctctgccccatctgcacggggtctttgaacaagtcccagcaccttggtggacaagcctgtgtccctggcccatcatggaagccgctgcctttcagagtgggagtctgtaccctgttgcctcattccttgctgcgcccatgagtgagcttgtgcctgacctctccttccaggtggacttacacactgggctgtcggagttctcggtgacgcagcgccggctggcccatggctggaatgagtttgttgctgacaacagcgaacctgtgtggaagaaatacctggatcagtttaagaaccccctgatcctgctgctgctgggctctgccctggtgagtgtcctcaccaaggagtatgaggacgccgtcagcatcgccacggcagtgcttgtcgtggtcactgtcgccttcatccaggtgagtatttcctgaggtcccagtcagggtaagctgggcgggacaggagcttcatggagtccccacctttaaacagcacatctgatgtgcttcctgccaggagtacaggtcggagaaatctctggaagagctgaccaagctggttcctccagaatgtaactgcctaagagaaggaaaactccagcacctgcttgctcgagaactggttcctggtgatgtcgtatctctctcgatcggagaccggatccctgcagacatccgactcactgaggtcacggacctcttggtggatgaatccagtttcaccggggaagccgagccatgtagtaaaacagacagccccttgacaggcggtggggacctcaccaccctcagcaacatcgtcttcatggggaccctggtgcagtatgggaggggccagggggtcgtgattggaacaggggaaagctctcagttcggagaagtgtttaagatgatgcaggctgaagagacacctaaaactcctttgcagaaaagcatggacaggctaggaaagcaactgacactcttctcctttggcataatcggtctcatcatgctcattggctggtcgcaagggaaacaactcctgagtatgttcacgatcggggtcagcctggctgtggcggccattccagagggtctgcccatcgtcgtcatggtgacgctggtcctgggagtgctgcggatggccaagaagcgggtcatcgtgaagaagttacccatcgtggagactttaggttgctgcagcgttctctgttctgacaagacggggactctgactgccaatgaaatgacagtgacccagcttgtaacgtcagatgggcttcgtgccgaggtcagcggagttgggtatgacggtcaagggactgtgtgtcttctaccatccaaggaagtcattaaggaattttccaatgtctcagtgggaaagttagtggaggcgggctgtgttgccaacaatgcggtcatcagaaagaacgccgtgatggggcagcccaccgagggtgcattgatggccctggcgatgaagatggacttaagtgatattaaaaattcatatataagaaaaaaagagattccattcagttcagagcagaagtggatggcggtgaaatgcagtctgaagactgaggatcaggaagacatttacttcatgaaaggggccttggaagaggtgatccgctactgcaccatgtacaacaacgggggcatccccctgccgctgacgccccagcagaggtcattctgcctgcaggaagagaagaggatggggtcgctcggtttgcgggtgctggccctggcttctgggcccgagctggggcggctgacgtttctaggtcttgtgggcatcattgaccccccgagagttggcgtgaaggaagcagtccaggttctctccgagtctggtgtgtctgtgaagatgatagaaactggctctgagcgggggaaactggctctgagcgggagaaactggctctgagcgggagaaactggctctgagcggg

SEQ ID NO: 357047 - DNA, 1248 bp, Homo sapiens
gaatcaacagaatttgtctttttgtgactggtttatttcacttaacttcatcctcaaggttcaacttaaaggtgtatccatgttgtagcacgtgtcagcattttctttcgttctcaggctaaatagtatttcattgtgtgtgtacaccatgtttcatgcattcattcatcccttgaaagattggtgggttgtttcctcctttttgcttttgtgaacagtgctacgaacatggttgtacaaacatctcttggagccccactagcagttcctttgggtatataccccaaagtggaattgctggatctggtagctccctttttaattttttgaggaatcgccacacagtttccataacagctgcaccattttacattcccaagaccttttttttttttttttttttaagaagaaaagatgtgtttctgcatttctggaagtctatgctgcatttccatttgttgaaatttaagaccagagtcatcttttctgctgtaattataatggtcactggcttgtgccttttcctcctctctctgccccatctgcacggggtctttgaacaagtcccagcaccttggtggacaagcctgtgtccctggcccatcatggaagccgctgcctttcagagtgggagtctgtaccctgttgcctcattccttgctgcgcccatgagtgagcttgtgcctgacctctccttccaggtggacttacacactgggctgtcggagttctcggtgacgcagcgccggctggcccatggctggaatgagtttgttgctgacaacagcgaacctgtgtggaagaaatacctggatcagtttaagaaccccctgatcctgctgctgctgggctctgccctggtgagtgtcctcaccaaggagtatgaggacgccgtcagcatcgccacggcagtgcttgtcgtggtcactgtcgccttcatccaggtgagtatttcctgaggtcccagtcagggtaagctgggcgggacaggagcttcatggagtccccacctttaaacagcacatctgatgtgcttcctgccaggagtacaggtcggagaaatctctggaagagctgaccaagctggttcctccagaatgtaactggtaagtcagagcctccctgggactttttggttcactggaggagccagggagctggagagtttggcaaatgtttgctgaaagttgtatccttggtagtgtcggacaagagaaccacatctcactgggagttctaaggcctggt

SEQ ID NO: 357048 - DNA, 446 bp, Homo sapiens
ataggatgtttcatgtggtgtatgcatcggggtggagaaaccacccaaatttactgagaaggggaacttggaagtgctgctcttcaccattcagagcaagatgagggccaacaaccagaaggtctacatgccccgggaggggaagctcatctctgacatcaacaaggcctgggaaagactggaaaaagcggaacacgaaagagaactggctttgcggaatgagctcataagacaggagaaactggaacagctcgcccgcagatttgatcgcaaggcagctatgagggagacttggctgagcgaaaaccagcgtctggtgtctcaggacaactttgggtttgaccttcctgcagttgaggcctggtgctcagtcgtacgacctgtacctctcaacttttgccctatctgttaaatatatgctatgtcattaaatgcttttaaatcta

SEQ ID NO: 357049 - DNA, 971 bp, Homo sapiens
  misc_feature (510)..(510): n is a, c, g, or t
aagtcttttttcctaataatccattttccacattgccatgagggtaaagggttccaatcaaaaccaccattaaactgcatagtttctagtcttccctcagccctgatgctaattatgatagtttgcatagacataacttaaacttgtgattctccctccttccagagctttttgtagccctttttccccccaaaattagttttgttcaaaatcaagcattgggcccagccattaagataagacctaataagtgagagatacagttcccaagagtttacagatccaggtgttcacatggtggtggccagtctaccgtttatcttgtcaaggttgttactgctaatttggtgtcactttggtcttgggcagcggtggtgggcgacgtatctaatgagcgtgccattgacttctccatgtttgtctgtgtacgaggggtgcaggttgtctgtaatccactaaagtgtcagccacacccagctttagtaactcgctaatcgcacaccctgggtntatcagccaggggctgctacagttaatggtacacagttgatggtacacaggctgaaaatgataatgaatcaagaccctactacatttccaaagccgaaaagccatgagggttacaatttaaatgagcttgggaaggaacgctcccgaagacgtctccagcctgaagggtcagagccgctggaagcctggctgtctctgggctttctcgtctcagtgcagcaaggcaccgtgatcaaccaacccgtgatggggaaggccctggttctgtctttgtttgggggtaaatagctgtgtggtgttgagtgactgtgattggcttttccagctcctttaacacaaactacaacccactcacgatacaacttcggcagatgtggtcaaattgatgtttgttgacttgcctcatttccttccagctcttaagttccaaagtcttcgggtcgtttgagatcctctagagt

SEQ ID NO: 357050 - DNA, 953 bp, Homo sapiens
  misc_feature (489)..(489): n is a, c, g, or t
gataattctagtacaaagtataataaaaccacttgtacacttaccaatgatttaaagggtttattatacatctacattatattgtacgtttgagataattctagtacaaagtataataaaactagatgtataataaaccctttaaatcattggtaagtgtacaagtggtggaactgaagcatttactggacaaagtaatgttactctaatggttacttgctcgtgcgttgccacactgtgttataatttgcttcatttccttgctatttgatacatagtgtgcatttctctgtcactgtaactattgtaatgacaaattttcatcttactgcacaatcaaaatgacattgataggaatgaactccagaggctgggcctgaacagggaggtggtcgctcaggcctggtgctcagtcgtacgacctgtacctctcaacttttgccctatctgttaaatatatgctatgtcattaaatgcttttaaatctanaaaaaaaaaaaaaaaaaaaaaaaaaaaaaaaaaaaaaaaaaaaaaaaaaaaaaaaaaaaaggggggggggggaaaaataaccccggggggggccattgcccccccttttttttaaaggggggcccccaaaaggggggcgatataaaaaaaagacagacgggggcgggtaaaaaaccgcggcgagcggaaacacggccactggggtcattggggaagagagaccacctcgcgggggggacacagggggcaccaccccacaagatataggccggggaaaaaaaaatgggctttagtgtaccccgaccaatcgcgggggaaaatcgtccggtttattcaaattatgaggctccataaacacgagaagaagacagacagaagaggcgacgcacacagagagagagaagagacgaagtacagaggaagaaaacaagagcagaaagagagcaagacgagaacagcccaca

SEQ ID NO: 357051 - DNA, 604 bp, Homo sapiens
gtcgagctcggtatcccgagtgggtccctgccggatcacagacctgtacactgaccttcgagatggacggatgctcatcaagctgctggaggtcctctctggagagaggctgcctaaacccaccaagggacgaatgcgcatccactgcttagagaatgtggacaaggcccttcagttcctgaaggagcagagagtccatcttgagaacatggggtcccatgacatcgtggatggaaaccaccggctgacccttggcctcatctggaccatcatcctgcgcttccagatccaggatatcagtgtggaaactgaagacaacaaagagaagaaatctgccaaggatgcattgctgttgtggtgccagatgaagacagctgggtaccccaatgtcaacattcacaatttcaccactagctggagggacggcatggccttcaatgcactgatacacaaacaccggcctgacctgatagattttgacaaactaaagaatgttacagcacactacaaccttgcagaatgcatattaattctgtcagtacagcatctcgcactgtcgtgactggcatggcgcattacgaggtaacatcatagaatcagctat

SEQ ID NO: 357052 - DNA, 8513 bp, Homo sapiens
gtgagctgaagcagggcagggcatcaactcacccaggaagtgcaaggggtttggggattttcctttcctagccaagggaaggcatgacagactgtacctggaaaaacaggacactcttgcccaaatactgcactttttgcacagtcttagcaactggcagaccaggagattctctcctgtgcctgattcattgggtcccacacccatagggccttgcttactgccagtgcagcagtctgagattaacaccccatccccgggagaactctaagaaggagctgatgtggaggagcagctgagacagttcaagatgacgaccacagtagccacagactatgacaacattgagatccagcagcagtacagtgatgtcaacaaccgctgggatgtcgacgactgggacaatgagaacagctctgcgcggctttttgagcggtcccgcatcaaggctctggcagatgagcgtgaagccgtgcagaagaagaccttcaccaagtgggtcaattcccaccttgcccgtgtgtcctgccggatcacagacctgtacactgaccttcgagatggacggatgctcatcaagctgctggaggtcctctctggagagaggctgcctaaacccaccaagggacgaatgcgcatccactgcttagagaatgtggacaaggcccttcagttcctgaaggagcagagagtccatcttgagaacatggggtcccatgacatcgtggatggaaaccaccggctgacccttggcctcatctggaccatcatcctgcgcttccagatccaggatatcagtgtggaaactgaagacaacaaagagaagaaatctgccaaggatgcattgctgttgtggtgccagatgaagacagctgggtaccccaatgtcaacattcacaatttcaccactagctggagggacggcatggccttcaatgcactgatacacaaacaccggcctgacctgatagattttgacaaactaaagaaatctaacgcacactacaacctgcagaatgcatttaatctggcagaacagcacctcggcctcactaaactgttggaccccgaagacatcagcgtggaccatcctgatgagaagtccataatcacttatgtggtgacttattaccactacttctctaagatgaaggccttagctgttgaaggaaaacgaattggaaaggtgcttgacaatgctattgaaacagaaaaaatgattgaaaagtatgaatcacttgcctctgaccttctggaatggattgaacaaaccatcatcattctgaacaatcgcaaatttgccaattcactggtcggggttcaacagcagcttcaggcattcaacacttaccgcactgtggagaaaccacccaaatttactgagaaggggaacttggaagtgctgctcttcaccattcagagcaagatgagggccaacaaccagaaggtctacatgccccgggaggggaagctcatctctgacatcaacaaggcctgggaaagactggaaaaagcggaacacgaaagagaactggctttgcggaatgagctcataagacaggagaaactggaacagctcgcccgcagatttgatcgcaaggcagctatgagggagacttggctgagcgaaaaccagcgtctggtgtctcaggacaactttgggtttgaccttcctgcagttgaggccgccacaaaaaagcacgaggccattgagacagacattgccgcatacgaggagcgtgtgcaggctgtggtagccgtggccagggagctcgaggccgagaattaccacgacatcaagcgcatcacagcgaggaaggacaatgtcatccggctctgggaatacctactggaactgctcagggcccggagacagcggctcgagatgaacctggggctgcagaagatattccaggaaatgctctacattatggactggatggatgaaatgaaggtgctagtattgtctcaagactatggcaaacacttacttggtgtggaagacctgttacagaagcacaccctggttgaagcagacattggcatccaggcagagcgggtgagaggtgtcaatgcctccgcccagaagttcgcaacagacggggaaggttacaagccctgtgacccccaggtgatccgagaccgcgtggcccacatggagttctgttatcaagagctttgccagctggcggctgagcgcagggcccgtctggaagagtcccgccgcctctggaagttcttctgggagatggcagaagaggaaggctggatacgggagaaggagaagatcctgtcctcggacgattacgggaaagacctgaccagcgtcatgcgcctgctcagcaagcaccgggcgttcgaggacgagatgagcggccgcagtggccactttgagcaggccatcaaggaaggcgaagacatgatcgcggaggagcacttcgggtcggagaagatccgtgagaggatcatttacatccgggagcagtgggccaacctagagcagctctcggccattcggaagaagcgcctggaggaggcctccctgctgcaccagttccaggcagatgctgatgacattgatgcctggatgctggacatcctcaagattgtctccagcagcgacgtgggccacgatgagtattccacacagtctctggtcaagaaacacaaggacgtggcggaagagatcgccaattacaggcccacccttgacacgctgcacgaacaagccagcgccctcccccaggagcatgccgagtctccagacgtgaggggcaggctgtcgggcatcgaggagcggtataaggaggtggcagagctgacgcggctgcggaagcaggcactccaggacactctggccctgtacaagatgttcagcgaggctgatgcctgtgagctctggatcgacgagaaggagcagtggctcaacaacatgcagatcccagagaagctggaggatctggaggtcatccagcacagatttgagagcctagaaccagaaatgaacaaccaggcttcccgggttgcagtggtgaaccagattgcacgccagctgatgcacagcggccacccaagtgagaaggaaatcaaagcccagcaggacaaactcaacacaaggtggagccagttcagagaactggttgacaggaagaaggatgccctcctgtctgccctgagcatccagaactaccacctcgagtgcaatgaaaccaaatcctggattcgggaaaagaccaaggtcatcgagtccacccaggacctgggcaatgacctggctggcgtcatggccctgcagcgcaagctgaccggcatggagcgggacttggtggccattgaggcaaagctgagtgacctgcagaaggaggcggagaagctggagtccgagcaccccgaccaggcccaggccatcctgtctcggctggccgagatcagcgacgtgtgggaggagatgaagaccaccctgaaaaaccgagaggcctccctgggagaggccagcaagctgcagcagttcctacgggacttggacgacttccagtcctggctctctaggacccagacagcgatcgcctcggaggacatgccaaacaccctgaccgaggctgagaagctgctcacgcagcacgagaacatcaagaacgagatcgacaactacgaggaggactaccagaagatgagggacatgggcgagatggtcacccaggggcagaccgatgcccagtacatgtttctgcggcagcggctgcaggccctggacactggatggaacgagctccacaagatgtgggagaacagacaaaatctcctatcccagtcacatgcctaccagcagttcctcagagacacgaagcaagccgaagcctttcttaacaaccaggagtatgttctggctcacactgaaatgcctaccaccttggaaggagctgaagcagcaattaaaaagcaagaggacttcatgaccaccatggacgccaatgaggagaagatcaatgctgtggtggagactggccggaggctggtgagcgatgggaacatcaactcagatcgcatccaggagaaggtggactctattgatgacagacataggaagaatcgtgagacagccagtgaacttttgatgaggttgaaggacaacagggatctacagaaattcctgcaagattgtcaagagctgtctctctggatcaatgagaagatgctcacagcccaggacatgtcttacgatgaagccagaaatctgcacagtaaatggttgaagcatcaagcatttatggcagaacttgcatccaacaaagaatggcttgacaaaatcgagaaggaaggaatgcagctcatttcagaaaagcctgagacggaagctgtggtgaaggagaaactcactggtttacataaaatgtgggaagtccttgaatccactacccagacaaaggcccagcggctctttgatgcaaacaaggccgaacttttcacccagagctgtgcagatctagacaaatggctgcacggcctggagagtcagattcagtctgatgactatggcaaagacctgaccagtgtcaatatcctgctgaaaaagcaacagatgctggagaatcagatggaagtgcggaagaaggagatcgaagagctccaaagccaagcccaggccctgagtcaggaagggaagagcaccgacgaggtagacagcaagcgcctcaccgtgcagaccaagttcatggagttgctggagcccttgaacgagaggaagcataacctgctggcctccaaagagatccatcagttcaacagggatgtggaggacgagatcttgtgggttggagagaggatgcctttggcaacttccacggatcatggccacaacctccagactgtgcagctgttaataaagaaaaatcagaccctccagaaagaaatccaggggcaccagcctcgcattgacgacatctttgagaggagccaaaacatcgtcactgacagcagcagcctcagcgctgaggccatcagacagaggcttgccgacctgaagcagctgtggggtctcctcattgaggagacagagaaacgccacaggcggctggaggaggcgcacagggcccagcagtactactttgacgctgctgaggccgaagcctggatgagcgagcaggagctgtacatgatgtcagaggagaaggccaaggatgagcagagtgctgtctccatgttgaagaagcaccagatcttagaacaagctgtggaggactatgcagagaccgtgcatcagctctccaagaccagccgggccctggtggccgacagccatcctgaaagtgagcgcattagcatgcggcagtccaaagtggataaactgtacgctggtctgaaagaccttgctgaagagagaagaggcaagctggatgagagacacaggttattccagctcaaccgggaggtggacgacctggagcagtggatcgctgagagggaggtggtcgcagggtcccatgaactgggacaggactatgagcatgtcacgatgttacaagaacgattccgggagtttgcccgagacaccgggaacattgggcaggagcgcgtggacacggtcaatcacctggcagatgagctcatcaactctggacattcagatgccgccaccatcgctgaatggaaggatggcctcaatgaagcctgggccgacctcctggagctcattgacacaagaacacagattcttgccgcttcctatgaactgcacaagttttaccacgatgccaaggagatctttgggcgtatacaggacaaacacaagaaactccctgaggagcttgggagagatcagaacacagtggagaccttacagagaatgcacactacatttgagcatgacatccaggctctgggcacacaggtgaggcagctgcaggaggatgcagcccgcctccaggcggcctatgcgggtgacaaggccgacgatatccagaagcgcgagaacgaggtcctggaagcctggaagtccctcctggacgcctgtgagagccgcagggtgcggctggtggacacaggggacaagttccgcttcttcagcatggtgcgcgacctcatgctctggatggaggatgtcatccggcagatcgaggcccaggagaagccaagggatgtatcatctgttgaactcttaatgaataatcatcaaggcatcaaagctgaaattgatgcacgtaatgacagtttcacaacctgcattgaacttgggaaatccctgttggcgagaaaacactatgcatctgaggagatcaaggaaaaattactgcagttgacggaaaagaggaaagaaatgatcgacaagtgggaagaccgatgggaatggttaagactgattctggaggtccatcagttctcaagagacgccagtgtggccgaggcctggctgcttggacaggagccgtacctatccagccgagagataggccagagcgtggacgaggtggagaagctcatcaagcgccacgaggcatttgaaaagtctgcagcaacctgggatgagaggttctctgccctggaaaggctgactacattggagttactggaagtgcgcagacagcaagaggaagaggagaggaagaggcggccgccttctcccgagccgagcacgaaggtttcagaggaagccgagtcccagcagcagtgggatacttcaaaaggagaacaagtttcccaaaacggtttgccagctgaacagggatctccacggatggcagaaacggtggacacaagcgaaatggtcaacggcgctacagaacaaaggacgagctctaaagagtccagccccatcccctccccgacctctgatcgtaaagccaagactgccctcccagcccagagtgccgccaccttaccagccagaacccaggagacaccttcggcccagatggaaggcttcctcaatcggaaacacgagtgggaggcccacaataagaaagcctcaagcaggtcctggcacaatgtttattgtgtcataaataaccaagaaatgggtttctacaaagatgcaaagactgctgcttctggaattccctaccacagcgaggtccctgtgagtttgaaagaagctgtctgcgaagtggcccttgattacaaaaagaagaaacacgtattcaagctaagactaaatgatggcaatgagtacctcttccaagccaaagacgatgaggaaatgaacacatggatccaggctatctcttccgccatctcctctgataaacacgaggtgtctgccagcacccagagcacgccagcatccagccgcgcgcagaccctccccaccagcgtcgtcaccatcaccagcgagtccagtcccggcaagcgggaaaaggacaaagagaaagacaaagagaagcggttcagcctttttggcaaaaagaaatgaactcctttccttcacctcctgcccttctcttaccttttcagtgaaattccagcatgcaagctcagaaccaacacattactctctgtgcctaatgttcctcaatgtggttgatttttttttttttttaatttatagagcatttcggggggggtgggggaaacacacctaaacactttatctccaagttacaaaagtttgaggtgcagagggaaggccagattttttttttaatgaaattatatagattagatctcagtatttaaactgttcctcaattttgtgaggctgtgttggaaataacccgcctctagtgctgttggtatgcaaggcagcggtgcttaatcaatatttcctgtgctcaccagaggcaaaatgtaccaatatcctgacaccattctctctccatttacttctggtggttaccctgactcttgactcttagaagtgcccgagatggggctaacctttattaaacagatcgcatattatgatcttgctgcagccacagtgcagctccacattaactctacagaccaaaccatttgtatctggcatcacttactaacacacgacatgcggcttttctgcatcaactgctatgacggttaagaatgtcagtatacaagaaggaatagaaaactgatactgttttaaataatctgtaatttcaattttttttttttttgctgaaatacattatattgtacgtttgagataattctagtacaaagtataataaaactagatgtataataaaccctttaaatcattggtaagtgtacaagtggtggaactgaagcatttactggacaaagtaatgttactctaatggttacttgctcgtgcgttgccacactgtgttataatttgcttcatttccttgctatttgatacatagtgtgcatttctctgtcactgtaactattgtaatgacaaattttcatcttactgcacaatcaaaatgacattgataggaatgaactccagaggctgggcctgaacagggaggtggtcgctcaggcctggtgctcagtcgtacgacctgtacctctcaacttttgccctatctgttaaatatatgctatgtcattaaatgcttttaaatcta

SEQ ID NO: 357053 - DNA, 8460 bp, Homo sapiens
gtgagctgaagcagggcagggcatcaactcacccaggaagtgcaaggggtttggggattttcctttcctagccaagggaaggcatgacagactgtacctggaaaaacaggacactcttgcccaaatactgcactttttgcacagtcttagcaactggcagaccaggagattctctcctgtgcctgattcattgggtcccacacccatagggccttgcttactgccagtgcagcagtctgagattaacaccccatccccgggagaactctaagaaggagctgatgtggaggagcagctgagacagttcaagatgacgaccacagtagccacagactatgacaacattgagatccagcagcagtacagtgatgtcaacaaccgctgggatgtcgacgactgggacaatgagaacagctctgcgcggctttttgagcggtcccgcatcaaggctctggcagatgagcgtgaagccgtgcagaagaagaccttcaccaagtgggtcaattcccaccttgcccgtgtgtcctgccggatcacagacctgtacactgaccttcgagatggacggatgctcatcaagctgctggaggtcctctctggagagaggctgcctaaacccaccaagggacgaatgcgcatccactgcttagagaatgtggacaaggcccttcagttcctgaaggagcagagagtccatcttgagaacatggggtcccatgacatcgtggatggaaaccaccggctgacccttggcctcatctggaccatcatcctgcgcttccagatccaggatatcagtgtggaaactgaagacaacaaagagaagaaatctgccaaggatgcattgctgttgtggtgccagatgaagacagctgggtaccccaatgtcaacattcacaatttcaccactagctggagggacggcatggccttcaatgcactgatacacaaacaccggcctgacctgatagattttgacaaactaaagaaatctaacgcacactacaacctgcagaatgcatttaatctggcagaacagcacctcggcctcactaaactgttggaccccgaagacatcagcgtggaccatcctgatgagaagtccataatcacttatgtggtgacttattaccactacttctctaagatgaaggccttagctgttgaaggaaaacgaattggaaaggtgcttgacaatgctattgaaacagaaaaaatgattgaaaagtatgaatcacttgcctctgaccttctggaatggattgaacaaaccatcatcattctgaacaatcgcaaatttgccaattcactggtcggggttcaacagcagcttcaggcattcaacacttaccgcactgtggagaaaccacccaaatttactgagaaggggaacttggaagtgctgctcttcaccattcagagcaagatgagggccaacaaccagaaggtctacatgccccgggaggggaagctcatctctgacatcaacaaggcctgggaaagactggaaaaagcggaacacgaaagagaactggctttgcggaatgagctcataagacaggagaaactggaacagctcgcccgcagatttgatcgcaaggcagctatgagggagacttggctgagcgaaaaccagcgtctggtgtctcaggacaactttgggtttgaccttcctgcagttgaggccgccacaaaaaagcacgaggccattgagacagacattgccgcatacgaggagcgtgtgcaggctgtggtagccgtggccagggagctcgaggccgagaattaccacgacatcaagcgcatcacagcgaggaaggacaatgtcatccggctctgggaatacctactggaactgctcagggcccggagacagcggctcgagatgaacctggggctgcagaagatattccaggaaatgctctacattatggactggatggatgaaatgaaggtgctagtattgtctcaagactatggcaaacacttacttggtgtggaagacctgttacagaagcacaccctggttgaagcagacattggcatccaggcagagcgggtgagaggtgtcaatgcctccgcccagaagttcgcaacagacggggaaggttacaagccctgtgacccccaggtgatccgagaccgcgtggcccacatggagttctgttatcaagagctttgccagctggcggctgagcgcagggcccgtctggaagagtcccgccgcctctggaagttcttctgggagatggcagaagaggaaggctggatacgggagaaggagaagatcctgtcctcggacgattacgggaaagacctgaccagcgtcatgcgcctgctcagcaagcaccgggcgttcgaggacgagatgagcggccgcagtggccactttgagcaggccatcaaggaaggcgaagacatgatcgcggaggagcacttcgggtcggagaagatccgtgagaggatcatttacatccgggagcagtgggccaacctagagcagctctcggccattcggaagaagcgcctggaggaggcctccctgctgcaccagttccaggcagatgctgatgacattgatgcctggatgctggacatcctcaagattgtctccagcagcgacgtgggccacgatgagtattccacacagtctctggtcaagaaacacaaggacgtggcggaagagatcgccaattacaggcccacccttgacacgctgcacgaacaagccagcgccctcccccaggagcatgccgagtctccagacgtgaggggcaggctgtcgggcatcgaggagcggtataaggaggtggcagagctgacgcggctgcggaagcaggcactccaggacactctggccctgtacaagatgttcagcgaggctgatgcctgtgagctctggatcgacgagaaggagcagtggctcaacaacatgcagatcccagagaagctggaggatctggaggtcatccagcacagatttgagagcctagaaccagaaatgaacaaccaggcttcccgggttgcagtggtgaaccagattgcacgccagctgatgcacagcggccacccaagtgagaaggaaatcaaagcccagcaggacaaactcaacacaaggtggagccagttcagagaactggttgacaggaagaaggatgccctcctgtctgccctgagcatccagaactaccacctcgagtgcaatgaaaccaaatcctggattcgggaaaagaccaaggtcatcgagtccacccaggacctgggcaatgacctggctggcgtcatggccctgcagcgcaagctgaccggcatggagcgggacttggtggccattgaggcaaagctgagtgacctgcagaaggaggcggagaagctggagtccgagcaccccgaccaggcccaggccatcctgtctcggctggccgagatcagcgacgtgtgggaggagatgaagaccaccctgaaaaaccgagaggcctccctgggagaggccagcaagctgcagcagttcctacgggacttggacgacttccagtcctggctctctaggacccagacagcgatcgcctcggaggacatgccaaacaccctgaccgaggctgagaagctgctcacgcagcacgagaacatcaagaacgagatcgacaactacgaggaggactaccagaagatgagggacatgggcgagatggtcacccaggggcagaccgatgcccagtacatgtttctgcggcagcggctgcaggccctggacactggatggaacgagctccacaagatgtgggagaacagacaaaatctcctatcccagtcacatgcctaccagcagttcctcagagacacgaagcaagccgaagcctttcttaacaaccaggagtatgttctggctcacactgaaatgcctaccaccttggaaggagctgaagcagcaattaaaaagcaagaggacttcatgaccaccatggacgccaatgaggagaagatcaatgctgtggtggagactggccggaggctggtgagcgatgggaacatcaactcagatcgcatccaggagaaggtggactctattgatgacagacataggaagaatcgtgagacagccagtgaacttttgatgaggttgaaggacaacagggatctacagaaattcctgcaagattgtcaagagctgtctctctggatcaatgagaagatgctcacagcccaggacatgtcttacgatgaagccagaaatctgcacagtaaatggttgaagcatcaagcatttatggcagaacttgcatccaacaaagaatggcttgacaaaatcgagaaggaaggaatgcagctcatttcagaaaagcctgagacggaagctgtggtgaaggagaaactcactggtttacataaaatgtgggaagtccttgaatccactacccagacaaaggcccagcggctctttgatgcaaacaaggccgaacttttcacccagagctgtgcagatctagacaaatggctgcacggcctggagagtcagattcagtctgatgactatggcaaagacctgaccagtgtcaatatcctgctgaaaaagcaacagatgctggagaatcagatggaagtgcggaagaaggagatcgaagagctccaaagccaagcccaggccctgagtcaggaagggaagagcaccgacgaggtagacagcaagcgcctcaccgtgcagaccaagttcatggagttgctggagcccttgaacgagaggaagcataacctgctggcctccaaagagatccatcagttcaacagggatgtggaggacgagatcttgtgggttggagagaggatgcctttggcaacttccacggatcatggccacaacctccagactgtgcagctgttaataaagaaaaatcagaccctccagaaagaaatccaggggcaccagcctcgcattgacgacatctttgagaggagccaaaacatcgtcactgacagcagcagcctcagcgctgaggccatcagacagaggcttgccgacctgaagcagctgtggggtctcctcattgaggagacagagaaacgccacaggcggctggaggaggcgcacagggcccagcagtactactttgacgctgctgaggccgaagcctggatgagcgagcaggagctgtacatgatgtcagaggagaaggccaaggatgagcagagtgctgtctccatgttgaagaagcaccagatcttagaacaagctgtggaggactatgcagagaccgtgcatcagctctccaagaccagccgggccctggtggccgacagccatcctgaaagtgagcgcattagcatgcggcagtccaaagtggataaactgtacgctggtctgaaagaccttgctgaagagagaagaggcaagctggatgagagacacaggttattccagctcaaccgggaggtggacgacctggagcagtggatcgctgagagggaggtggtcgcagggtcccatgaactgggacaggactatgagcatgtcacgatgttacaagaacgattccgggagtttgcccgagacaccgggaacattgggcaggagcgcgtggacacggtcaatcacctggcagatgagctcatcaactctggacattcagatgccgccaccatcgctgaatggaaggatggcctcaatgaagcctgggccgacctcctggagctcattgacacaagaacacagattcttgccgcttcctatgaactgcacaagttttaccacgatgccaaggagatctttgggcgtatacaggacaaacacaagaaactccctgaggagcttgggagagatcagaacacagtggagaccttacagagaatgcacactacatttgagcatgacatccaggctctgggcacacaggtgaggcagctgcaggaggatgcagcccgcctccaggcggcctatgcgggtgacaaggccgacgatatccagaagcgcgagaacgaggtcctggaagcctggaagtccctcctggacgcctgtgagagccgcagggtgcggctggtggacacaggggacaagttccgcttcttcagcatggtgcgcgacctcatgctctggatggaggatgtcatccggcagatcgaggcccaggagaagccaagggatgtatcatctgttgaactcttaatgaataatcatcaaggcatcaaagctgaaattgatgcacgtaatgacagtttcacaacctgcattgaacttgggaaatccctgttggcgagaaaacactatgcatctgaggagatcaaggaaaaattactgcagttgacggaaaagaggaaagaaatgatcgacaagtgggaagaccgatgggaatggttaagactgattctggaggtccatcagttctcaagagacgccagtgtggccgaggcctggctgcttggacaggagccgtacctatccagccgagagataggccagagcgtggacgaggtggagaagctcatcaagcgccacgaggcatttgaaaagtctgcagcaacctgggatgagaggttctctgccctggaaaggctgactacattggagttactggaagtgcgcagacagcaagaggaagaggagaggaagaggcggccgccttctcccgagccgagcacgaaggtttcagaggaagccgagtcccagcagcagtgggatacttcaaaaggagaacaagtttcccaaaacggtttgccagctgaacagggatctccacggatggcagaaacggtggacacaagcgaaatggtcaacggcgctacagaacaaaggacgagctctaaagagtccagccccatcccctccccgacctctgatcgtaaagccaagactgccctcccagcccagagtgccgccaccttaccagccagaacccaggagacaccttcggcccagatggaaggcttcctcaatcggaaacacgagtgggaggcccacaataagaaagcctcaagcaggtcctggcacaatgtttattgtgtcataaataaccaagaaatgggtttctacaaagatgcaaagactgctgcttctggaattccctaccacagcgaggtccctgtgagtttgaaagaagctgtctgcgaagtggcccttgattacaaaaagaagaaacacgtattcaagctaagactaaatgatggcaatgagtacctcttccaagccaaagacgatgaggaaatgaacacatggatccaggctatctcttccgccatctcctctgataaacacgaggtgtctgccagcacccagagcacgccagcatccagccgcgcgcagaccctccccaccagcgtcgtcaccatcaccagcgagtccagtcccggcaagcgggaaaaggacaaagagaaagacaaagagaagcggttcagcctttttggcaaaaagaaatgaactcctttccttcacctcctgcccttctcttaccttttcagtgaaattccagcatgcaagctcagaaccaacacattactctctgtgcctaatgttcctcaatgtggttgatttttttttttttttaatttatagagcatttcggggggggtgggggaaacacacctaaacactttatctccaagttacaaaagtttgaggtgcagagggaaggccagattttttttttaatgaaattatatagattagatctcagtatttaaactgttcctcaattttgtgaggctgtgttggaaataacccgcctctagtgctgttggtatgcaaggcagcggtgcttaatcaatatttcctgtgctcaccagaggcccctgactcttgactcttagaagtgcccgagatggggctaacctttattaaacagatcgcatattatgatcttgctgcagccacagtgcagctccacattaactctacagaccaaaccatttgtatctggcatcacttactaacacacgacatgcggcttttctgcatcaactgctatgacggttaagaatgtcagtatacaagaaggaatagaaaactgatactgttttaaataatctgtaatttcaattttttttttttttgctgaaatacattatattgtacgtttgagataattctagtacaaagtataataaaactagatgtataataaaccctttaaatcattggtaagtgtacaagtggtggaactgaagcatttactggacaaagtaatgttactctaatggttacttgctcgtgcgttgccacactgtgttataatttgcttcatttccttgctatttgatacatagtgtgcatttctctgtcactgtaactattgtaatgacaaattttcatcttactgcacaatcaaaatgacattgataggaatgaactccagaggctgggcctgaacagggaggtggtcgctcaggcctggtgctcagtcgtacgacctgtacctctcaacttttgccctatctgttaaatatatgctatgtcattaaatgcttttaaatcta

SEQ ID NO: 357054 - DNA, 9039 bp, Homo sapiens
gtgagctgaagcagggcagggcatcaactcacccaggaagtgcaaggggtttggggattttcctttcctagccaagggaaggcatgacagactgtacctggaaaaacaggacactcttgcccaaatactgcactttttgcacagtcttagcaactggcagaccaggagattctctcctgtgcctgattcattgggtcccacacccatagggccttgcttactgccagtgcagcagtctgagattaacaccccatccccgggagaactctaagaaggagctgatgtggaggagcagctgagacagttcaagatgacgaccacagtagccacagactatgacaacattgagatccagcagcagtacagtgatgtcaacaaccgctgggatgtcgacgactgggacaatgagaacagctctgcgcggctttttgagcggtcccgcatcaaggctctggcagatgagcgtgaagccgtgcagaagaagaccttcaccaagtgggtcaattcccaccttgcccgtgtgtcctgccggatcacagacctgtacactgaccttcgagatggacggatgctcatcaagctgctggaggtcctctctggagagaggctgcctaaacccaccaagggacgaatgcgcatccactgcttagagaatgtggacaaggcccttcagttcctgaaggagcagagagtccatcttgagaacatggggtcccatgacatcgtggatggaaaccaccggctgacccttggcctcatctggaccatcatcctgcgcttccagatccaggatatcagtgtggaaactgaagacaacaaagagaagaaatctgccaaggatgcattgctgttgtggtgccagatgaagacagctgggtaccccaatgtcaacattcacaatttcaccactagctggagggacggcatggccttcaatgcactgatacacaaacaccggcctgacctgatagattttgacaaactaaagaaatctaacgcacactacaacctgcagaatgcatttaatctggcagaacagcacctcggcctcactaaactgttggaccccgaagacatcagcgtggaccatcctgatgagaagtccataatcacttatgtggtgacttattaccactacttctctaagatgaaggccttagctgttgaaggaaaacgaattggaaaggtgcttgacaatgctattgaaacagaaaaaatgattgaaaagtatgaatcacttgcctctgaccttctggaatggattgaacaaaccatcatcattctgaacaatcgcaaatttgccaattcactggtcggggttcaacagcagcttcaggcattcaacacttaccgcactgtggagaaaccacccaaatttactgagaaggggaacttggaagtgctgctcttcaccattcagagcaagatgagggccaacaaccagaaggtctacatgccccgggaggggaagctcatctctgacatcaacaaggcctgggaaagactggaaaaagcggaacacgaaagagaactggctttgcggaatgagctcataagacaggagaaactggaacagctcgcccgcagatttgatcgcaaggcagctatgagggagacttggctgagcgaaaaccagcgtctggtgtctcaggacaactttgggtttgaccttcctgcagttgaggccgccacaaaaaagcacgaggccattgagacagacattgccgcatacgaggagcgtgtgcaggctgtggtagccgtggccagggagctcgaggccgagaattaccacgacatcaagcgcatcacagcgaggaaggacaatgtcatccggctctgggaatacctactggaactgctcagggcccggagacagcggctcgagatgaacctggggctgcagaagatattccaggaaatgctctacattatggactggatggatgaaatgaaggtgctagtattgtctcaagactatggcaaacacttacttggtgtggaagacctgttacagaagcacaccctggttgaagcagacattggcatccaggcagagcgggtgagaggtgtcaatgcctccgcccagaagttcgcaacagacggggaaggttacaagccctgtgacccccaggtgatccgagaccgcgtggcccacatggagttctgttatcaagagctttgccagctggcggctgagcgcagggcccgtctggaagagtcccgccgcctctggaagttcttctgggagatggcagaagaggaaggctggatacgggagaaggagaagatcctgtcctcggacgattacgggaaagacctgaccagcgtcatgcgcctgctcagcaagcaccgggcgttcgaggacgagatgagcggccgcagtggccactttgagcaggccatcaaggaaggcgaagacatgatcgcggaggagcacttcgggtcggagaagatccgtgagaggatcatttacatccgggagcagtgggccaacctagagcagctctcggccattcggaagaagcgcctggaggaggcctccctgctgcaccagttccaggcagatgctgatgacattgatgcctggatgctggacatcctcaagattgtctccagcagcgacgtgggccacgatgagtattccacacagtctctggtcaagaaacacaaggacgtggcggaagagatcgccaattacaggcccacccttgacacgctgcacgaacaagccagcgccctcccccaggagcatgccgagtctccagacgtgaggggcaggctgtcgggcatcgaggagcggtataaggaggtggcagagctgacgcggctgcggaagcaggcactccaggacactctggccctgtacaagatgttcagcgaggctgatgcctgtgagctctggatcgacgagaaggagcagtggctcaacaacatgcagatcccagagaagctggaggatctggaggtcatccagcacagatttgagagcctagaaccagaaatgaacaaccaggcttcccgggttgcagtggtgaaccagattgcacgccagctgatgcacagcggccacccaagtgagaaggaaatcaaagcccagcaggacaaactcaacacaaggtggagccagttcagagaactggttgacaggaagaaggatgccctcctgtctgccctgagcatccagaactaccacctcgagtgcaatgaaaccaaatcctggattcgggaaaagaccaaggtcatcgagtccacccaggacctgggcaatgacctggctggcgtcatggccctgcagcgcaagctgaccggcatggagcgggacttggtggccattgaggcaaagctgagtgacctgcagaaggaggcggagaagctggagtccgagcaccccgaccaggcccaggccatcctgtctcggctggccgagatcagcgacgtgtgggaggagatgaagaccaccctgaaaaaccgagaggcctccctgggagaggccagcaagctgcagcagttcctacgggacttggacgacttccagtcctggctctctaggacccagacagcgatcgcctcggaggacatgccaaacaccctgaccgaggctgagaagctgctcacgcagcacgagaacatcaagaacgagatcgacaactacgaggaggactaccagaagatgagggacatgggcgagatggtcacccaggggcagaccgatgcccagtacatgtttctgcggcagcggctgcaggccctggacactggatggaacgagctccacaagatgtgggagaacagacaaaatctcctatcccagtcacatgcctaccagcagttcctcagagacacgaagcaagccgaagcctttcttaacaaccaggagtatgttctggctcacactgaaatgcctaccaccttggaaggagctgaagcagcaattaaaaagcaagaggacttcatgaccaccatggacgccaatgaggagaagatcaatgctgtggtggagactggccggaggctggtgagcgatgggaacatcaactcagatcgcatccaggagaaggtggactctattgatgacagacataggaagaatcgtgagacagccagtgaacttttgatgaggttgaaggacaacagggatctacagaaattcctgcaagattgtcaagagctgtctctctggatcaatgagaagatgctcacagcccaggacatgtcttacgatgaagccagaaatctgcacagtaaatggttgaagcatcaagcatttatggcagaacttgcatccaacaaagaatggcttgacaaaatcgagaaggaaggaatgcagctcatttcagaaaagcctgagacggaagctgtggtgaaggagaaactcactggtttacataaaatgtgggaagtccttgaatccactacccagacaaaggcccagcggctctttgatgcaaacaaggccgaacttttcacccagagctgtgcagatctagacaaatggctgcacggcctggagagtcagattcagtctgatgactatggcaaagacctgaccagtgtcaatatcctgctgaaaaagcaacagatgctggagaatcagatggaagtgcggaagaaggagatcgaagagctccaaagccaagcccaggccctgagtcaggaagggaagagcaccgacgaggtagacagcaagcgcctcaccgtgcagaccaagttcatggagttgctggagcccttgaacgagaggaagcataacctgctggcctccaaagagatccatcagttcaacagggatgtggaggacgagatcttgtgggttggagagaggatgcctttggcaacttccacggatcatggccacaacctccagactgtgcagctgttaataaagaaaaatcagaccctccagaaagaaatccaggggcaccagcctcgcattgacgacatctttgagaggagccaaaacatcgtcactgacagcagcagcctcagcgctgaggccatcagacagaggcttgccgacctgaagcagctgtggggtctcctcattgaggagacagagaaacgccacaggcggctggaggaggcgcacagggcccagcagtactactttgacgctgctgaggccgaagcctggatgagcgagcaggagctgtacatgatgtcagaggagaaggccaaggatgagcagagtgctgtctccatgttgaagaagcaccagatcttagaacaagctgtggaggactatgcagagaccgtgcatcagctctccaagaccagccgggccctggtggccgacagccatcctgaaagtgagcgcattagcatgcggcagtccaaagtggataaactgtacgctggtctgaaagaccttgctgaagagagaagaggcaagctggatgagagacacaggttattccagctcaaccgggaggtggacgacctggagcagtggatcgctgagagggaggtggtcgcagggtcccatgaactgggacaggactatgagcatgtcacgatgttacaagaacgattccgggagtttgcccgagacaccgggaacattgggcaggagcgcgtggacacggtcaatcacctggcagatgagctcatcaactctggacattcagatgccgccaccatcgctgaatggaaggatggcctcaatgaagcctgggccgacctcctggagctcattgacacaagaacacagattcttgccgcttcctatgaactgcacaagttttaccacgatgccaaggagatctttgggcgtatacaggacaaacacaagaaactccctgaggagcttgggagagatcagaacacagtggagaccttacagagaatgcacactacatttgagcatgacatccaggctctgggcacacaggtgaggcagctgcaggaggatgcagcccgcctccaggcggcctatgcgggtgacaaggccgacgatatccagaagcgcgagaacgaggtcctggaagcctggaagtccctcctggacgcctgtgagagccgcagggtgcggctggtggacacaggggacaagttccgcttcttcagcatggtgcgcgacctcatgctctggatggaggatgtcatccggcagatcgaggcccaggagaagccaagggatgtatcatctgttgaactcttaatgaataatcatcaaggcatcaaagctgaaattgatgcacgtaatgacagtttcacaacctgcattgaacttgggaaatccctgttggcgagaaaacactatgcatctgaggagatcaaggaaaaattactgcagttgacggaaaagaggaaagaaatgatcgacaagtgggaagaccgatgggaatggttaagactgattctggaggtccatcagttctcaagagacgccagtgtggccgaggcctggctgcttggacaggagccgtacctatccagccgagagataggccagagcgtggacgaggtggagaagctcatcaagcgccacgaggcatttgaaaagtctgcagcaacctgggatgagaggttctctgccctggaaaggctgactacattggagttactggaagtgcgcagacagcaagaggaagaggagaggaagaggcggccgccttctcccgagccgagcacgaaggtttcagaggaagccgagtcccagcagcagtgggatacttcaaaaggagaacaagtttcccaaaacggtttgccagctgaacagggatctccacggatggcagaaacggtggacacaagcgaaatggtcaacggcgctacagaacaaaggacgagctctaaagagtccagccccatcccctccccgacctctgatcgtaaagccaagactgccctcccagcccagagtgccgccaccttaccagccagaacccaggagacaccttcggcccagatggaaggcttcctcaatcggaaacacgagtgggaggcccacaataagaaagcctcaagcaggtcctggcacaatgtttattgtgtcataaataaccaagaaatgggtttctacaaagatgcaaagactgctgcttctggaattccctaccacagcgaggtccctgtgagtttgaaagaagctgtctgcgaagtggcccttgattacaaaaagaagaaacacgtattcaagctaagactaaatgatggcaatgagtacctcttccaagccaaagacgatgaggaaatgaacacatggatccaggctatctcttccgccatctcctctgataaacacgaggtgtctgccagcacccagagcacgccagcatccagccgcgcgcagaccctccccaccagcgtcgtcaccatcaccagcgagtccagtcccggcaagcgggaaaaggacaaagagaaagacaaagagaagcggttcagcctttttggcaaaaagaaatgaactcctttccttcacctcctgcccttctcttaccttttcagtgaaattccagcatgcaagctcagaaccaacacattactctctgtgcctaatgttcctcaatgtggttgatttttttttttttttaatttatagagcatttcggggggggtgggggaaacacacctaaacactttatctccaagttacaaaagtttgaggtgcagagggaaggccagattttttttttaatgaaattatatagattagatctcagtatttaaactgttcctcaattttgtgaggctgtgttggaaataacccgcctctagtgctgttggtatgcaaggcagcggtgcttaatcaatatttcctgtgctcaccagaggcaaaatgtaccaatatcctgacaccattctctctccatttacttctggtggttaccctgactcttgactcttagaagtgcccgagatggggctaacctttattaaacagatcgcatattatgatcttgctgcagccacagtgcagctccacattaactctacagaccaaaccatttgtatctggcatcacttactaacacacgacatgcggcttttctgcatcaactgctatgacggttaagaatgtcagtatacaagaaggaatagaaaactgatactgttttaaataatctgtaatttcaattttttttttttttgctgaaatacattatattgtacgtttgagataattctagtacaaagtataataaaactagatgtataataaaccctttaaatcattggtaagtgtacaagtggtggaactgaagcatttactggacaaagtaatgttactctaatggttacttgctcgtgcgttgccacactgtgttataatttgcttcatttccttgctatttgatacatagtgtgcatttctctgtcactgtaactattgtaatgacaaattttcatcttactgcacaatcaaaatgacattgataggaatgaactccagaggctgggcctgaacagggaggtggtcgctcaggcctggtgctcagtcgtacgacctgtacctctcaacttttgccctatctgttaaatatatgctatgtcattaaatgcttttaaatctagcacggtgactagttgttgttcttcctctgctgcgtgtgcatgcccagtagggaaactgcaaagggagaaatgacaaacaagaaacattttacaaccagtctgggctcacttttgcattttttatgcatgtctggtgcacaagctttgaaaactacagcaaacagtaataaatgtgactgttttgtagttatacattcaggctttatcttttatttatgaaaaagttaccagagcacttgtgaaacctgaactctgagataggggttggcaaatttgttctgtaaagggacagagatagtaaatattttaggctttgtaggccgtaactgtctctgttgctcaattctgctgttgcgtaatacaaaggcagccattgacggtatgtgaatgcctgggcatggctgtgttccagtaaaactatttaaggacataaatttgaatttcatataactttgacatgccatacaatattttgattttcttaatgatttcaaaatgtaaagtctattttatacagatcagacc

SEQ ID NO: 357055 - DNA, 8513 bp, Homo sapiens
  misc_feature (7950)..(7950): n is a, c, g, or t
  misc_feature (7956)..(7956): n is a, c, g, or t
  misc_feature (7959)..(7959): n is a, c, g, or t
  misc_feature (7966)..(7966): n is a, c, g, or t
  misc_feature (7968)..(7968): n is a, c, g, or t
  misc_feature (7970)..(7970): n is a, c, g, or t
  misc_feature (7981)..(7981): n is a, c, g, or t
  misc_feature (7984)..(7984): n is a, c, g, or t
  misc_feature (7987)..(7987): n is a, c, g, or t
  misc_feature (7989)..(7989): n is a, c, g, or t
  misc_feature (7992)..(7992): n is a, c, g, or t
  misc_feature (8007)..(8007): n is a, c, g, or t
  misc_feature (8009)..(8009): n is a, c, g, or t
  misc_feature (8013)..(8013): n is a, c, g, or t
  misc_feature (8015)..(8015): n is a, c, g, or t
  misc_feature (8019)..(8019): n is a, c, g, or t
  misc_feature (8032)..(8034): n is a, c, g, or t
  misc_feature (8042)..(8042): n is a, c, g, or t
  misc_feature (8049)..(8049): n is a, c, g, or t
  misc_feature (8053)..(8053): n is a, c, g, or t
  misc_feature (8075)..(8081): n is a, c, g, or t
  misc_feature (8084)..(8084): n is a, c, g, or t
  misc_feature (8086)..(8086): n is a, c, g, or t
  misc_feature (8090)..(8091): n is a, c, g, or t
gtgagctgaagcagggcagggcatcaactcacccaggaagtgcaaggggtttggggattttcctttcctagccaagggaaggcatgacagactgtacctggaaaaacaggacactcttgcccaaatactgcactttttgcacagtcttagcaactggcagaccaggagattctctcctgtgcctgattcattgggtcccacacccatagggccttgcttactgccagtgcagcagtctgagattaacaccccatccccgggagaactctaagaaggagctgatgtggaggagcagctgagacagttcaagatgacgaccacagtagccacagactatgacaacattgagatccagcagcagtacagtgatgtcaacaaccgctgggatgtcgacgactgggacaatgagaacagctctgcgcggctttttgagcggtcccgcatcaaggctctggcagatgagcgtgaagccgtgcagaagaagaccttcaccaagtgggtcaattcccaccttgcccgtgtgtcctgccggatcacagacctgtacactgaccttcgagatggacggatgctcatcaagctgctggaggtcctctctggagagaggctgcctaaacccaccaagggacgaatgcgcatccactgcttagagaatgtggacaaggcccttcagttcctgaaggagcagagagtccatcttgagaacatggggtcccatgacatcgtggatggaaaccaccggctgacccttggcctcatctggaccatcatcctgcgcttccagatccaggatatcagtgtggaaactgaagacaacaaagagaagaaatctgccaaggatgcattgctgttgtggtgccagatgaagacagctgggtaccccaatgtcaacattcacaatttcaccactagctggagggacggcatggccttcaatgcactgatacacaaacaccggcctgacctgatagattttgacaaactaaagaaatctaacgcacactacaacctgcagaatgcatttaatctggcagaacagcacctcggcctcactaaactgttggaccccgaagacatcagcgtggaccatcctgatgagaagtccataatcacttatgtggtgacttattaccactacttctctaagatgaaggccttagctgttgaaggaaaacgaattggaaaggtgcttgacaatgctattgaaacagaaaaaatgattgaaaagtatgaatcacttgcctctgaccttctggaatggattgaacaaaccatcatcattctgaacaatcgcaaatttgccaattcactggtcggggttcaacagcagcttcaggcattcaacacttaccgcactgtggagaaaccacccaaatttactgagaaggggaacttggaagtgctgctcttcaccattcagagcaagatgagggccaacaaccagaaggtctacatgccccgggaggggaagctcatctctgacatcaacaaggcctgggaaagactggaaaaagcggaacacgaaagagaactggctttgcggaatgagctcataagacaggagaaactggaacagctcgcccgcagatttgatcgcaaggcagctatgagggagacttggctgagcgaaaaccagcgtctggtgtctcaggacaactttgggtttgaccttcctgcagttgaggccgccacaaaaaagcacgaggccattgagacagacattgccgcatacgaggagcgtgtgcaggctgtggtagccgtggccagggagctcgaggccgagaattaccacgacatcaagcgcatcacagcgaggaaggacaatgtcatccggctctgggaatacctactggaactgctcagggcccggagacagcggctcgagatgaacctggggctgcagaagatattccaggaaatgctctacattatggactggatggatgaaatgaaggtgctagtattgtctcaagactatggcaaacacttacttggtgtggaagacctgttacagaagcacaccctggttgaagcagacattggcatccaggcagagcgggtgagaggtgtcaatgcctccgcccagaagttcgcaacagacggggaaggttacaagccctgtgacccccaggtgatccgagaccgcgtggcccacatggagttctgttatcaagagctttgccagctggcggctgagcgcagggcccgtctggaagagtcccgccgcctctggaagttcttctgggagatggcagaagaggaaggctggatacgggagaaggagaagatcctgtcctcggacgattacgggaaagacctgaccagcgtcatgcgcctgctcagcaagcaccgggcgttcgaggacgagatgagcggccgcagtggccactttgagcaggccatcaaggaaggcgaagacatgatcgcggaggagcacttcgggtcggagaagatccgtgagaggatcatttacatccgggagcagtgggccaacctagagcagctctcggccattcggaagaagcgcctggaggaggcctccctgctgcaccagttccaggcagatgctgatgacattgatgcctggatgctggacatcctcaagattgtctccagcagcgacgtgggccacgatgagtattccacacagtctctggtcaagaaacacaaggacgtggcggaagagatcgccaattacaggcccacccttgacacgctgcacgaacaagccagcgccctcccccaggagcatgccgagtctccagacgtgaggggcaggctgtcgggcatcgaggagcggtataaggaggtggcagagctgacgcggctgcggaagcaggcactccaggacactctggccctgtacaagatgttcagcgaggctgatgcctgtgagctctggatcgacgagaaggagcagtggctcaacaacatgcagatcccagagaagctggaggatctggaggtcatccagcacagatttgagagcctagaaccagaaatgaacaaccaggcttcccgggttgcagtggtgaaccagattgcacgccagctgatgcacagcggccacccaagtgagaaggaaatcaaagcccagcaggacaaactcaacacaaggtggagccagttcagagaactggttgacaggaagaaggatgccctcctgtctgccctgagcatccagaactaccacctcgagtgcaatgaaaccaaatcctggattcgggaaaagaccaaggtcatcgagtccacccaggacctgggcaatgacctggctggcgtcatggccctgcagcgcaagctgaccggcatggagcgggacttggtggccattgaggcaaagctgagtgacctgcagaaggaggcggagaagctggagtccgagcaccccgaccaggcccaggccatcctgtctcggctggccgagatcagcgacgtgtgggaggagatgaagaccaccctgaaaaaccgagaggcctccctgggagaggccagcaagctgcagcagttcctacgggacttggacgacttccagtcctggctctctaggacccagacagcgatcgcctcggaggacatgccaaacaccctgaccgaggctgagaagctgctcacgcagcacgagaacatcaagaacgagatcgacaactacgaggaggactaccagaagatgagggacatgggcgagatggtcacccaggggcagaccgatgcccagtacatgtttctgcggcagcggctgcaggccctggacactggatggaacgagctccacaagatgtgggagaacagacaaaatctcctatcccagtcacatgcctaccagcagttcctcagagacacgaagcaagccgaagcctttcttaacaaccaggagtatgttctggctcacactgaaatgcctaccaccttggaaggagctgaagcagcaattaaaaagcaagaggacttcatgaccaccatggacgccaatgaggagaagatcaatgctgtggtggagactggccggaggctggtgagcgatgggaacatcaactcagatcgcatccaggagaaggtggactctattgatgacagacataggaagaatcgtgagacagccagtgaacttttgatgaggttgaaggacaacagggatctacagaaattcctgcaagattgtcaagagctgtctctctggatcaatgagaagatgctcacagcccaggacatgtcttacgatgaagccagaaatctgcacagtaaatggttgaagcatcaagcatttatggcagaacttgcatccaacaaagaatggcttgacaaaatcgagaaggaaggaatgcagctcatttcagaaaagcctgagacggaagctgtggtgaaggagaaactcactggtttacataaaatgtgggaagtccttgaatccactacccagacaaaggcccagcggctctttgatgcaaacaaggccgaacttttcacccagagctgtgcagatctagacaaatggctgcacggcctggagagtcagattcagtctgatgactatggcaaagacctgaccagtgtcaatatcctgctgaaaaagcaacagatgctggagaatcagatggaagtgcggaagaaggagatcgaagagctccaaagccaagcccaggccctgagtcaggaagggaagagcaccgacgaggtagacagcaagcgcctcaccgtgcagaccaagttcatggagttgctggagcccttgaacgagaggaagcataacctgctggcctccaaagagatccatcagttcaacagggatgtggaggacgagatcttgtgggttggagagaggatgcctttggcaacttccacggatcatggccacaacctccagactgtgcagctgttaataaagaaaaatcagaccctccagaaagaaatccaggggcaccagcctcgcattgacgacatctttgagaggagccaaaacatcgtcactgacagcagcagcctcagcgctgaggccatcagacagaggcttgccgacctgaagcagctgtggggtctcctcattgaggagacagagaaacgccacaggcggctggaggaggcgcacagggcccagcagtactactttgacgctgctgaggccgaagcctggatgagcgagcaggagctgtacatgatgtcagaggagaaggccaaggatgagcagagtgctgtctccatgttgaagaagcaccagatcttagaacaagctgtggaggactatgcagagaccgtgcatcagctctccaagaccagccgggccctggtggccgacagccatcctgaaagtgagcgcattagcatgcggcagtccaaagtggataaactgtacgctggtctgaaagaccttgctgaagagagaagaggcaagctggatgagagacacaggttattccagctcaaccgggaggtggacgacctggagcagtggatcgctgagagggaggtggtcgcagggtcccatgaactgggacaggactatgagcatgtcacgatgttacaagaacgattccgggagtttgcccgagacaccgggaacattgggcaggagcgcgtggacacggtcaatcacctggcagatgagctcatcaactctggacattcagatgccgccaccatcgctgaatggaaggatggcctcaatgaagcctgggccgacctcctggagctcattgacacaagaacacagattcttgccgcttcctatgaactgcacaagttttaccacgatgccaaggagatctttgggcgtatacaggacaaacacaagaaactccctgaggagcttgggagagatcagaacacagtggagaccttacagagaatgcacactacatttgagcatgacatccaggctctgggcacacaggtgaggcagctgcaggaggatgcagcccgcctccaggcggcctatgcgggtgacaaggccgacgatatccagaagcgcgagaacgaggtcctggaagcctggaagtccctcctggacgcctgtgagagccgcagggtgcggctggtggacacaggggacaagttccgcttcttcagcatggtgcgcgacctcatgctctggatggaggatgtcatccggcagatcgaggcccaggagaagccaagggatgtatcatctgttgaactcttaatgaataatcatcaaggcatcaaagctgaaattgatgcacgtaatgacagtttcacaacctgcattgaacttgggaaatccctgttggcgagaaaacactatgcatctgaggagatcaaggaaaaattactgcagttgacggaaaagaggaaagaaatgatcgacaagtgggaagaccgatgggaatggttaagactgattctggaggtccatcagttctcaagagacgccagtgtggccgaggcctggctgcttggacaggagccgtacctatccagccgagagataggccagagcgtggacgaggtggagaagctcatcaagcgccacgaggcatttgaaaagtctgcagcaacctgggatgagaggttctctgccctggaaaggctgactacattggagttactggaagtgcgcagacagcaagaggaagaggagaggaagaggcggccgccttctcccgagccgagcacgaaggtttcagaggaagccgagtcccagcagcagtgggatacttcaaaaggagaacaagtttcccaaaacggtttgccagctgaacagggatctccacggatggcagaaacggtggacacaagcgaaatggtcaacggcgctacagaacaaaggacgagctctaaagagtccagccccatcccctccccgacctctgatcgtaaagccaagactgccctcccagcccagagtgccgccaccttaccagccagaacccaggagacaccttcggcccagatggaaggcttcctcaatcggaaacacgagtgggaggcccacaataagaaagcctcaagcaggtcctggcacaatgtttattgtgtcataaataaccaagaaatgggtttctacaaagatgcaaagactgctgcttctggaattccctaccacagcgaggtccctgtgagtttgaaagaagctgtctgcgaagtggcccttgattacaaaaagaagaaacacgtattcaagctaagactaaatgatggcaatgagtacctcttccaagccaaagacgatgaggaaatgaacacatggatccaggctatctcttccgccatctcctctgataaacacgaggtgtctgccagcacccagagcacgccagcatccagccgcgcgcagaccctccccaccagcgtcgtcaccatcaccagcgagtccagtcccggcaagcgggaaaaggacaaagagaaagacaaagagaagcggttcagcctttttggcaaaaagaaatgaactcctttccttcacctcctgcccttctcttaccttttcagtgaaattccagcatgcaagctcagaaccaacacattactctctgtgcctaatgttcctcaatgtggttgatttttttttttttttaatttatagagcatttcggggggggtgggggaaacacacctaaacactttatctccaagttacaaaagtttgaggtgcagagggaaggccagattttttttttaatgaaattatatagattagatctcagtatttaaactgttcctcaattttgtgaggctgtgttggaaataacccgcctctagtgctgttggtatgcaaggcagcggtgcttaatcaatatttcctgtgctcaccagaggcaaaatgtaccaatatcctgacaccattctctctccatttacttctggtggttaccctgactcttgactcttagaagtgcccgagatggggctaacctttattaaacagatcgcatattatgatcttgctgcagccacagtgcagctccacattaactctacagaccaaaccatttncccccngcnccccccncncnccccccccatnccnccncnccncccccaccgccatgncngttnanaatncccgtaccccccnnngaaccccnccccganaccntcttaaataacccccccccccnnnnnnnttntntttnnctgaaatacattatattgtacgtttgagataattctagtacaaagtataataaaactagatgtataataaaccctttaaatcattggtaagtgtacaagtggtggaactgaagcatttactggacaaagtaatgttactctaatggttacttgctcgtgcgttgccacactgtgttataatttgcttcatttccttgctatttgatacatagtgtgcatttctctgtcactgtaactattgtaatgacaaattttcatcttactgcacaatcaaaatgacattgataggaatgaactccagaggctgggcctgaacagggaggtggtcgctcaggcctggtgctcagtcgtacgacctgtacctctcaacttttgccctatctgttaaatatatgctatgtcattaaatgcttttaaatcta

SEQ ID NO: 357056 - DNA, 8707 bp, Homo sapiens
gtgagctgaagcagggcagggcatcaactcacccaggaagtgcaaggggtttggggattttcctttcctagccaagggaaggcatgacagactgtacctggaaaaacaggacactcttgcccaaatactgcactttttgcacagtcttagcaactggcagaccaggagattctctcctgtgcctgattcattgggtcccacacccatagggccttgcttactgccagtgcagcagtctgagattaacaccccatccccgggagaactctaagaaggagctgatgtggaggagcagctgagacagttcaagatgacgaccacagtagccacagactatgacaacattgagatccagcagcagtacagtgatgtcaacaaccgctgggatgtcgacgactgggacaatgagaacagctctgcgcggctttttgagcggtcccgcatcaaggctctggcagatgagcgtgaagccgtgcagaagaagaccttcaccaagtgggtcaattcccaccttgcccgtgtgtcctgccggatcacagacctgtacactgaccttcgagatggacggatgctcatcaagctgctggaggtcctctctggagagaggctgcctaaacccaccaagggacgaatgcgcatccactgcttagagaatgtggacaaggcccttcagttcctgaaggagcagagagtccatcttgagaacatggggtcccatgacatcgtggatggaaaccaccggctgacccttggcctcatctggaccatcatcctgcgcttccagatccaggatatcagtgtggaaactgaagacaacaaagagaagaaatctgccaaggatgcattgctgttgtggtgccagatgaagacagctgggtaccccaatgtcaacattcacaatttcaccactagctggagggacggcatggccttcaatgcactgatacacaaacaccggcctgacctgatagattttgacaaactaaagaaatctaacgcacactacaacctgcagaatgcatttaatctggcagaacagcacctcggcctcactaaactgttggaccccgaagacatcagcgtggaccatcctgatgagaagtccataatcacttatgtggtgacttattaccactacttctctaagatgaaggccttagctgttgaaggaaaacgaattggaaaggtgcttgacaatgctattgaaacagaaaaaatgattgaaaagtatgaatcacttgcctctgaccttctggaatggattgaacaaaccatcatcattctgaacaatcgcaaatttgccaattcactggtcggggttcaacagcagcttcaggcattcaacacttaccgcactgtggagaaaccacccaaatttactgagaaggggaacttggaagtgctgctcttcaccattcagagcaagatgagggccaacaaccagaaggtctacatgccccgggaggggaagctcatctctgacatcaacaaggcctgggaaagactggaaaaagcggaacacgaaagagaactggctttgcggaatgagctcataagacaggagaaactggaacagctcgcccgcagatttgatcgcaaggcagctatgagggagacttggctgagcgaaaaccagcgtctggtgtctcaggacaactttgggtttgaccttcctgcagttgaggccgccacaaaaaagcacgaggccattgagacagacattgccgcatacgaggagcgtgtgcaggctgtggtagccgtggccagggagctcgaggccgagaattaccacgacatcaagcgcatcacagcgaggaaggacaatgtcatccggctctgggaatacctactggaactgctcagggcccggagacagcggctcgagatgaacctggggctgcagaagatattccaggaaatgctctacattatggactggatggatgaaatgaaggtgctagtattgtctcaagactatggcaaacacttacttggtgtggaagacctgttacagaagcacaccctggttgaagcagacattggcatccaggcagagcgggtgagaggtgtcaatgcctccgcccagaagttcgcaacagacggggaaggttacaagccctgtgacccccaggtgatccgagaccgcgtggcccacatggagttctgttatcaagagctttgccagctggcggctgagcgcagggcccgtctggaagagtcccgccgcctctggaagttcttctgggagatggcagaagaggaaggctggatacgggagaaggagaagatcctgtcctcggacgattacgggaaagacctgaccagcgtcatgcgcctgctcagcaagcaccgggcgttcgaggacgagatgagcggccgcagtggccactttgagcaggccatcaaggaaggcgaagacatgatcgcggaggagcacttcgggtcggagaagatccgtgagaggatcatttacatccgggagcagtgggccaacctagagcagctctcggccattcggaagaagcgcctggaggaggcctccctgctgcaccagttccaggcagatgctgatgacattgatgcctggatgctggacatcctcaagattgtctccagcagcgacgtgggccacgatgagtattccacacagtctctggtcaagaaacacaaggacgtggcggaagagatcgccaattacaggcccacccttgacacgctgcacgaacaagccagcgccctcccccaggagcatgccgagtctccagacgtgaggggcaggctgtcgggcatcgaggagcggtataaggaggtggcagagctgacgcggctgcggaagcaggcactccaggacactctggccctgtacaagatgttcagcgaggctgatgcctgtgagctctggatcgacgagaaggagcagtggctcaacaacatgcagatcccagagaagctggaggatctggaggtcatccagcacagatttgagagcctagaaccagaaatgaacaaccaggcttcccgggttgcagtggtgaaccagattgcacgccagctgatgcacagcggccacccaagtgagaaggaaatcaaagcccagcaggacaaactcaacacaaggtggagccagttcagagaactggttgacaggaagaaggatgccctcctgtctgccctgagcatccagaactaccacctcgagtgcaatgaaaccaaatcctggattcgggaaaagaccaaggtcatcgagtccacccaggacctgggcaatgacctggctggcgtcatggccctgcagcgcaagctgaccggcatggagcgggacttggtggccattgaggcaaagctgagtgacctgcagaaggaggcggagaagctggagtccgagcaccccgaccaggcccaggccatcctgtctcggctggccgagatcagcgacgtgtgggaggagatgaagaccaccctgaaaaaccgagaggcctccctgggagaggccagcaagctgcagcagttcctacgggacttggacgacttccagtcctggctctctaggacccagacagcgatcgcctcggaggacatgccaaacaccctgaccgaggctgagaagctgctcacgcagcacgagaacatcaagaacgagatcgacaactacgaggaggactaccagaagatgagggacatgggcgagatggtcacccaggggcagaccgatgcccagtacatgtttctgcggcagcggctgcaggccctggacactggatggaacgagctccacaagatgtgggagaacagacaaaatctcctatcccagtcacatgcctaccagcagttcctcagagacacgaagcaagccgaagcctttcttaacaaccaggagtatgttctggctcacactgaaatgcctaccaccttggaaggagctgaagcagcaattaaaaagcaagaggacttcatgaccaccatggacgccaatgaggagaagatcaatgctgtggtggagactggccggaggctggtgagcgatgggaacatcaactcagatcgcatccaggagaaggtggactctattgatgacagacataggaagaatcgtgagacagccagtgaacttttgatgaggttgaaggacaacagggatctacagaaattcctgcaagattgtcaagagctgtctctctggatcaatgagaagatgctcacagcccaggacatgtcttacgatgaagccagaaatctgcacagtaaatggttgaagcatcaagcatttatggcagaacttgcatccaacaaagaatggcttgacaaaatcgagaaggaaggaatgcagctcatttcagaaaagcctgagacggaagctgtggtgaaggagaaactcactggtttacataaaatgtgggaagtccttgaatccactacccagacaaaggcccagcggctctttgatgcaaacaaggccgaacttttcacccagagctgtgcagatctagacaaatggctgcacggcctggagagtcagattcagtctgatgactatggcaaagacctgaccagtgtcaatatcctgctgaaaaagcaacagatgctggagaatcagatggaagtgcggaagaaggagatcgaagagctccaaagccaagcccaggccctgagtcaggaagggaagagcaccgacgaggtagacagcaagcgcctcaccgtgcagaccaagttcatggagttgctggagcccttgaacgagaggaagcataacctgctggcctccaaagagatccatcagttcaacagggatgtggaggacgagatcttgtgggttggagagaggatgcctttggcaacttccacggatcatggccacaacctccagactgtgcagctgttaataaagaaaaatcagaccctccagaaagaaatccaggggcaccagcctcgcattgacgacatctttgagaggagccaaaacatcgtcactgacagcagcagcctcagcgctgaggccatcagacagaggcttgccgacctgaagcagctgtggggtctcctcattgaggagacagagaaacgccacaggcggctggaggaggcgcacagggcccagcagtactactttgacgctgctgaggccgaagcctggatgagcgagcaggagctgtacatgatgtcagaggagaaggccaaggatgagcagagtgctgtctccatgttgaagaagcaccagatcttagaacaagctgtggaggactatgcagagaccgtgcatcagctctccaagaccagccgggccctggtggccgacagccatcctgaaagtgagcgcattagcatgcggcagtccaaagtggataaactgtacgctggtctgaaagaccttgctgaagagagaagaggcaagctggatgagagacacaggttattccagctcaaccgggaggtggacgacctggagcagtggatcgctgagagggaggtggtcgcagggtcccatgaactgggacaggactatgagcatgtcacgatgttacaagaacgattccgggagtttgcccgagacaccgggaacattgggcaggagcgcgtggacacggtcaatcacctggcagatgagctcatcaactctggacattcagatgccgccaccatcgctgaatggaaggatggcctcaatgaagcctgggccgacctcctggagctcattgacacaagaacacagattcttgccgcttcctatgaactgcacaagttttaccacgatgccaaggagatctttgggcgtatacaggacaaacacaagaaactccctgaggagcttgggagagatcagaacacagtggagaccttacagagaatgcacactacatttgagcatgacatccaggctctgggcacacaggtgaggcagctgcaggaggatgcagcccgcctccaggcggcctatgcgggtgacaaggccgacgatatccagaagcgcgagaacgaggtcctggaagcctggaagtccctcctggacgcctgtgagagccgcagggtgcggctggtggacacaggggacaagttccgcttcttcagcatggtgcgcgacctcatgctctggatggaggatgtcatccggcagatcgaggcccaggagaagccaagggatgtatcatctgttgaactcttaatgaataatcatcaaggcatcaaagctgaaattgatgcacgtaatgacagtttcacaacctgcattgaacttgggaaatccctgttggcgagaaaacactatgcatctgaggagatcaaggaaaaattactgcagttgacggaaaagaggaaagaaatgatcgacaagtgggaagaccgatgggaatggttaagactgattctggaggtccatcagttctcaagagacgccagtgtggccgaggcctggctgcttggacaggagccgtacctatccagccgagagataggccagagcgtggacgaggtggagaagctcatcaagcgccacgaggcatttgaaaagtctgcagcaacctgggatgagaggttctctgccctggaaaggctgactacattggagttactggaagtgcgcagacagcaagaggaagaggagaggaagaggcggccgccttctcccgagccgagcacgaaggtttcagaggaagccgagtcccagcagcagtgggatacttcaaaaggagaacaagtttcccaaaacggtttgccagctgaacagggatctccacggatggcagaaacggtggacacaagcgaaatggtcaacggcgctacagaacaaaggacgagctctaaagagtccagccccatcccctccccgacctctgatcgtaaagccaagactgccctcccagcccagagtgccgccaccttaccagccagaacccaggagacaccttcggcccagatggaaggcttcctcaatcggaaacacgagtgggaggcccacaataagaaagcctcaagcaggtcctggcacaatgtttattgtgtcataaataaccaagaaatgggtttctacaaagatgcaaagactgctgcttctggaattccctaccacagcgaggtccctgtgagtttgaaagaagctgtctgcgaagtggcccttgattacaaaaagaagaaacacgtattcaagctaagactaaatgatggcaatgagtacctcttccaagccaaagacgatgaggaaatgaacacatggatccaggctatctcttccgccatctcctctgataaacacgaggtgtctgccagcacccagagcacgccagcatccagccgcgcgcagaccctccccaccagcgtcgtcaccatcaccagcgagtccagtcccggcaagcgggaaaaggacaaagagaaagacaaagagaagcggttcagcctttttggcaaaaagaaatgaactcctttccttcacctcctgcccttctcttaccttttcagtgaaattccagcatgcaagctcagaaccaacacattactctctgtgcctaatgttcctcaatgtggttgatttttttttttttttaatttatagagcatttcggggggggtgggggaaacacacctaaacactttatctccaagttacaaaagtttgaggtgcagagggaaggccagattttttttttaatgaaattatatagattagatctcagtatttaaactgttcctcaattttgtgaggctgtgttggaaataacccgcctctagtgctgttggtatgcaaggcagcggtgcttaatcaatatttcctgtgctcaccagaggcaaaatgtaccaatatcctgacaccattctctctccatttacttctggtggttaccctgactcttgactcttagaagtgcccgagatggggctaacctttattaaacagatcgcatattatgatcttgctgcagccacagtgcagctccacattaactctacagaccaaaccatttgtatctggcatcacttactaacacacgacatgcggcttttctgcatcaactgctatgacggttaagaatgtcagtatacaagaaggaatagaaaactgatactgttttaaataatctgtaatttcaattttttttttttttgctgaaatacattatattgtacgtttgagataattctagtacaaagtataataaaactagatgtataataaaccctttaaatcattggtaagtgtacaagtggtggaactgaagcatttactggacaaagtaatgttactctaatggttacttgctcgtgcgttgccacactgtgttataatttgcttcatttccttgctatttgatacatagtgtgcatttctctgtcactgtaactattgtaatgacaaattttcatcttactgcacaatcaaaatgacattgatgtttaagaggttaataaccataatattaaaggattaattataaacacctggcaaaaaaccacatcatcccttttcaaaaataaaatgttcatattcctctgagcaaacatcacaagagcagtggccatctgcctcaggcctgccttgtctgtaaacagctgtaaaggaaagctagcacagcgccagggacacatgagctcccaggagggcacagctgtccttccctttcagctttccaaacatgagcacagaaggtgtctagtctgggtgaccaaagctcaaccctggcagcacggtcaacacatctcttgcctctttttcacatactac

SEQ ID NO: 357057 - DNA, 8432 bp, Homo sapiens
  misc_feature (7896)..(7896): n is a, c, g, or t
  misc_feature (7912)..(7912): n is a, c, g, or t
  misc_feature (7917)..(7917): n is a, c, g, or t
  misc_feature (7938)..(7938): n is a, c, g, or t
  misc_feature (7957)..(7957): n is a, c, g, or t
  misc_feature (7985)..(7985): n is a, c, g, or t
  misc_feature (7994)..(7995): n is a, c, g, or t
  misc_feature (8049)..(8049): n is a, c, g, or t
  misc_feature (8061)..(8061): n is a, c, g, or t
  misc_feature (8073)..(8073): n is a, c, g, or t
  misc_feature (8081)..(8081): n is a, c, g, or t
  misc_feature (8092)..(8092): n is a, c, g, or t
  misc_feature (8104)..(8104): n is a, c, g, or t
  misc_feature (8384)..(8384): n is a, c, g, or t
  misc_feature (8429)..(8429): n is a, c, g, or t
gtgagctgaagcagggcagggcatcaactcacccaggaagtgcaaggggtttggggattttcctttcctagccaagggaaggcatgacagactgtacctggaaaaacaggacactcttgcccaaatactgcactttttgcacagtcttagcaactggcagaccaggagattctctcctgtgcctgattcattgggtcccacacccatagggccttgcttactgccagtgcagcagtctgagattaacaccccatccccgggagaactctaagaaggagctgatgtggaggagcagctgagacagttcaagatgacgaccacagtagccacagactatgacaacattgagatccagcagcagtacagtgatgtcaacaaccgctgggatgtcgacgactgggacaatgagaacagctctgcgcggctttttgagcggtcccgcatcaaggctctggcagatgagcgtgaagccgtgcagaagaagaccttcaccaagtgggtcaattcccaccttgcccgtgtgtcctgccggatcacagacctgtacactgaccttcgagatggacggatgctcatcaagctgctggaggtcctctctggagagaggctgcctaaacccaccaagggacgaatgcgcatccactgcttagagaatgtggacaaggcccttcagttcctgaaggagcagagagtccatcttgagaacatggggtcccatgacatcgtggatggaaaccaccggctgacccttggcctcatctggaccatcatcctgcgcttccagatccaggatatcagtgtggaaactgaagacaacaaagagaagaaatctgccaaggatgcattgctgttgtggtgccagatgaagacagctgggtaccccaatgtcaacattcacaatttcaccactagctggagggacggcatggccttcaatgcactgatacacaaacaccggcctgacctgatagattttgacaaactaaagaaatctaacgcacactacaacctgcagaatgcatttaatctggcagaacagcacctcggcctcactaaactgttggaccccgaagacatcagcgtggaccatcctgatgagaagtccataatcacttatgtggtgacttattaccactacttctctaagatgaaggccttagctgttgaaggaaaacgaattggaaaggtgcttgacaatgctattgaaacagaaaaaatgattgaaaagtatgaatcacttgcctctgaccttctggaatggattgaacaaaccatcatcattctgaacaatcgcaaatttgccaattcactggtcggggttcaacagcagcttcaggcattcaacacttaccgcactgtggagaaaccacccaaatttactgagaaggggaacttggaagtgctgctcttcaccattcagagcaagatgagggccaacaaccagaaggtctacatgccccgggaggggaagctcatctctgacatcaacaaggcctgggaaagactggaaaaagcggaacacgaaagagaactggctttgcggaatgagctcataagacaggagaaactggaacagctcgcccgcagatttgatcgcaaggcagctatgagggagacttggctgagcgaaaaccagcgtctggtgtctcaggacaactttgggtttgaccttcctgcagttgaggccgccacaaaaaagcacgaggccattgagacagacattgccgcatacgaggagcgtgtgcaggctgtggtagccgtggccagggagctcgaggccgagaattaccacgacatcaagcgcatcacagcgaggaaggacaatgtcatccggctctgggaatacctactggaactgctcagggcccggagacagcggctcgagatgaacctggggctgcagaagatattccaggaaatgctctacattatggactggatggatgaaatgaaggtgctagtattgtctcaagactatggcaaacacttacttggtgtggaagacctgttacagaagcacaccctggttgaagcagacattggcatccaggcagagcgggtgagaggtgtcaatgcctccgcccagaagttcgcaacagacggggaaggttacaagccctgtgacccccaggtgatccgagaccgcgtggcccacatggagttctgttatcaagagctttgccagctggcggctgagcgcagggcccgtctggaagagtcccgccgcctctggaagttcttctgggagatggcagaagaggaaggctggatacgggagaaggagaagatcctgtcctcggacgattacgggaaagacctgaccagcgtcatgcgcctgctcagcaagcaccgggcgttcgaggacgagatgagcggccgcagtggccactttgagcaggccatcaaggaaggcgaagacatgatcgcggaggagcacttcgggtcggagaagatccgtgagaggatcatttacatccgggagcagtgggccaacctagagcagctctcggccattcggaagaagcgcctggaggaggcctccctgctgcaccagttccaggcagatgctgatgacattgatgcctggatgctggacatcctcaagattgtctccagcagcgacgtgggccacgatgagtattccacacagtctctggtcaagaaacacaaggacgtggcggaagagatcgccaattacaggcccacccttgacacgctgcacgaacaagccagcgccctcccccaggagcatgccgagtctccagacgtgaggggcaggctgtcgggcatcgaggagcggtataaggaggtggcagagctgacgcggctgcggaagcaggcactccaggacactctggccctgtacaagatgttcagcgaggctgatgcctgtgagctctggatcgacgagaaggagcagtggctcaacaacatgcagatcccagagaagctggaggatctggaggtcatccagcacagatttgagagcctagaaccagaaatgaacaaccaggcttcccgggttgcagtggtgaaccagattgcacgccagctgatgcacagcggccacccaagtgagaaggaaatcaaagcccagcaggacaaactcaacacaaggtggagccagttcagagaactggttgacaggaagaaggatgccctcctgtctgccctgagcatccagaactaccacctcgagtgcaatgaaaccaaatcctggattcgggaaaagaccaaggtcatcgagtccacccaggacctgggcaatgacctggctggcgtcatggccctgcagcgcaagctgaccggcatggagcgggacttggtggccattgaggcaaagctgagtgacctgcagaaggaggcggagaagctggagtccgagcaccccgaccaggcccaggccatcctgtctcggctggccgagatcagcgacgtgtgggaggagatgaagaccaccctgaaaaaccgagaggcctccctgggagaggccagcaagctgcagcagttcctacgggacttggacgacttccagtcctggctctctaggacccagacagcgatcgcctcggaggacatgccaaacaccctgaccgaggctgagaagctgctcacgcagcacgagaacatcaagaacgagatcgacaactacgaggaggactaccagaagatgagggacatgggcgagatggtcacccaggggcagaccgatgcccagtacatgtttctgcggcagcggctgcaggccctggacactggatggaacgagctccacaagatgtgggagaacagacaaaatctcctatcccagtcacatgcctaccagcagttcctcagagacacgaagcaagccgaagcctttcttaacaaccaggagtatgttctggctcacactgaaatgcctaccaccttggaaggagctgaagcagcaattaaaaagcaagaggacttcatgaccaccatggacgccaatgaggagaagatcaatgctgtggtggagactggccggaggctggtgagcgatgggaacatcaactcagatcgcatccaggagaaggtggactctattgatgacagacataggaagaatcgtgagacagccagtgaacttttgatgaggttgaaggacaacagggatctacagaaattcctgcaagattgtcaagagctgtctctctggatcaatgagaagatgctcacagcccaggacatgtcttacgatgaagccagaaatctgcacagtaaatggttgaagcatcaagcatttatggcagaacttgcatccaacaaagaatggcttgacaaaatcgagaaggaaggaatgcagctcatttcagaaaagcctgagacggaagctgtggtgaaggagaaactcactggtttacataaaatgtgggaagtccttgaatccactacccagacaaaggcccagcggctctttgatgcaaacaaggccgaacttttcacccagagctgtgcagatctagacaaatggctgcacggcctggagagtcagattcagtctgatgactatggcaaagacctgaccagtgtcaatatcctgctgaaaaagcaacagatgctggagaatcagatggaagtgcggaagaaggagatcgaagagctccaaagccaagcccaggccctgagtcaggaagggaagagcaccgacgaggtagacagcaagcgcctcaccgtgcagaccaagttcatggagttgctggagcccttgaacgagaggaagcataacctgctggcctccaaagagatccatcagttcaacagggatgtggaggacgagatcttgtgggttggagagaggatgcctttggcaacttccacggatcatggccacaacctccagactgtgcagctgttaataaagaaaaatcagaccctccagaaagaaatccaggggcaccagcctcgcattgacgacatctttgagaggagccaaaacatcgtcactgacagcagcagcctcagcgctgaggccatcagacagaggcttgccgacctgaagcagctgtggggtctcctcattgaggagacagagaaacgccacaggcggctggaggaggcgcacagggcccagcagtactactttgacgctgctgaggccgaagcctggatgagcgagcaggagctgtacatgatgtcagaggagaaggccaaggatgagcagagtgctgtctccatgttgaagaagcaccagatcttagaacaagctgtggaggactatgcagagaccgtgcatcagctctccaagaccagccgggccctggtggccgacagccatcctgaaagtgagcgcattagcatgcggcagtccaaagtggataaactgtacgctggtctgaaagaccttgctgaagagagaagaggcaagctggatgagagacacaggttattccagctcaaccgggaggtggacgacctggagcagtggatcgctgagagggaggtggtcgcagggtcccatgaactgggacaggactatgagcatgtcacgatgttacaagaacgattccgggagtttgcccgagacaccgggaacattgggcaggagcgcgtggacacggtcaatcacctggcagatgagctcatcaactctggacattcagatgccgccaccatcgctgaatggaaggatggcctcaatgaagcctgggccgacctcctggagctcattgacacaagaacacagattcttgccgcttcctatgaactgcacaagttttaccacgatgccaaggagatctttgggcgtatacaggacaaacacaagaaactccctgaggagcttgggagagatcagaacacagtggagaccttacagagaatgcacactacatttgagcatgacatccaggctctgggcacacaggtgaggcagctgcaggaggatgcagcccgcctccaggcggcctatgcgggtgacaaggccgacgatatccagaagcgcgagaacgaggtcctggaagcctggaagtccctcctggacgcctgtgagagccgcagggtgcggctggtggacacaggggacaagttccgcttcttcagcatggtgcgcgacctcatgctctggatggaggatgtcatccggcagatcgaggcccaggagaagccaagggatgtatcatctgttgaactcttaatgaataatcatcaaggcatcaaagctgaaattgatgcacgtaatgacagtttcacaacctgcattgaacttgggaaatccctgttggcgagaaaacactatgcatctgaggagatcaaggaaaaattactgcagttgacggaaaagaggaaagaaatgatcgacaagtgggaagaccgatgggaatggttaagactgattctggaggtccatcagttctcaagagacgccagtgtggccgaggcctggctgcttggacaggagccgtacctatccagccgagagataggccagagcgtggacgaggtggagaagctcatcaagcgccacgaggcatttgaaaagtctgcagcaacctgggatgagaggttctctgccctggaaaggctgactacattggagttactggaagtgcgcagacagcaagaggaagaggagaggaagaggcggccgccttctcccgagccgagcacgaaggtttcagaggaagccgagtcccagcagcagtgggatacttcaaaaggagaacaagtttcccaaaacggtttgccagctgaacagggatctccacggatggcagaaacggtggacacaagcgaaatggtcaacggcgctacagaacaaaggacgagctctaaagagtccagccccatcccctccccgacctctgatcgtaaagccaagactgccctcccagcccagagtgccgccaccttaccagccagaacccaggagacaccttcggcccagatggaaggcttcctcaatcggaaacacgagtgggaggcccacaataagaaagcctcaagcaggtcctggcacaatgtttattgtgtcataaataaccaagaaatgggtttctacaaagatgcaaagactgctgcttctggaattccctaccacagcgaggtccctgtgagtttgaaagaagctgtctgcgaagtggcccttgattacaaaaagaagaaacacgtattcaagctaagactaaatgatggcaatgagtacctcttccaagccaaagacgatgaggaaatgaacacatggatccaggctatctcttccgccatctcctctgataaacacgaggtgtctgccagcacccagagcacgccagcatccagccgcgcgcagaccctccccaccagcgtcgtcaccatcaccagcgagtccagtcccggcaagcgggaaaaggacaaagagaaagacaaagagaagcggttcagcctttttggcaaaaagaaatgaactcctttccttcacctcctgcccttctcttaccttttcagtgaaattccagcatgcaagctcagaaccaacacattactctctgtgcctaatgttcctcaatgtggttgatttttttttttttttaatttatagagcatttcggggggggtgggggaaacacacctaaacactttatctccaagttacaaaagtttgaggtgcagagggaaggccagattttttttttaatgaaattatatagattagatctcagtatttaaactgttcctcaattttgtgaggctgtgttggaaataacccgcctctagtgctgttggtatgcaaggcagcggtgcttaatcaatatttcctgtgctcaccagaggcaaaatgtaccaatatcctgacaccattctctctccatttacttctggtggttaccctgactcttgactcttagaagtgcccgagatggggctaacctttattaaacagatcgcccatcccgnccctcccgccgccccngcgcngcgcccccctcccccccccgncccccccctttgcccccgnccccccccccccccccccgacatgcggnggttctgcnncaaccgctacgccggttaagaacccccgtgtacgagaaggaatagaaaactgcnggcggggtaaanaacccccccccncggggggnttttttttttngctgaaacacantatattcgtacgctttgagataatctctagtagcacaagtataaaaaactagatgtataataaaccctttaaatcattggtaagtgtacaagtggtggaactgaagcatttactggacaaagtaatgttactctaatggttacttgctcgtgcgttgccacactgtgttataatttgcttcatttccttgctatttgatacatagtgtgcatttctctgtcactgtaactattgtaatgacaaattttcatcttactgcacaatcaaaatgacgagtganaggaatgaaccccagaggcggggccagaacagtgagggggtcgcncag

SEQ ID NO: 357058 - DNA, 7823 bp, Homo sapiens
gtgagctgaagcagggcagggcatcaactcacccaggaagtgcaaggggtttggggattttcctttcctagccaagggaaggcatgacagactgtacctggaaaaacaggacactcttgcccaaatactgcactttttgcacagtcttagcaactggcagaccaggagattctctcctgtgcctgattcattgggtcccacacccatagggccttgcttactgccagtgcagcagtctgagattaacaccccatccccgggagaactctaagaaggagctgatgtggaggagcagctgagacagttcaagatgacgaccacagtagccacagactatgacaacattgagatccagcagcagtacagtgatgtcaacaaccgctgggatgtcgacgactgggacaatgagaacagctctgcgcggctttttgagcggtcccgcatcaaggctctggcagatgagcgtgaagccgtgcagaagaagaccttcaccaagtgggtcaattcccaccttgcccgtgtgtcctgccggatcacagacctgtacactgaccttcgagatggacggatgctcatcaagctgctggaggtcctctctggagagaggctgcctaaacccaccaagggacgaatgcgcatccactgcttagagaatgtggacaaggcccttcagttcctgaaggagcagagagtccatcttgagaacatggggtcccatgacatcgtggatggaaaccaccggctgacccttggcctcatctggaccatcatcctgcgcttccagatccaggatatcagtgtggaaactgaagacaacaaagagaagaaatctgccaaggatgcattgctgttgtggtgccagatgaagacagctgggtaccccaatgtcaacattcacaatttcaccactagctggagggacggcatggccttcaatgcactgatacacaaacaccggcctgacctgatagattttgacaaactaaagaaatctaacgcacactacaacctgcagaatgcatttaatctggcagaacagcacctcggcctcactaaactgttggaccccgaagacatcagcgtggaccatcctgatgagaagtccataatcacttatgtggtgacttattaccactacttctctaagatgaaggccttagctgttgaaggaaaacgaattggaaaggtgcttgacaatgctattgaaacagaaaaaatgattgaaaagtatgaatcacttgcctctgaccttctggaatggattgaacaaaccatcatcattctgaacaatcgcaaatttgccaattcactggtcggggttcaacagcagcttcaggcattcaacacttaccgcactgtggagaaaccacccaaatttactgagaaggggaacttggaagtgctgctcttcaccattcagagcaagatgagggccaacaaccagaaggtctacatgccccgggaggggaagctcatctctgacatcaacaaggcctgggaaagactggaaaaagcggaacacgaaagagaactggctttgcggaatgagctcataagacaggagaaactggaacagctcgcccgcagatttgatcgcaaggcagctatgagggagacttggctgagcgaaaaccagcgtctggtgtctcaggacaactttgggtttgaccttcctgcagttgaggccgccacaaaaaagcacgaggccattgagacagacattgccgcatacgaggagcgtgtgcaggctgtggtagccgtggccagggagctcgaggccgagaattaccacgacatcaagcgcatcacagcgaggaaggacaatgtcatccggctctgggaatacctactggaactgctcagggcccggagacagcggctcgagatgaacctggggctgcagaagatattccaggaaatgctctacattatggactggatggatgaaatgaaggtgctagtattgtctcaagactatggcaaacacttacttggtgtggaagacctgttacagaagcacaccctggttgaagcagacattggcatccaggcagagcgggtgagaggtgtcaatgcctccgcccagaagttcgcaacagacggggaaggttacaagccctgtgacccccaggtgatccgagaccgcgtggcccacatggagttctgttatcaagagctttgccagctggcggctgagcgcagggcccgtctggaagagtcccgccgcctctggaagttcttctgggagatggcagaagaggaaggctggatacgggagaaggagaagatcctgtcctcggacgattacgggaaagacctgaccagcgtcatgcgcctgctcagcaagcaccgggcgttcgaggacgagatgagcggccgcagtggccactttgagcaggccatcaaggaaggcgaagacatgatcgcggaggagcacttcgggtcggagaagatccgtgagaggatcatttacatccgggagcagtgggccaacctagagcagctctcggccattcggaagaagcgcctggaggaggcctccctgctgcaccagttccaggcagatgctgatgacattgatgcctggatgctggacatcctcaagattgtctccagcagcgacgtgggccacgatgagtattccacacagtctctggtcaagaaacacaaggacgtggcggaagagatcgccaattacaggcccacccttgacacgctgcacgaacaagccagcgccctcccccaggagcatgccgagtctccagacgtgaggggcaggctgtcgggcatcgaggagcggtataaggaggtggcagagctgacgcggctgcggaagcaggcactccaggacactctggccctgtacaagatgttcagcgaggctgatgcctgtgagctctggatcgacgagaaggagcagtggctcaacaacatgcagatcccagagaagctggaggatctggaggtcatccagcacagatttgagagcctagaaccagaaatgaacaaccaggcttcccgggttgcagtggtgaaccagattgcacgccagctgatgcacagcggccacccaagtgagaaggaaatcaaagcccagcaggacaaactcaacacaaggtggagccagttcagagaactggttgacaggaagaaggatgccctcctgtctgccctgagcatccagaactaccacctcgagtgcaatgaaaccaaatcctggattcgggaaaagaccaaggtcatcgagtccacccaggacctgggcaatgacctggctggcgtcatggccctgcagcgcaagctgaccggcatggagcgggacttggtggccattgaggcaaagctgagtgacctgcagaaggaggcggagaagctggagtccgagcaccccgaccaggcccaggccatcctgtctcggctggccgagatcagcgacgtgtgggaggagatgaagaccaccctgaaaaaccgagaggcctccctgggagaggccagcaagctgcagcagttcctacgggacttggacgacttccagtcctggctctctaggacccagacagcgatcgcctcggaggacatgccaaacaccctgaccgaggctgagaagctgctcacgcagcacgagaacatcaagaacgagatcgacaactacgaggaggactaccagaagatgagggacatgggcgagatggtcacccaggggcagaccgatgcccagtacatgtttctgcggcagcggctgcaggccctggacactggatggaacgagctccacaagatgtgggagaacagacaaaatctcctatcccagtcacatgcctaccagcagttcctcagagacacgaagcaagccgaagcctttcttaacaaccaggagtatgttctggctcacactgaaatgcctaccaccttggaaggagctgaagcagcaattaaaaagcaagaggacttcatgaccaccatggacgccaatgaggagaagatcaatgctgtggtggagactggccggaggctggtgagcgatgggaacatcaactcagatcgcatccaggagaaggtggactctattgatgacagacataggaagaatcgtgagacagccagtgaacttttgatgaggttgaaggacaacagggatctacagaaattcctgcaagattgtcaagagctgtctctctggatcaatgagaagatgctcacagcccaggacatgtcttacgatgaagccagaaatctgcacagtaaatggttgaagcatcaagcatttatggcagaacttgcatccaacaaagaatggcttgacaaaatcgagaaggaaggaatgcagctcatttcagaaaagcctgagacggaagctgtggtgaaggagaaactcactggtttacataaaatgtgggaagtccttgaatccactacccagacaaaggcccagcggctctttgatgcaaacaaggccgaacttttcacccagagctgtgcagatctagacaaatggctgcacggcctggagagtcagattcagtctgatgactatggcaaagacctgaccagtgtcaatatcctgctgaaaaagcaacagatgctggagaatcagatggaagtgcggaagaaggagatcgaagagctccaaagccaagcccaggccctgagtcaggaagggaagagcaccgacgaggtagacagcaagcgcctcaccgtgcagaccaagttcatggagttgctggagcccttgaacgagaggaagcataacctgctggcctccaaagagatccatcagttcaacagggatgtggaggacgagatcttgtgggttggagagaggatgcctttggcaacttccacggatcatggccacaacctccagactgtgcagctgttaataaagaaaaatcagaccctccagaaagaaatccaggggcaccagcctcgcattgacgacatctttgagaggagccaaaacatcgtcactgacagcagcagcctcagcgctgaggccatcagacagaggcttgccgacctgaagcagctgtggggtctcctcattgaggagacagagaaacgccacaggcggctggaggaggcgcacagggcccagcagtactactttgacgctgctgaggccgaagcctggatgagcgagcaggagctgtacatgatgtcagaggagaaggccaaggatgagcagagtgctgtctccatgttgaagaagcaccagatcttagaacaagctgtggaggactatgcagagaccgtgcatcagctctccaagaccagccgggccctggtggccgacagccatcctgaaagtgagcgcattagcatgcggcagtccaaagtggataaactgtacgctggtctgaaagaccttgctgaagagagaagaggcaagctggatgagagacacaggttattccagctcaaccgggaggtggacgacctggagcagtggatcgctgagagggaggtggtcgcagggtcccatgaactgggacaggactatgagcatgtcacgatgttacaagaacgattccgggagtttgcccgagacaccgggaacattgggcaggagcgcgtggacacggtcaatcacctggcagatgagctcatcaactctggacattcagatgccgccaccatcgctgaatggaaggatggcctcaatgaagcctgggccgacctcctggagctcattgacacaagaacacagattcttgccgcttcctatgaactgcacaagttttaccacgatgccaaggagatctttgggcgtatacaggacaaacacaagaaactccctgaggagcttgggagagatcagaacacagtggagaccttacagagaatgcacactacatttgagcatgacatccaggctctgggcacacaggtgaggcagctgcaggaggatgcagcccgcctccaggcggcctatgcgggtgacaaggccgacgatatccagaagcgcgagaacgaggtcctggaagcctggaagtccctcctggacgcctgtgagagccgcagggtgcggctggtggacacaggggacaagttccgcttcttcagcatggtgcgcgacctcatgctctggatggaggatgtcatccggcagatcgaggcccaggagaagccaagggatgtatcatctgttgaactcttaatgaataatcatcaaggcatcaaagctgaaattgatgcacgtaatgacagtttcacaacctgcattgaacttgggaaatccctgttggcgagaaaacactatgcatctgaggagatcaaggaaaaattactgcagttgacggaaaagaggaaagaaatgatcgacaagtgggaagaccgatgggaatggttaagactgattctggaggtccatcagttctcaagagacgccagtgtggccgaggcctggctgcttggacaggagccgtacctatccagccgagagataggccagagcgtggacgaggtggagaagctcatcaagcgccacgaggcatttgaaaagtctgcagcaacctgggatgagaggttctctgccctggaaaggctgactacattggagttactggaagtgcgcagacagcaagaggaagaggagaggaagaggcggccgccttctcccgagccgagcacgaaggtttcagaggaagccgagtcccagcagcagtgggatacttcaaaaggagaacaagtttcccaaaacggtttgccagctgaacagggatctccacggatggcagaaacggtggacacaagcgaaatggtcaacggcgctacagaacaaaggacgagctctaaagagtccagccccatcccctccccgacctctgatcgtaaagccaagactgccctcccagcccagagtgccgccaccttaccagccagaacccaggagacaccttcggcccagatggaaggcttcctcaatcggaaacacgagtgggaggcccacaataagaaagcctcaagcaggtcctggcacaatgtttattgtgtcataaataaccaagaaatgggtttctacaaagatgcaaagactgctgcttctggaattccctaccacagcgaggtccctgtgagtttgaaagaagctgtctgcgaagtggcccttgattacaaaaagaagaaacacgtattcaagctaagactaaatgatggcaatgagtacctcttccaagccaaagacgatgaggaaatgaacacatggatccaggctatctcttccgccatctcctctgataaacacgaggtgtctgccagcacccagagcacgccagcatccagccgcgcgcagaccctccccaccagcgtcgtcaccatcaccagcgagtccagtcccggcaagcgggaaaaggacaaagagaaagacaaagagaagcggttcagcctttttggcaaaaagaaatgaactcctttccttcacctcctgcccttctcttaccttttcagtgaaattccagcatgcaagctcagaaccaacacattactctctgtgcctaatgttcctcaatgtggttgatttttttttttttttaatttatagagcatttcggggggggtgggggaaacacacctaaacactttatctccaagttacaaaagtttgaggtgcagagggaaggccagattttttttttaatgaaattatatagattagatctcagtatttaaactgttcctcaattttgtgaggctgtgttggaaataacccgcctctagtgctgttggtatgcaaggcagcggtgcttaatcaatatttcctgtgctcaccagaggcaaaatgtaccaatatcctgacaccgaatggcacccagtatggcccgcag

SEQ ID NO: 357059 - DNA, 8426 bp, Homo sapiens
gtgagctgaagcagggcagggcatcaactcacccaggaagtgcaaggggtttggggattttcctttcctagccaagggaaggcatgacagactgtacctggaaaaacaggacactcttgcccaaatactgcactttttgcacagtcttagcaactggcagaccaggagattctctcctgtgcctgattcattgggtcccacacccatagggccttgcttactgccagtgcagcagtctgagattaacaccccatccccgggagaactctaagaaggagctgatgtggaggagcagctgagacagttcaagatgacgaccacagtagccacagactatgacaacattgagatccagcagcagtacagtgatgtcaacaaccgctgggatgtcgacgactgggacaatgagaacagctctgcgcggctttttgagcggtcccgcatcaaggctctggcagatgagcgtgaagccgtgcagaagaagaccttcaccaagtgggtcaattcccaccttgcccgtgtgtcctgccggatcacagacctgtacactgaccttcgagatggacggatgctcatcaagctgctggaggtcctctctggagagaggctgcctaaacccaccaagggacgaatgcgcatccactgcttagagaatgtggacaaggcccttcagttcctgaaggagcagagagtccatcttgagaacatggggtcccatgacatcgtggatggaaaccaccggctgacccttggcctcatctggaccatcatcctgcgcttccagatccaggatatcagtgtggaaactgaagacaacaaagagaagaaatctgccaaggatgcattgctgttgtggtgccagatgaagacagctgggtaccccaatgtcaacattcacaatttcaccactagctggagggacggcatggccttcaatgcactgatacacaaacaccggcctgacctgatagattttgacaaactaaagaaatctaacgcacactacaacctgcagaatgcatttaatctggcagaacagcacctcggcctcactaaactgttggaccccgaagacatcagcgtggaccatcctgatgagaagtccataatcacttatgtggtgacttattaccactacttctctaagatgaaggccttagctgttgaaggaaaacgaattggaaaggtgcttgacaatgctattgaaacagaaaaaatgattgaaaagtatgaatcacttgcctctgaccttctggaatggattgaacaaaccatcatcattctgaacaatcgcaaatttgccaattcactggtcggggttcaacagcagcttcaggcattcaacacttaccgcactgtggagaaaccacccaaatttactgagaaggggaacttggaagtgctgctcttcaccattcagagcaagatgagggccaacaaccagaaggtctacatgccccgggaggggaagctcatctctgacatcaacaaggcctgggaaagactggaaaaagcggaacacgaaagagaactggctttgcggaatgagctcataagacaggagaaactggaacagctcgcccgcagatttgatcgcaaggcagctatgagggagacttggctgagcgaaaaccagcgtctggtgtctcaggacaactttgggtttgaccttcctgcagttgaggccgccacaaaaaagcacgaggccattgagacagacattgccgcatacgaggagcgtgtgcaggctgtggtagccgtggccagggagctcgaggccgagaattaccacgacatcaagcgcatcacagcgaggaaggacaatgtcatccggctctgggaatacctactggaactgctcagggcccggagacagcggctcgagatgaacctggggctgcagaagatattccaggaaatgctctacattatggactggatggatgaaatgaaggtgctagtattgtctcaagactatggcaaacacttacttggtgtggaagacctgttacagaagcacaccctggttgaagcagacattggcatccaggcagagcgggtgagaggtgtcaatgcctccgcccagaagttcgcaacagacggggaaggttacaagccctgtgacccccaggtgatccgagaccgcgtggcccacatggagttctgttatcaagagctttgccagctggcggctgagcgcagggcccgtctggaagagtcccgccgcctctggaagttcttctgggagatggcagaagaggaaggctggatacgggagaaggagaagatcctgtcctcggacgattacgggaaagacctgaccagcgtcatgcgcctgctcagcaagcaccgggcgttcgaggacgagatgagcggccgcagtggccactttgagcaggccatcaaggaaggcgaagacatgatcgcggaggagcacttcgggtcggagaagatccgtgagaggatcatttacatccgggagcagtgggccaacctagagcagctctcggccattcggaagaagcgcctggaggaggcctccctgctgcaccagttccaggcagatgctgatgacattgatgcctggatgctggacatcctcaagattgtctccagcagcgacgtgggccacgatgagtattccacacagtctctggtcaagaaacacaaggacgtggcggaagagatcgccaattacaggcccacccttgacacgctgcacgaacaagccagcgccctcccccaggagcatgccgagtctccagacgtgaggggcaggctgtcgggcatcgaggagcggtataaggaggtggcagagctgacgcggctgcggaagcaggcactccaggacactctggccctgtacaagatgttcagcgaggctgatgcctgtgagctctggatcgacgagaaggagcagtggctcaacaacatgcagatcccagagaagctggaggatctggaggtcatccagcacagatttgagagcctagaaccagaaatgaacaaccaggcttcccgggttgcagtggtgaaccagattgcacgccagctgatgcacagcggccacccaagtgagaaggaaatcaaagcccagcaggacaaactcaacacaaggtggagccagttcagagaactggttgacaggaagaaggatgccctcctgtctgccctgagcatccagaactaccacctcgagtgcaatgaaaccaaatcctggattcgggaaaagaccaaggtcatcgagtccacccaggacctgggcaatgacctggctggcgtcatggccctgcagcgcaagctgaccggcatggagcgggacttggtggccattgaggcaaagctgagtgacctgcagaaggaggcggagaagctggagtccgagcaccccgaccaggcccaggccatcctgtctcggctggccgagatcagcgacgtgtgggaggagatgaagaccaccctgaaaaaccgagaggcctccctgggagaggccagcaagctgcagcagttcctacgggacttggacgacttccagtcctggctctctaggacccagacagcgatcgcctcggaggacatgccaaacaccctgaccgaggctgagaagctgctcacgcagcacgagaacatcaagaacgagatcgacaactacgaggaggactaccagaagatgagggacatgggcgagatggtcacccaggggcagaccgatgcccagtacatgtttctgcggcagcggctgcaggccctggacactggatggaacgagctccacaagatgtgggagaacagacaaaatctcctatcccagtcacatgcctaccagcagttcctcagagacacgaagcaagccgaagcctttcttaacaaccaggagtatgttctggctcacactgaaatgcctaccaccttggaaggagctgaagcagcaattaaaaagcaagaggacttcatgaccaccatggacgccaatgaggagaagatcaatgctgtggtggagactggccggaggctggtgagcgatgggaacatcaactcagatcgcatccaggagaaggtggactctattgatgacagacataggaagaatcgtgagacagccagtgaacttttgatgaggttgaaggacaacagggatctacagaaattcctgcaagattgtcaagagctgtctctctggatcaatgagaagatgctcacagcccaggacatgtcttacgatgaagccagaaatctgcacagtaaatggttgaagcatcaagcatttatggcagaacttgcatccaacaaagaatggcttgacaaaatcgagaaggaaggaatgcagctcatttcagaaaagcctgagacggaagctgtggtgaaggagaaactcactggtttacataaaatgtgggaagtccttgaatccactacccagacaaaggcccagcggctctttgatgcaaacaaggccgaacttttcacccagagctgtgcagatctagacaaatggctgcacggcctggagagtcagattcagtctgatgactatggcaaagacctgaccagtgtcaatatcctgctgaaaaagcaacagatgctggagaatcagatggaagtgcggaagaaggagatcgaagagctccaaagccaagcccaggccctgagtcaggaagggaagagcaccgacgaggtagacagcaagcgcctcaccgtgcagaccaagttcatggagttgctggagcccttgaacgagaggaagcataacctgctggcctccaaagagatccatcagttcaacagggatgtggaggacgagatcttgtgggttggagagaggatgcctttggcaacttccacggatcatggccacaacctccagactgtgcagctgttaataaagaaaaatcagaccctccagaaagaaatccaggggcaccagcctcgcattgacgacatctttgagaggagccaaaacatcgtcactgacagcagcagcctcagcgctgaggccatcagacagaggcttgccgacctgaagcagctgtggggtctcctcattgaggagacagagaaacgccacaggcggctggaggaggcgcacagggcccagcagtactactttgacgctgctgaggccgaagcctggatgagcgagcaggagctgtacatgatgtcagaggagaaggccaaggatgagcagagtgctgtctccatgttgaagaagcaccagatcttagaacaagctgtggaggactatgcagagaccgtgcatcagctctccaagaccagccgggccctggtggccgacagccatcctgaaagtgagcgcattagcatgcggcagtccaaagtggataaactgtacgctggtctgaaagaccttgctgaagagagaagaggcaagctggatgagagacacaggttattccagctcaaccgggaggtggacgacctggagcagtggatcgctgagagggaggtggtcgcagggtcccatgaactgggacaggactatgagcatgtcacgatgttacaagaacgattccgggagtttgcccgagacaccgggaacattgggcaggagcgcgtggacacggtcaatcacctggcagatgagctcatcaactctggacattcagatgccgccaccatcgctgaatggaaggatggcctcaatgaagcctgggccgacctcctggagctcattgacacaagaacacagattcttgccgcttcctatgaactgcacaagttttaccacgatgccaaggagatctttgggcgtatacaggacaaacacaagaaactccctgaggagcttgggagagatcagaacacagtggagaccttacagagaatgcacactacatttgagcatgacatccaggctctgggcacacaggtgaggcagctgcaggaggatgcagcccgcctccaggcggcctatgcgggtgacaaggccgacgatatccagaagcgcgagaacgaggtcctggaagcctggaagtccctcctggacgcctgtgagagccgcagggtgcggctggtggacacaggggacaagttccgcttcttcagcatggtgcgcgacctcatgctctggatggaggatgtcatccggcagatcgaggcccaggagaagccaagggatgtatcatctgttgaactcttaatgaataatcatcaaggcatcaaagctgaaattgatgcacgtaatgacagtttcacaacctgcattgaacttgggaaatccctgttggcgagaaaacactatgcatctgaggttctggaggtccatcagttctcaagagacgccagtgtggccgaggcctggctgcttggacaggagccgtacctatccagccgagagataggccagagcgtggacgaggtggagaagctcatcaagcgccacgaggcatttgaaaagtctgcagcaacctgggatgagaggttctctgccctggaaaggctgactacattggagttactggaagtgcgcagacagcaagaggaagaggagaggaagaggcggccgccttctcccgagccgagcacgaaggtttcagaggaagccgagtcccagcagcagtgggatacttcaaaaggagaacaagtttcccaaaacggtttgccagctgaacagggatctccacggatggcagaaacggtggacacaagcgaaatggtcaacggcgctacagaacaaaggacgagctctaaagagtccagccccatcccctccccgacctctgatcgtaaagccaagactgccctcccagcccagagtgccgccaccttaccagccagaacccaggagacaccttcggcccagatggaaggcttcctcaatcggaaacacgagtgggaggcccacaataagaaagcctcaagcaggtcctggcacaatgtttattgtgtcataaataaccaagaaatgggtttctacaaagatgcaaagactgctgcttctggaattccctaccacagcgaggtccctgtgagtttgaaagaagctgtctgcgaagtggcccttgattacaaaaagaagaaacacgtattcaagctaagactaaatgatggcaatgagtacctcttccaagccaaagacgatgaggaaatgaacacatggatccaggctatctcttccgccatctcctctgataaacacgaggtgtctgccagcacccagagcacgccagcatccagccgcgcgcagaccctccccaccagcgtcgtcaccatcaccagcgagtccagtcccggcaagcgggaaaaggacaaagagaaagacaaagagaagcggttcagcctttttggcaaaaagaaatgaactcctttccttcacctcctgcccttctcttaccttttcagtgaaattccagcatgcaagctcagaaccaacacattactctctgtgcctaatgttcctcaatgtggttgatttttttttttttttaatttatagagcatttcggggggggtgggggaaacacacctaaacactttatctccaagttacaaaagtttgaggtgcagagggaaggccagattttttttttaatgaaattatatagattagatctcagtatttaaactgttcctcaattttgtgaggctgtgttggaaataacccgcctctagtgctgttggtatgcaaggcagcggtgcttaatcaatatttcctgtgctcaccagaggcaaaatgtaccaatatcctgacaccattctctctccatttacttctggtggttaccctgactcttgactcttagaagtgcccgagatggggctaacctttattaaacagatcgcatattatgatcttgctgcagccacagtgcagctccacattaactctacagaccaaaccatttgtatctggcatcacttactaacacacgacatgcggcttttctgcatcaactgctatgacggttaagaatgtcagtatacaagaaggaatagaaaactgatactgttttaaataatctgtaatttcaattttttttttttttgctgaaatacattatattgtacgtttgagataattctagtacaaagtataataaaactagatgtataataaaccctttaaatcattggtaagtgtacaagtggtggaactgaagcatttactggacaaagtaatgttactctaatggttacttgctcgtgcgttgccacactgtgttataatttgcttcatttccttgctatttgatacatagtgtgcatttctctgtcactgtaactattgtaatgacaaattttcatcttactgcacaatcaaaatgacattgataggaatgaactccagaggctgggcctgaacagggaggtggtcgctcaggcctggtgctcagtcgtacgacctgtacctctcaacttttgccctatctgttaaatatatgctatgtcattaaatgcttttaaatcta

SEQ ID NO: 357060 - DNA, 8919 bp, Homo sapiens
gtgagctgaagcagggcagggcatcaactcacccaggaagtgcaaggggtttggggattttcctttcctagccaagggaaggcatgacagactgtacctggaaaaacaggacactcttgcccaaatactgcactttttgcacagtcttagcaactggcagaccaggagattctctcctgtgcctgattcattgggtcccacacccatagggccttgcttactgccagtgcagcagtctgagattaacaccccatccccgggagaactctaagaaggagctgatgtggaggagcagctgagacagttcaagatgacgaccacagtagccacagactatgacaacattgagatccagcagcagtacagtgatgtcaacaaccgctgggatgtcgacgactgggacaatgagaacagctctgcgcggctttttgagcggtcccgcatcaaggctctggcagatgagcgtgaagccgtgcagaagaagaccttcaccaagtgggtcaattcccaccttgcccgtgtgtcctgccggatcacagacctgtacactgaccttcgagatggacggatgctcatcaagctgctggaggtcctctctggagagaggctgcctaaacccaccaagggacgaatgcgcatccactgcttagagaatgtggacaaggcccttcagttcctgaaggagcagagagtccatcttgagaacatggggtcccatgacatcgtggatggaaaccaccggctgacccttggcctcatctggaccatcatcctgcgcttccagatccaggatatcagtgtggaaactgaagacaacaaagagaagaaatctgccaaggatgcattgctgttgtggtgccagatgaagacagctgggtaccccaatgtcaacattcacaatttcaccactagctggagggacggcatggccttcaatgcactgatacacaaacaccggcctgacctgatagattttgacaaactaaagaaatctaacgcacactacaacctgcagaatgcatttaatctggcagaacagcacctcggcctcactaaactgttggaccccgaagacatcagcgtggaccatcctgatgagaagtccataatcacttatgtggtgacttattaccactacttctctaagatgaaggccttagctgttgaaggaaaacgaattggaaaggtgcttgacaatgctattgaaacagaaaaaatgattgaaaagtatgaatcacttgcctctgaccttctggaatggattgaacaaaccatcatcattctgaacaatcgcaaatttgccaattcactggtcggggttcaacagcagcttcaggcattcaacacttaccgcactgtggagaaaccacccaaatttactgagaaggggaacttggaagtgctgctcttcaccattcagagcaagatgagggccaacaaccagaaggtctacatgccccgggaggggaagctcatctctgacatcaacaaggcctgggaaagactggaaaaagcggaacacgaaagagaactggctttgcggaatgagctcataagacaggagaaactggaacagctcgcccgcagatttgatcgcaaggcagctatgagggagacttggctgagcgaaaaccagcgtctggtgtctcaggacaactttgggtttgaccttcctgcagttgaggccgccacaaaaaagcacgaggccattgagacagacattgccgcatacgaggagcgtgtgcaggctgtggtagccgtggccagggagctcgaggccgagaattaccacgacatcaagcgcatcacagcgaggaaggacaatgtcatccggctctgggaatacctactggaactgctcagggcccggagacagcggctcgagatgaacctggggctgcagaagatattccaggaaatgctctacattatggactggatggatgaaatgaaggtgctagtattgtctcaagactatggcaaacacttacttggtgtggaagacctgttacagaagcacaccctggttgaagcagacattggcatccaggcagagcgggtgagaggtgtcaatgcctccgcccagaagttcgcaacagacggggaaggttacaagccctgtgacccccaggtgatccgagaccgcgtggcccacatggagttctgttatcaagagctttgccagctggcggctgagcgcagggcccgtctggaagagtcccgccgcctctggaagttcttctgggagatggcagaagaggaaggctggatacgggagaaggagaagatcctgtcctcggacgattacgggaaagacctgaccagcgtcatgcgcctgctcagcaagcaccgggcgttcgaggacgagatgagcggccgcagtggccactttgagcaggccatcaaggaaggcgaagacatgatcgcggaggagcacttcgggtcggagaagatccgtgagaggatcatttacatccgggagcagtgggccaacctagagcagctctcggccattcggaagaagcgcctggaggaggcctccctgctgcaccagttccaggcagatgctgatgacattgatgcctggatgctggacatcctcaagattgtctccagcagcgacgtgggccacgatgagtattccacacagtctctggtcaagaaacacaaggacgtggcggaagagatcgccaattacaggcccacccttgacacgctgcacgaacaagccagcgccctcccccaggagcatgccgagtctccagacgtgaggggcaggctgtcgggcatcgaggagcggtataaggaggtggcagagctgacgcggctgcggaagcaggcactccaggacactctggccctgtacaagatgttcagcgaggctgatgcctgtgagctctggatcgacgagaaggagcagtggctcaacaacatgcagatcccagagaagctggaggatctggaggtcatccagcacagatttgagagcctagaaccagaaatgaacaaccaggcttcccgggttgcagtggtgaaccagattgcacgccagctgatgcacagcggccacccaagtgagaaggaaatcaaagcccagcaggacaaactcaacacaaggtggagccagttcagagaactggttgacaggaagaaggatgccctcctgtctgccctgagcatccagaactaccacctcgagtgcaatgaaaccaaatcctggattcgggaaaagaccaaggtcatcgagtccacccaggacctgggcaatgacctggctggcgtcatggccctgcagcgcaagctgaccggcatggagcgggacttggtggccattgaggcaaagctgagtgacctgcagaaggaggcggagaagctggagtccgagcaccccgaccaggcccaggccatcctgtctcggctggccgagatcagcgacgtgtgggaggagatgaagaccaccctgaaaaaccgagaggcctccctgggagaggccagcaagctgcagcagttcctacgggacttggacgacttccagtcctggctctctaggacccagacagcgatcgcctcggaggacatgccaaacaccctgaccgaggctgagaagctgctcacgcagcacgagaacatcaagaacgagatcgacaactacgaggaggactaccagaagatgagggacatgggcgagatggtcacccaggggcagaccgatgcccagtacatgtttctgcggcagcggctgcaggccctggacactggatggaacgagctccacaagatgtgggagaacagacaaaatctcctatcccagtcacatgcctaccagcagttcctcagagacacgaagcaagccgaagcctttcttaacaaccaggagtatgttctggctcacactgaaatgcctaccaccttggaaggagctgaagcagcaattaaaaagcaagaggacttcatgaccaccatggacgccaatgaggagaagatcaatgctgtggtggagactggccggaggctggtgagcgatgggaacatcaactcagatcgcatccaggagaaggtggactctattgatgacagacataggaagaatcgtgagacagccagtgaacttttgatgaggttgaaggacaacagggatctacagaaattcctgcaagattgtcaagagctgtctctctggatcaatgagaagatgctcacagcccaggacatgtcttacgatgaagccagaaatctgcacagtaaatggttgaagcatcaagcatttatggcagaacttgcatccaacaaagaatggcttgacaaaatcgagaaggaaggaatgcagctcatttcagaaaagcctgagacggaagctgtggtgaaggagaaactcactggtttacataaaatgtgggaagtccttgaatccactacccagacaaaggcccagcggctctttgatgcaaacaaggccgaacttttcacccagagctgtgcagatctagacaaatggctgcacggcctggagagtcagattcagtctgatgactatggcaaagacctgaccagtgtcaatatcctgctgaaaaagcaacagatgctggagaatcagatggaagtgcggaagaaggagatcgaagagctccaaagccaagcccaggccctgagtcaggaagggaagagcaccgacgaggtagacagcaagcgcctcaccgtgcagaccaagttcatggagttgctggagcccttgaacgagaggaagcataacctgctggcctccaaagagatccatcagttcaacagggatgtggaggacgagatcttgtgggttggagagaggatgcctttggcaacttccacggatcatggccacaacctccagactgtgcagctgttaataaagaaaaatcagaccctccagaaagaaatccaggggcaccagcctcgcattgacgacatctttgagaggagccaaaacatcgtcactgacagcagcagcctcagcgctgaggccatcagacagaggcttgccgacctgaagcagctgtggggtctcctcattgaggagacagagaaacgccacaggcggctggaggaggcgcacagggcccagcagtactactttgacgctgctgaggccgaagcctggatgagcgagcaggagctgtacatgatgtcagaggagaaggccaaggatgagcagagtgctgtctccatgttgaagaagcaccagatcttagaacaagctgtggaggactatgcagagaccgtgcatcagctctccaagaccagccgggccctggtggccgacagccatcctgaaagtgagcgcattagcatgcggcagtccaaagtggataaactgtacgctggtctgaaagaccttgctgaagagagaagaggcaagctggatgagagacacaggttattccagctcaaccgggaggtggacgacctggagcagtggatcgctgagagggaggtggtcgcagggtcccatgaactgggacaggactatgagcatgtcacgatgttacaagaacgattccgggagtttgcccgagacaccgggaacattgggcaggagcgcgtggacacggtcaatcacctggcagatgagctcatcaactctggacattcagatgccgccaccatcgctgaatggaaggatggcctcaatgaagcctgggccgacctcctggagctcattgacacaagaacacagattcttgccgcttcctatgaactgcacaagttttaccacgatgccaaggagatctttgggcgtatacaggacaaacacaagaaactccctgaggagcttgggagagatcagaacacagtggagaccttacagagaatgcacactacatttgagcatgacatccaggctctgggcacacaggtgaggcagctgcaggaggatgcagcccgcctccaggcggcctatgcgggtgacaaggccgacgatatccagaagcgcgagaacgaggtcctggaagcctggaagtccctcctggacgcctgtgagagccgcagggtgcggctggtggacacaggggacaagttccgcttcttcagcatggtgcgcgacctcatgctctggatggaggatgtcatccggcagatcgaggcccaggagaagccaagggatgtatcatctgttgaactcttaatgaataatcatcaaggcatcaaagctgaaattgatgcacgtaatgacagtttcacaacctgcattgaacttgggaaatccctgttggcgagaaaacactatgcatctgaggagatcaaggaaaaattactgcagttgacggaaaagaggaaagaaatgatcgacaagtgggaagaccgatgggaatggttaagactgattctggaggtccatcagttctcaagagacgccagtgtggccgaggcctggctgcttggacaggagccgtacctatccagccgagagataggccagagcgtggacgaggtggagaagctcatcaagcgccacgaggcatttgaaaagtctgcagcaacctgggatgagaggttctctgccctggaaaggctgactacattggagttactggaagtgcgcagacagcaagaggaagaggagaggaagaggcggccgccttctcccgagccgagcacgaaggtttcagaggaagccgagtcccagcagcagtgggatacttcaaaaggagaacaagtttcccaaaacggtttgccagctgaacagggatctccacgggttagttaccgctctcaaacctaccaaaactacaaaaactttaatagcagacggacagccagtgaccagccatggtctggactgtgaagttcactaccatttgtcaagaatcaccctttccaaatcctctgggttttgactttttggcttccacttcacccaaaatgttaaaatttttacttaattcatagccttccttggtttcatatttgtttgcatttaattcatgtttgagtctcttaactgatggatgcccacttgccttaaagcagcatacttattttttgtttatttattgtgagctttttactttattaagattttacagcgaaacccttacatgagtaattgaaatgaaattaaatgagattacagcataatgaagaagaaaactagaatctaacagatggcagaaacggtggacacaagcgaaatggtcaacggcgctacagaacaaaggacgagctctaaagagtccagccccatcccctccccgacctctgatcgtaaagccaagactgccctcccagcccagagtgccgccaccttaccagccagaacccaggagacaccttcggcccagatggaaggcttcctcaatcggaaacacgagtgggaggcccacaataagaaagcctcaagcaggtcctggcacaatgtttattgtgtcataaataaccaagaaatgggtttctacaaagatgcaaagactgctgcttctggaattccctaccacagcgaggtccctgtgagtttgaaagaagctgtctgcgaagtggcccttgattacaaaaagaagaaacacgtattcaagctaagactaaatgatggcaatgagtacctcttccaagccaaagacgatgaggaaatgaacacatggatccaggctatctcttccgccatctcctctgataaacacgaggtgtctgccagcacccagagcacgccagcatccagccgcgcgcagaccctccccaccagcgtcgtcaccatcaccagcgagtccagtcccggcaagcgggaaaaggacaaagagaaagacaaagagaagcggttcagcctttttggcaaaaagaaatgaactcctttccttcacctcctgcccttctcttaccttttcagtgaaattccagcatgcaagctcagaaccaacacattactctctgtgcctaatgttcctcaatgtggttgatttttttttttttttaatttatagagcatttcggggggggtgggggaaacacacctaaacactttatctccaagttacaaaagtttgaggtgcagagggaaggccagattttttttttaatgaaattatatagattagatctcagtatttaaactgttcctcaattttgtgaggctgtgttggaaataacccgcctctagtgctgttggtatgcaaggcagcggtgcttaatcaatatttcctgtgctcaccagaggcaaaatgtaccaatatcctgacaccattctctctccatttacttctggtggttaccctgactcttgactcttagaagtgcccgagatggggctaacctttattaaacagatcgcatattatgatcttgctgcagccacagtgcagctccacattaactctacagaccaaaccatttgtatctggcatcacttactaacacacgacatgcggcttttctgcatcaactgctatgacggttaagaatgtcagtatacaagaaggaatagaaaactgatactgttttaaataatctgtaatttcaattttttttttttttgctgaaatacattatattgtacgtttgagataattctagtacaaagtataataaaactagatgtataataaaccctttaaatcattggtaagtgtacaagtggtggaactgaagcatttactggacaaagtaatgttactctaatggttacttgctcgtgcgttgccacactgtgttataatttgcttcatttccttgctatttgatacatagtgtgcatttctctgtcactgtaactattgtaatgacaaattttcatcttactgcacaatcaaaatgacattgataggaatgaactccagaggctgggcctgaacagggaggtggtcgctcaggcctggtgctcagtcgtacgacctgtacctctcaacttttgccctatctgttaaatatatgctatgtcattaaatgcttttaaatcta

SEQ ID NO: 357061 - DNA, 8517 bp, Homo sapiens
gtgagctgaagcagggcagggcatcaactcacccaggaagtgcaaggggtttggggattttcctttcctagccaagggaaggcatgacagactgtacctggaaaaacaggacactcttgcccaaatactgcactttttgcacagtcttagcaactggcagaccaggagattctctcctgtgcctgattcattgggtcccacacccatagggccttgcttactgccagtgcagcagtctgagattaacaccccatccccgggagaactctaagaaggagctgatgtggaggagcagctgagacagttcaagatgacgaccacagtagccacagactatgacaacattgagatccagcagcagtacagtgatgtcaacaaccgctgggatgtcgacgactgggacaatgagaacagctctgcgcggctttttgagcggtcccgcatcaaggctctggcagatgagcgtgaagccgtgcagaagaagaccttcaccaagtgggtcaattcccaccttgcccgtgtgtcctgccggatcacagacctgtacactgaccttcgagatggacggatgctcatcaagctgctggaggtcctctctggagagaggctgcctaaacccaccaagggacgaatgcgcatccactgcttagagaatgtggacaaggcccttcagttcctgaaggagcagagagtccatcttgagaacatggggtcccatgacatcgtggatggaaaccaccggctgacccttggcctcatctggaccatcatcctgcgcttccagatccaggatatcagtgtggaaactgaagacaacaaagagaagaaatctgccaaggatgcattgctgttgtggtgccagatgaagacagctgggtaccccaatgtcaacattcacaatttcaccactagctggagggacggcatggccttcaatgcactgatacacaaacaccggcctgacctgatagattttgacaaactaaagaaatctaacgcacactacaacctgcagaatgcatttaatctggcagaacagcacctcggcctcactaaactgttggaccccgaagacatcagcgtggaccatcctgatgagaagtccataatcacttatgtggtgacttattaccactacttctctaagatgaaggccttagctgttgaaggaaaacgaattggaaaggtgcttgacaatgctattgaaacagaaaaaatgattgaaaagtatgaatcacttgcctctgaccttctggaatggattgaacaaaccatcatcattctgaacaatcgcaaatttgccaattcactggtcggggttcaacagcagcttcaggcattcaacacttaccgcactgtggagaaaccacccaaatttactgagaaggggaacttggaagtgctgctcttcaccattcagagcaagatgagggccaacaaccagaaggtctacatgccccgggaggggaagctcatctctgacatcaacaaggcctgggaaagactggaaaaagcggaacacgaaagagaactggctttgcggaatgagctcataagacaggagaaactggaacagctcgcccgcagatttgatcgcaaggcagctatgagggagacttggctgagcgaaaaccagcgtctggtgtctcaggacaactttgggtttgaccttcctgcagttgaggccgccacaaaaaagcacgaggccattgagacagacattgccgcatacgaggagcgtgtgcaggctgtggtagccgtggccagggagctcgaggccgagaattaccacgacatcaagcgcatcacagcgaggaaggacaatgtcatccggctctgggaatacctactggaactgctcagggcccggagacagcggctcgagatgaacctggggctgcagaagatattccaggaaatgctctacattatggactggatggatgaaatgaaggtgctagtattgtctcaagactatggcaaacacttacttggtgtggaagacctgttacagaagcacaccctggttgaagcagacattggcatccaggcagagcgggtgagaggtgtcaatgcctccgcccagaagttcgcaacagacggggaaggttacaagccctgtgacccccaggtgatccgagaccgcgtggcccacatggagttctgttatcaagagctttgccagctggcggctgagcgcagggcccgtctggaagagtcccgccgcctctggaagttcttctgggagatggcagaagaggaaggctggatacgggagaaggagaagatcctgtcctcggacgattacgggaaagacctgaccagcgtcatgcgcctgctcagcaagcaccgggcgttcgaggacgagatgagcggccgcagtggccactttgagcaggccatcaaggaaggcgaagacatgatcgcggaggagcacttcgggtcggagaagatccgtgagaggatcatttacatccgggagcagtgggccaacctagagcagctctcggccattcggaagaagcgcctggaggaggcctccctgctgcaccagttccaggcagatgctgatgacattgatgcctggatgctggacatcctcaagattgtctccagcagcgacgtgggccacgatgagtattccacacagtctctggtcaagaaacacaaggacgtggcggaagagatcgccaattacaggcccacccttgacacgctgcacgaacaagccagcgccctcccccaggagcatgccgagtctccagacgtgaggggcaggctgtcgggcatcgaggagcggtataaggaggtggcagagctgacgcggctgcggaagcaggcactccaggacactctggccctgtacaagatgttcagcgaggctgatgcctgtgagctctggatcgacgagaaggagcagtggctcaacaacatgcagatcccagagaagctggaggatctggaggtcatccagcacagatttgagagcctagaaccagaaatgaacaaccaggcttcccgggttgcagtggtgaaccagattgcacgccagctgatgcacagcggccacccaagtgagaaggaaatcaaagcccagcaggacaaactcaacacaaggtggagccagttcagagaactggttgacaggaagaaggatgccctcctgtctgccctgagcatccagaactaccacctcgagtgcaatgaaaccaaatcctggattcgggaaaagaccaaggtcatcgagtccacccaggacctgggcaatgacctggctggcgtcatggccctgcagcgcaagctgaccggcatggagcgggacttggtggccattgaggcaaagctgagtgacctgcagaaggaggcggagaagctggagtccgagcaccccgaccaggcccaggccatcctgtctcggctggccgagatcagcgacgtgtgggaggagatgaagaccaccctgaaaaaccgagaggcctccctgggagaggccagcaagctgcagcagttcctacgggacttggacgacttccagtcctggctctctaggacccagacagcgatcgcctcggaggacatgccaaacaccctgaccgaggctgagaagctgctcacgcagcacgagaacatcaagaacgagatcgacaactacgaggaggactaccagaagatgagggacatgggcgagatggtcacccaggggcagaccgatgcccagtacatgtttctgcggcagcggctgcaggccctggacactggatggaacgagctccacaagatgtgggagaacagacaaaatctcctatcccagtcacatgcctaccagcagttcctcagagacacgaagcaagccgaagcctttcttaacaaccaggagtatgttctggctcacactgaaatgcctaccaccttggaaggagctgaagcagcaattaaaaagcaagaggacttcatgaccaccatggacgccaatgaggagaagatcaatgctgtggtggagactggccggaggctggtgagcgatgggaacatcaactcagatcgcatccaggagaaggtggactctattgatgacagacataggaagaatcgtgagacagccagtgaacttttgatgaggttgaaggacaacagggatctacagaaattcctgcaagattgtcaagagctgtctctctggatcaatgagaagatgctcacagcccaggacatgtcttacgatgaagccagaaatctgcacagtaaatggttgaagcatcaagcatttatggcagaacttgcatccaacaaagaatggcttgacaaaatcgagaaggaaggaatgcagctcatttcagaaaagcctgagacggaagctgtggtgaaggagaaactcactggtttacataaaatgtgggaagtccttgaatccactacccagacaaaggcccagcggctctttgatgcaaacaaggccgaacttttcacccagagctgtgcagatctagacaaatggctgcacggcctggagagtcagattcagtctgatgactatggcaaagacctgaccagtgtcaatatcctgctgaaaaagcaacagatgctggagaatcagatggaagtgcggaagaaggagatcgaagagctccaaagccaagcccaggccctgagtcaggaagggaagagcaccgacgaggtagacagcaagcgcctcaccgtgcagaccaagttcatggagttgctggagcccttgaacgagaggaagcataacctgctggcctccaaagagatccatcagttcaacagggatgtggaggacgagatcttgtgggttggagagaggatgcctttggcaacttccacggatcatggccacaacctccagactgtgcagctgttaataaagaaaaatcagaccctccagaaagaaatccaggggcaccagcctcgcattgacgacatctttgagaggagccaaaacatcgtcactgacagcagcagcctcagcgctgaggccatcagacagaggcttgccgacctgaagcagctgtggggtctcctcattgaggagacagagaaacgccacaggcggctggaggaggcgcacagggcccagcagtactactttgacgctgctgaggccgaagcctggatgagcgagcaggagctgtacatgatgtcagaggagaaggccaaggatgagcagagtgctgtctccatgttgaagaagcaccagatcttagaacaagctgtggaggactatgcagagaccgtgcatcagctctccaagaccagccgggccctggtggccgacagccatcctgaaagtgagcgcattagcatgcggcagtccaaagtggataaactgtacgctggtctgaaagaccttgctgaagagagaagaggcaagctggatgagagacacaggttattccagctcaaccgggaggtggacgacctggagcagtggatcgctgagagggaggtggtcgcagggtcccatgaactgggacaggactatgagcatgtcacgatgttacaagaacgattccgggagtttgcccgagacaccgggaacattgggcaggagcgcgtggacacggtcaatcacctggcagatgagctcatcaactctggacattcagatgccgccaccatcgctgaatggaaggatggcctcaatgaagcctgggccgacctcctggagctcattgacacaagaacacagattcttgccgcttcctatgaactgcacaagttttaccacgatgccaaggagatctttgggcgtatacaggacaaacacaagaaactccctgaggagcttgggagagatcagaacacagtggagaccttacagagaatgcacactacatttgagcatgacatccaggctctgggcacacaggtgaggcagctgcaggaggatgcagcccgcctccaggcggcctatgcgggtgacaaggccgacgatatccagaagcgcgagaacgaggtcctggaagcctggaagtccctcctggacgcctgtgagagccgcagggtgcggctggtggacacaggggacaagttccgcttcttcagcatggtgcgcgacctcatgctctggatggaggatgtcatccggcagatcgaggcccaggagaagccaagggatgtatcatctgttgaactcttaatgaataatcatcaaggcatcaaagctgaaattgatgcacgtaatgacagtttcacaacctgcattgaacttgggaaatccctgttggcgagaaaacactatgcatctgaggagatcaaggaaaaattactgcagttgacggaaaagaggaaagaaatgatcgacaagtgggaagaccgatgggaatggttaagactgattctggaggtccatcagttctcaagagacgccagtgtggccgaggcctggctgcttggacaggagccgtacctatccagccgagagataggccagagcgtggacgaggtggagaagctcatcaagcgccacgaggcatttgaaaagtctgcagcaacctgggatgagaggttctctgccctggaaaggctgactacattggagttactggaagtgcgcagacagcaagaggaagaggagaggaagaggcggccgccttctcccgagccgagcacgaaggtttcagaggaagccgagtcccagcagcagtgggatacttcaaaaggagaacaagtttcccaaaacggtttgccagctgaacagggatctccacggatggcagaaacggtggacacaagcgaaatggtcaacggcgctacagaacaaaggacgagctctaaagagtccagccccatcccctccccgacctctgatcgtaaagccaagactgccctcccagcccagagtgccgccaccttaccagccagaacccaggagacaccttcggcccagatggaaggcttcctcaatcggaaacacgagtgggaggcccacaataagaaagcctcaagcaggtcctggcacaatgtttattgtgtcataaataaccaagaaatgggtttctacaaagatgcaaagactgctgcttctggaattccctaccacagcgaggtccctgtgagtttgaaagaagctgtctgcgaagtggcccttgattacaaaaagaagaaacacgtattcaagctaagagactaaatgatggcaatgagtacctcttccaagccaaaagacgatgaggaaatgaacacatggatccaggctatctcttccgccatctcctctgataaacacgaggtgtctgccagcacccagagcacgcccagcattcaggcgggcgcagacccttcccaccagcgtcgtcaccatcaccagcgagtccagtcccggcaagcgggaaaaggacaaagagaaagacaaagagaagcggttcagcctttttggcaaaaagaaatgaactcctttccttcacctcctgcccttctcttaccttttcagtgaaattccagcatgcaagctcagaaccaacacattactctctgtgcctaatgttcctcaatgtggttgatttttttttttttttaatttatagagcatttcggggggggtgggggaaacacacctaaacactttatctccaagttacaaaagtttgaggtgcagagggaaggccagattttttttttaatgaaattatatagattagatctcagtatttaaactgttcctcaattttgtgaggctgtgttggaaataacccgcctctagtgctgttggtatgcaaggcagcggtgcttaatcaatatttcctgtgctcaccagaggcaaaatgtaccaatatcctgacaccattctctctccatttacttctggtggttaccctgactcttgactcttagaagtgcccgagatggggctaacctttattaaacagatcgcatattatgatcttgctgcagccacagtgcagctccacattaactctacagaccaaaccatttgtatctggcatcacttactaacacacgacatgcggcttttctgcatcaactgctatgacggttaagaatgtcagtatacaagaaggaatagaaaactgatactgttttaaataatctgtaatttcaattttttttttttttgctgaaatacattatattgtacgtttgagataattctagtacaaagtataataaaactagatgtataataaaccctttaaatcattggtaagtgtacaagtggtggaactgaagcatttactggacaaagtaatgttactctaatggttacttgctcgtgcgttgccacactgtgttataatttgcttcatttccttgctatttgatacatagtgtgcatttctctgtcactgtaactattgtaatgacaaattttcatcttactgcacaatcaaaatgacattgataggaatgaactccagaggctgggcctgaacagggaggtggtcgctcaggcctggtgctcagtcgtacgacctgtacctctcaacttttgccctatctgttaaatatatgctatgtcattaaatgcttttaaatcta

SEQ ID NO: 357062 - DNA, 8330 bp, Homo sapiens
gtgagctgaagcagggcagggcatcaactcacccaggaagtgcaaggggtttggggattttcctttcctagccaagggaaggcatgacagactgtacctggaaaaacaggacactcttgcccaaatactgcactttttgcacagtcttagcaactggcagaccaggagattctctcctgtgcctgattcattgggtcccacacccatagggccttgcttactgccagtgcagcagtctgagattaacaccccatccccgggagaactctaagaaggagctgatgtggaggagcagctgagacagttcaagatgacgaccacagtagccacagactatgacaacattgagatccagcagcagtacagtgatgtcaacaaccgctgggatgtcgacgactgggacaatgagaacagctctgcgcggctttttgagcggtcccgcatcaaggctctggcagatgagcgtgaagccgtgcagaagaagaccttcaccaagtgggtcaattcccaccttgcccgtgtgtcctgccggatcacagacctgtacactgaccttcgagatggacggatgctcatcaagctgctggaggtcctctctggagagaggctgcctaaacccaccaagggacgaatgcgcatccactgcttagagaatgtggacaaggcccttcagttcctgaaggagcagagagtccatcttgagaacatggggtcccatgacatcgtggatggaaaccaccggctgacccttggcctcatctggaccatcatcctgcgcttccagatccaggatatcagtgtggaaactgaagacaacaaagagaagaaatctgccaaggatgcattgctgttgtggtgccagatgaagacagctgggtaccccaatgtcaacattcacaatttcaccactagctggagggacggcatggccttcaatgcactgatacacaaacaccggcctgacctgatagattttgacaaactaaagaaatctaacgcacactacaacctgcagaatgcatttaatctggcagaacagcacctcggcctcactaaactgttggaccccgaagacatcagcgtggaccatcctgatgagaagtccataatcacttatgtggtgacttattaccactacttctctaagatgaaggccttagctgttgaaggaaaacgaattggaaaggtgcttgacaatgctattgaaacagaaaaaatgattgaaaagtatgaatcacttgcctctgaccttctggaatggattgaacaaaccatcatcattctgaacaatcgcaaatttgccaattcactggtcggggttcaacagcagcttcaggcattcaacacttaccgcactgtggagaaaccacccaaatttactgagaaggggaacttggaagtgctgctcttcaccattcagagcaagatgagggccaacaaccagaaggtctacatgccccgggaggggaagctcatctctgacatcaacaaggcctgggaaagactggaaaaagcggaacacgaaagagaactggctttgcggaatgagctcataagacaggagaaactggaacagctcgcccgcagatttgatcgcaaggcagctatgagggagacttggctgagcgaaaaccagcgtctggtgtctcaggacaactttgggtttgaccttcctgcagttgaggccgccacaaaaaagcacgaggccattgagacagacattgccgcatacgaggagcgtgtgcaggctgtggtagccgtggccagggagctcgaggccgagaattaccacgacatcaagcgcatcacagcgaggaaggacaatgtcatccggctctgggaatacctactggaactgctcagggcccggagacagcggctcgagatgaacctggggctgcagaagatattccaggaaatgctctacattatggactggatggatgaaatgaaggtgctagtattgtctcaagactatggcaaacacttacttggtgtggaagacctgttacagaagcacaccctggttgaagcagacattggcatccaggcagagcgggtgagaggtgtcaatgcctccgcccagaagttcgcaacagacggggaaggttacaagccctgtgacccccaggtgatccgagaccgcgtggcccacatggagttctgttatcaagagctttgccagctggcggctgagcgcagggcccgtctggaagagtcccgccgcctctggaagttcttctgggagatggcagaagaggaaggctggatacgggagaaggagaagatcctgtcctcggacgattacgggaaagacctgaccagcgtcatgcgcctgctcagcaagcaccgggcgttcgaggacgagatgagcggccgcagtggccactttgagcaggccatcaaggaaggcgaagacatgatcgcggaggagcacttcgggtcggagaagatccgtgagaggatcatttacatccgggagcagtgggccaacctagagcagctctcggccattcggaagaagcgcctggaggaggcctccctgctgcaccagttccaggcagatgctgatgacattgatgcctggatgctggacatcctcaagattgtctccagcagcgacgtgggccacgatgagtattccacacagtctctggtcaagaaacacaaggacgtggcggaagagatcgccaattacaggcccacccttgacacgctgcacgaacaagccagcgccctcccccaggagcatgccgagtctccagacgtgaggggcaggctgtcgggcatcgaggagcggtataaggaggtggcagagctgacgcggctgcggaagcaggcactccaggacactctggccctgtacaagatgttcagcgaggctgatgcctgtgagctctggatcgacgagaaggagcagtggctcaacaacatgcagatcccagagaagctggaggatctggaggtcatccagcacagatttgagagcctagaaccagaaatgaacaaccaggcttcccgggttgcagtggtgaaccagattgcacgccagctgatgcacagcggccacccaagtgagaaggaaatcaaagcccagcaggacaaactcaacacaaggtggagccagttcagagaactggttgacaggaagaaggatgccctcctgtctgccctgagcatccagaactaccacctcgagtgcaatgaaaccaaatcctggattcgggaaaagaccaaggtcatcgagtccacccaggacctgggcaatgacctggctggcgtcatggccctgcagcgcaagctgaccggcatggagcgggacttggtggccattgaggcaaagctgagtgacctgcagaaggaggcggagaagctggagtccgagcaccccgaccaggcccaggccatcctgtctcggctggccgagatcagcgacgtgtgggaggagatgaagaccaccctgaaaaaccgagaggcctccctgggagaggccagcaagctgcagcagttcctacgggacttggacgacttccagtcctggctctctaggacccagacagcgatcgcctcggaggacatgccaaacaccctgaccgaggctgagaagctgctcacgcagcacgagaacatcaagaacgagatcgacaactacgaggaggactaccagaagatgagggacatgggcgagatggtcacccaggggcagaccgatgcccagtacatgtttctgcggcagcggctgcaggccctggacactggatggaacgagctccacaagatgtgggagaacagacaaaatctcctatcccagtcacatgcctaccagcagttcctcagagacacgaagcaagccgaagcctttcttaacaaccaggagtatgttctggctcacactgaaatgcctaccaccttggaaggagctgaagcagcaattaaaaagcaagaggacttcatgaccaccatggacgccaatgaggagaagatcaatgctgtggtggagactggccggaggctggtgagcgatgggaacatcaactcagatcgcatccaggagaaggtggactctattgatgacagacataggaagaatcgtgagacagccagtgaacttttgatgaggttgaaggacaacagggatctacagaaattcctgcaagattgtcaagagctgtctctctggatcaatgagaagatgctcacagcccaggacatgtcttacgatgaagccagaaatctgcacagtaaatggttgaagcatcaagcatttatggcagaacttgcatccaacaaagaatggcttgacaaaatcgagaaggaaggaatgcagctcatttcagaaaagcctgagacggaagctgtggtgaaggagaaactcactggtttacataaaatgtgggaagtccttgaatccactacccagacaaaggcccagcggctctttgatgcaaacaaggccgaacttttcacccagagctgtgcagatctagacaaatggctgcacggcctggagagtcagattcagtctgatgactatggcaaagacctgaccagtgtcaatatcctgctgaaaaagcaacagatgctggagaatcagatggaagtgcggaagaaggagatcgaagagctccaaagccaagcccaggccctgagtcaggaagggaagagcaccgacgaggtagacagcaagcgcctcaccgtgcagaccaagttcatggagttgctggagcccttgaacgagaggaagcataacctgctggcctccaaagagatccatcagttcaacagggatgtggaggacgagatcttgtgggttggagagaggatgcctttggcaacttccacggatcatggccacaacctccagactgtgcagctgttaataaagaaaaatcagaccctccagaaagaaatccaggggcaccagcctcgcattgacgacatctttgagaggagccaaaacatcgtcactgacagcagcagcctcagcgctgaggccatcagacagaggcttgccgacctgaagcagctgtggggtctcctcattgaggagacagagaaacgccacaggcggctggaggaggcgcacagggcccagcagtactactttgacgctgctgaggccgaagcctggatgagcgagcaggagctgtacatgatgtcagaggagaaggccaaggatgagcagagtgctgtctccatgttgaagaagcaccagatcttagaacaagctgtggaggactatgcagagaccgtgcatcagctctccaagaccagccgggccctggtggccgacagccatcctgaaagtgagcgcattagcatgcggcagtccaaagtggataaactgtacgctggtctgaaagaccttgctgaagagagaagaggcaagctggatgagagacacaggttattccagctcaaccgggaggtggacgacctggagcagtggatcgctgagagggaggtggtcgcagggtcccatgaactgggacaggactatgagcatgtcacgatgttacaagaacgattccgggagtttgcccgagacaccgggaacattgggcaggagcgcgtggacacggtcaatcacctggcagatgagctcatcaactctggacattcagatgccgccaccatcgctgaatggaaggatggcctcaatgaagcctgggccgacctcctggagctcattgacacaagaacacagattcttgccgcttcctatgaactgcacaagttttaccacgatgccaaggagatctttgggcgtatacaggacaaacacaagaaactccctgaggagcttgggagagatcagaacacagtggagaccttacagagaatgcacactacatttgagcatgacatccaggctctgggcacacaggtgaggcagctgcaggaggatgcagcccgcctccaggcggcctatgcgggtgacaaggccgacgatatccagaagcgcgagaacgaggtcctggaagcctggaagtccctcctggacgcctgtgagagccgcagggtgcggctggtggacacaggggacaagttccgcttcttcagcatggtgcgcgacctcatgctctggatggaggatgtcatccggcagatcgaggcccaggagaagccaagggatgtatcatctgttgaactcttaatgaataatcatcaaggcatcaaagctgaaattgatgcacgtaatgacagtttcacaacctgcattgaacttgggaaatccctgttggcgagaaaacactatgcatctgaggagatcaaggaaaaattactgcagttgacggaaaagaggaaagaaatgatcgacaagtgggaagaccgatgggaatggttaagactgattctggaggtccatcagttctcaagagacgccagtgtggccgaggcctggctgcttggacaggagccgtacctatccagccgagagataggccagagcgtggacgaggtggagaagctcatcaagcgccacgaggcatttgaaaagtctgcagcaacctgggatgagaggttctctgccctggaaaggctgactacattggagttactggaagtgcgcagacagcaagaggaagaggagaggaagaggcggccgccttctcccgagccgagcacgaaggtttcagaggaagccgagtcccagcagcagtgggatacttcaaaaggagaacaagtttcccaaaacggtttgccagctgaacagggatctccacggatggcagaaacggtggacacaagcgaaatggtcaacggcgctacagaacaaaggacgagctctaaagagtccagccccatcccctccccgacctctgatcgtaaagccaagactgccctcccagcccagagtgccgccaccttaccagccagaacccaggagacaccttcggcccagatggaaggcttcctcaatcggaaacacgagtgggaggcccacaataagaaagcctcaagcaggtcctggcacaatgtttattgtgtcataaataaccaagaaatgggtttctacaaagatgcaaagactgctgcttctggaattccctaccacagcgaggtccctgtgagtttgaaagaagctgtctgcgaagtggcccttgattacaaaaagaagaaacacgtattcaagctaagactaaatgatggcaatgagtacctcttccaagccaaagacaaagagaagcggttcagcctttttggcaaaaagaaatgaactcctttccttcacctcctgcccttctcttaccttttcagtgaaattccagcatgcaagctcagaaccaacacattactctctgtgcctaatgttcctcaatgtggttgatttttttttttttttaatttatagagcatttcggggggggtgggggaaacacacctaaacactttatctccaagttacaaaagtttgaggtgcagagggaaggccagattttttttttaatgaaattatatagattagatctcagtatttaaactgttcctcaattttgtgaggctgtgttggaaataacccgcctctagtgctgttggtatgcaaggcagcggtgcttaatcaatatttcctgtgctcaccagaggcaaaatgtaccaatatcctgacaccattctctctccatttacttctggtggttaccctgactcttgactcttagaagtgcccgagatggggctaacctttattaaacagatcgcatattatgatcttgctgcagccacagtgcagctccacattaactctacagaccaaaccatttgtatctggcatcacttactaacacacgacatgcggcttttctgcatcaactgctatgacggttaagaatgtcagtatacaagaaggaatagaaaactgatactgttttaaataatctgtaatttcaattttttttttttttgctgaaatacattatattgtacgtttgagataattctagtacaaagtataataaaactagatgtataataaaccctttaaatcattggtaagtgtacaagtggtggaactgaagcatttactggacaaagtaatgttactctaatggttacttgctcgtgcgttgccacactgtgttataatttgcttcatttccttgctatttgatacatagtgtgcatttctctgtcactgtaactattgtaatgacaaattttcatcttactgcacaatcaaaatgacattgataggaatgaactccagaggctgggcctgaacagggaggtggtcgctcaggcctggtgctcagtcgtacgacctgtacctctcaacttttgccctatctgttaaatatatgctatgtcattaaatgcttttaaatcta

SEQ ID NO: 357063 - DNA, 8021 bp, Homo sapiens
gtgagctgaagcagggcagggcatcaactcacccaggaagtgcaaggggtttggggattttcctttcctagccaagggaaggcatgacagactgtacctggaaaaacaggacactcttgcccaaatactgcactttttgcacagtcttagcaactggcagaccaggagattctctcctgtgcctgattcattgggtcccacacccatagggccttgcttactgccagtgcagcagtctgagattaacaccccatccccgggagaactctaagaaggagctgatgtggaggagcagctgagacagttcaagatgacgaccacagtagccacagactatgacaacattgagatccagcagcagtacagtgatgtcaacaaccgctgggatgtcgacgactgggacaatgagaacagctctgcgcggctttttgagcggtcccgcatcaaggctctggcagatgagcgtgaagccgtgcagaagaagaccttcaccaagtgggtcaattcccaccttgcccgtgtgtcctgccggatcacagacctgtacactgaccttcgagatggacggatgctcatcaagctgctggaggtcctctctggagagaggctgcctaaacccaccaagggacgaatgcgcatccactgcttagagaatgtggacaaggcccttcagttcctgaaggagcagagagtccatcttgagaacatggggtcccatgacatcgtggatggaaaccaccggctgacccttggcctcatctggaccatcatcctgcgcttccagatccaggatatcagtgtggaaactgaagacaacaaagagaagaaatctgccaaggatgcattgctgttgtggtgccagatgaagacagctgggtaccccaatgtcaacattcacaatttcaccactagctggagggacggcatggccttcaatgcactgatacacaaacaccggcctgacctgatagattttgacaaactaaagaaatctaacgcacactacaacctgcagaatgcatttaatctggcagaacagcacctcggcctcactaaactgttggaccccgaagacatcagcgtggaccatcctgatgagaagtccataatcacttatgtggtgacttattaccactacttctctaagatgaaggccttagctgttgaaggaaaacgaattggaaaggtgcttgacaatgctattgaaacagaaaaaatgattgaaaagtatgaatcacttgcctctgaccttctggaatggattgaacaaaccatcatcattctgaacaatcgcaaatttgccaattcactggtcggggttcaacagcagcttcaggcattcaacacttaccgcactgtggagaaaccacccaaatttactgagaaggggaacttggaagtgctgctcttcaccattcagagcaagatgagggccaacaaccagaaggtctacatgccccgggaggggaagctcatctctgacatcaacaaggcctgggaaagactggaaaaagcggaacacgaaagagaactggctttgcggaatgagctcataagacaggagaaactggaacagctcgcccgcagatttgatcgcaaggcagctatgagggagacttggctgagcgaaaaccagcgtctggtgtctcaggacaactttgggtttgaccttcctgcagttgaggccgccacaaaaaagcacgaggccattgagacagacattgccgcatacgaggagcgtgtgcaggctgtggtagccgtggccagggagctcgaggccgagaattaccacgacatcaagcgcatcacagcgaggaaggacaatgtcatccggctctgggaatacctactggaactgctcagggcccggagacagcggctcgagatgaacctggggctgcagaagatattccaggaaatgctctacattatggactggatggatgaaatgaaggtgctagtattgtctcaagactatggcaaacacttacttggtgtggaagacctgttacagaagcacaccctggttgaagcagacattggcatccaggcagagcgggtgagaggtgtcaatgcctccgcccagaagttcgcaacagacggggaaggttacaagccctgtgacccccaggtgatccgagaccgcgtggcccacatggagttctgttatcaagagctttgccagctggcggctgagcgcagggcccgtctggaagagtcccgccgcctctggaagttcttctgggagatggcagaagaggaaggctggatacgggagaaggagaagatcctgtcctcggacgattacgggaaagacctgaccagcgtcatgcgcctgctcagcaagcaccgggcgttcgaggacgagatgagcggccgcagtggccactttgagcaggccatcaaggaaggcgaagacatgatcgcggaggagcacttcgggtcggagaagatccgtgagaggatcatttacatccgggagcagtgggccaacctagagcagctctcggccattcggaagaagcgcctggaggaggcctccctgctgcaccagttccaggcagatgctgatgacattgatgcctggatgctggacatcctcaagattgtctccagcagcgacgtgggccacgatgagtattccacacagtctctggtcaagaaacacaaggacgtggcggaagagatcgccaattacaggcccacccttgacacgctgcacgaacaagccagcgccctcccccaggagcatgccgagtctccagacgtgaggggcaggctgtcgggcatcgaggagcggtataaggaggtggcagagctgacgcggctgcggaagcaggcactccaggacactctggccctgtacaagatgttcagcgaggctgatgcctgtgagctctggatcgacgagaaggagcagtggctcaacaacatgcagatcccagagaagctggaggatctggaggtcatccagcacagatttgagagcctagaaccagaaatgaacaaccaggcttcccgggttgcagtggtgaaccagattgcacgccagctgatgcacagcggccacccaagtgagaaggaaatcaaagcccagcaggacaaactcaacacaaggtggagccagttcagagaactggttgacaggaagaaggatgccctcctgtctgccctgagcatccagaactaccacctcgagtgcaatgaaaccaaatcctggattcgggaaaagaccaaggtcatcgagtccacccaggacctgggcaatgacctggctggcgtcatggccctgcagcgcaagctgaccggcatggagcgggacttggtggccattgaggcaaagctgagtgacctgcagaaggaggcggagaagctggagtccgagcaccccgaccaggcccaggccatcctgtctcggctggccgagatcagcgacgtgtgggaggagatgaagaccaccctgaaaaaccgagaggcctccctgggagaggccagcaagctgcagcagttcctacgggacttggacgacttccagtcctggctctctaggacccagacagcgatcgcctcggaggacatgccaaacaccctgaccgaggctgagaagctgctcacgcagcacgagaacatcaagaacgagatcgacaactacgaggaggactaccagaagatgagggacatgggcgagatggtcacccaggggcagaccgatgcccagtacatgtttctgcggcagcggctgcaggccctggacactggatggaacgagctccacaagatgtgggagaacagacaaaatctcctatcccagtcacatgcctaccagcagttcctcagagacacgaagcaagccgaagcctttcttaacaaccaggagtatgttctggctcacactgaaatgcctaccaccttggaaggagctgaagcagcaattaaaaagcaagaggacttcatgaccaccatggacgccaatgaggagaagatcaatgctgtggtggagactggccggaggctggtgagcgatgggaacatcaactcagatcgcatccaggagaaggtggactctattgatgacagacataggaagaatcgtgagacagccagtgaacttttgatgaggttgaaggacaacagggatctacagaaattcctgcaagattgtcaagagctgtctctctggatcaatgagaagatgctcacagcccaggacatgtcttacgatgaagccagaaatctgcacagtaaatggttgaagcatcaagcatttatggcagaacttgcatccaacaaagaatggcttgacaaaatcgagaaggaaggaatgcagctcatttcagaaaagcctgagacggaagctgtggtgaaggagaaactcactggtttacataaaatgtgggaagtccttgaatccactacccagacaaaggcccagcggctctttgatgcaaacaaggccgaacttttcacccagagctgtgcagatctagacaaatggctgcacggcctggagagtcagattcagtctgatgactatggcaaagacctgaccagtgtcaatatcctgctgaaaaagcaacagatgctggagaatcagatggaagtgcggaagaaggagatcgaagagctccaaagccaagcccaggccctgagtcaggaagggaagagcaccgacgaggtagacagcaagcgcctcaccgtgcagaccaagttcatggagttgctggagcccttgaacgagaggaagcataacctgctggcctccaaagagatccatcagttcaacagggatgtggaggacgagatcttgtgggttggagagaggatgcctttggcaacttccacggatcatggccacaacctccagactgtgcagctgttaataaagaaaaatcagaccctccagaaagaaatccaggggcaccagcctcgcattgacgacatctttgagaggagccaaaacatcgtcactgacagcagcagcctcagcgctgaggccatcagacagaggcttgccgacctgaagcagctgtggggtctcctcattgaggagacagagaaacgccacaggcggctggaggaggcgcacagggcccagcagtactactttgacgctgctgaggccgaagcctggatgagcgagcaggagctgtacatgatgtcagaggagaaggccaaggatgagcagagtgctgtctccatgttgaagaagcaccagatcttagaacaagctgtggaggactatgcagagaccgtgcatcagctctccaagaccagccgggccctggtggccgacagccatcctgaaagtgagcgcattagcatgcggcagtccaaagtggataaactgtacgctggtctgaaagaccttgctgaagagagaagaggcaagctggatgagagacacaggttattccagctcaaccgggaggtggacgacctggagcagtggatcgctgagagggaggtggtcgcagggtcccatgaactgggacaggactatgagcatgtcacgatgttacaagaacgattccgggagtttgcccgagacaccgggaacattgggcaggagcgcgtggacacggtcaatcacctggcagatgagctcatcaactctggacattcagatgccgccaccatcgctgaatggaaggatggcctcaatgaagcctgggccgacctcctggagctcattgacacaagaacacagattcttgccgcttcctatgaactgcacaagttttaccacgatgccaaggagatctttgggcgtatacaggacaaacacaagaaactccctgaggagcttgggagagatcagaacacagtggagaccttacagagaatgcacactacatttgagcatgacatccaggctctgggcacacaggtgaggcagctgcaggaggatgcagcccgcctccaggcggcctatgcgggtgacaaggccgacgatatccagaagcgcgagaacgaggtcctggaagcctggaagtccctcctggacgcctgtgagagccgcagggtgcggctggtggacacaggggacaagttccgcttcttcagcatggtgcgcgacctcatgctctggatggaggatgtcatccggcagatcgaggcccaggagaagccaagggatgtatcatctgttgaactcttaatgaataatcatcaaggcatcaaagctgaaattgatgcacgtaatgacagtttcacaacctgcattgaacttgggaaatccctgttggcgagaaaacactatgcatctgaggagatcaaggaaaaattactgcagttgacggaaaagaggaaagaaatgatcgacaagtgggaagaccgatgggaatggttaagactgattctggaggtccatcagttctcaagagacgccagtgtggccgaggcctggctgcttggacaggagccgtacctatccagccgagagataggccagagcgtggacgaggtggagaagctcatcaagcgccacgaggcatttgaaaagtctgcagcaacctgggatgagaggttctctgccctggaaaggctgactacattggagttactggaagtgcgcagacagcaagaggaagaggagaggaagaggcggccgccttctcccgagccgagcacgaaggtttcagaggaagccgagtcccagcagcagtgggatacttcaaaaggagaacaagtttcccaaaacggtttgccagctgaacagggatctccacggatggcagaaacggtggacacaagcgaaatggtcaacggcgctacagaacaaaggacgagctctaaagagtccagccccaccagcgtcgtcaccatcaccagcgagtccagtcccggcaagcgggaaaaggacaaagagaaagacaaagagaagcggttcagcctttttggcaaaaagaaatgaactcctttccttcacctcctgcccttctcttaccttttcagtgaaattccagcatgcaagctcagaaccaacacattactctctgtgcctaatgttcctcaatgtggttgatttttttttttttttaatttatagagcatttcggggggggtgggggaaacacacctaaacactttatctccaagttacaaaagtttgaggtgcagagggaaggccagattttttttttaatgaaattatatagattagatctcagtatttaaactgttcctcaattttgtgaggctgtgttggaaataacccgcctctagtgctgttggtatgcaaggcagcggtgcttaatcaatatttcctgtgctcaccagaggcaaaatgtaccaatatcctgacaccattctctctccatttacttctggtggttaccctgactcttgactcttagaagtgcccgagatggggctaacctttattaaacagatcgcatattatgatcttgctgcagccacagtgcagctccacattaactctacagaccaaaccatttgtatctggcatcacttactaacacacgacatgcggcttttctgcatcaactgctatgacggttaagaatgtcagtatacaagaaggaatagaaaactgatactgttttaaataatctgtaatttcaattttttttttttttgctgaaatacattatattgtacgtttgagataattctagtacaaagtataataaaactagatgtataataaaccctttaaatcattggtaagtgtacaagtggtggaactgaagcatttactggacaaagtaatgttactctaatggttacttgctcgtgcgttgccacactgtgttataatttgcttcatttccttgctatttgatacatagtgtgcatttctctgtcactgtaactattgtaatgacaaattttcatcttactgcacaatcaaaatgacattgataggaatgaactccagaggctgggcctgaacagggaggtggtcgctcaggcctggtgctcagtcgtacgacctgtacctctcaacttttgccctatctgttaaatatatgctatgtcattaaatgcttttaaatcta

SEQ ID NO: 357064 - DNA, 6698 bp, Homo sapiens
gtgagctgaagcagggcagggcatcaactcacccaggaagtgcaaggggtttggggattttcctttcctagccaagggaaggcatgacagactgtacctggaaaaacaggacactcttgcccaaatactgcactttttgcacagtcttagcaactggcagaccaggagattctctcctgtgcctgattcattgggtcccacacccatagggccttgcttactgccagtgcagcagtctgagattaacaccccatccccgggagaactctaagaaggagctgatgtggaggagcagctgagacagttcaagatgacgaccacagtagccacagactatgacaacattgagatccagcagcagtacagtgatgtcaacaaccgctgggatgtcgacgactgggacaatgagaacagctctgcgcggctttttgagcggtcccgcatcaaggctctggcagatgagcgtgaagccgtgcagaagaagaccttcaccaagtgggtcaattcccaccttgcccgtgtgtcctgccggatcacagacctgtacactgaccttcgagatggacggatgctcatcaagctgctggaggtcctctctggagagaggctgcctaaacccaccaagggacgaatgcgcatccactgcttagagaatgtggacaaggcccttcagttcctgaaggagcagagagtccatcttgagaacatggggtcccatgacatcgtggatggaaaccaccggctgacccttggcctcatctggaccatcatcctgcgcttccagatccaggatatcagtgtggaaactgaagacaacaaagagaagaaatctgccaaggatgcattgctgttgtggtgccagatgaagacagctgggtaccccaatgtcaacattcacaatttcaccactagctggagggacggcatggccttcaatgcactgatacacaaacaccggcctgacctgatagattttgacaaactaaagaaatctaacgcacactacaacctgcagaatgcatttaatctggcagaacagcacctcggcctcactaaactgttggaccccgaagacatcagcgtggaccatcctgatgagaagtccataatcacttatgtggtgacttattaccactacttctctaagatgaaggccttagctgttgaaggaaaacgaattggaaaggtgcttgacaatgctattgaaacagaaaaaatgattgaaaagtatgaatcacttgcctctgaccttctggaatggattgaacaaaccatcatcattctgaacaatcgcaaatttgccaattcactggtcggggttcaacagcagcttcaggcattcaacacttaccgcactgtggagaaaccacccaaatttactgagaaggggaacttggaagtgctgctcttcaccattcagagcaagatgagggccaacaaccagaaggtctacatgccccgggaggggaagctcatctctgacatcaacaaggcctgggaaagactggaaaaagcggaacacgaaagagaactggctttgcggaatgagctcataagacaggagaaactggaacagctcgcccgcagatttgatcgcaaggcagctatgagggagacttggctgagcgaaaaccagcgtctggtgtctcaggacaactttgggtttgaccttcctgcagttgaggccgccacaaaaaagcacgaggccattgagacagacattgccgcatacgaggagcgtgtgcaggctgtggtagccgtggccagggagctcgaggccgagaattaccacgacatcaagcgcatcacagcgaggaaggacaatgtcatccggctctgggaatacctactggaactgctcagggcccggagacagcggctcgagatgaacctggggctgcagaagatattccaggaaatgctctacattatggactggatggatgaaatgaaggtgctagtattgtctcaagactatggcaaacacttacttggtgtggaagacctgttacagaagcacaccctggttgaagcagacattggcatccaggcagagcgggtgagaggtgtcaatgcctccgcccagaagttcgcaacagacggggaaggttacaagccctgtgacccccaggtgatccgagaccgcgtggcccacatggagttctgttatcaagagctttgccagctggcggctgagcgcagggcccgtctggaagagtcccgccgcctctggaagttcttctgggagatggcagaagaggaaggctggatacgggagaaggagaagatcctgtcctcggacgattacgggaaagacctgaccagcgtcatgcgcctgctcagcaagcaccgggcgttcgaggacgagatgagcggccgcagtggccactttgagcaggccatcaaggaaggcgaagacatgatcgcggaggagcacttcgggtcggagaagatccgtgagaggatcatttacatccgggagcagtgggccaacctagagcagctctcggccattcggaagaagcgcctggaggaggcctccctgctgcaccagttccaggcagatgctgatgacattgatgcctggatgctggacatcctcaagattgtctccagcagcgacgtgggccacgatgagtattccacacagtctctggtcaagaaacacaaggacgtggcggaagagatcgccaattacaggcccacccttgacacgctgcacgaacaagccagcgccctcccccaggagcatgccgagtctccagacgtgaggggcaggctgtcgggcatcgaggagcggtataaggaggtggcagagctgacgcggctgcggaagcaggcactccaggacactctggccctgtacaagatgttcagcgaggctgatgcctgtgagctctggatcgacgagaaggagcagtggctcaacaacatgcagatcccagagaagctggaggatctggaggtcatccagcacagatttgagagcctagaaccagaaatgaacaaccaggcttcccgggttgcagtggtgaaccagattgcacgccagctgatgcacagcggccacccaagtgagaaggaaatcaaagcccagcaggacaaactcaacacaaggtggagccagttcagagaactggttgacaggaagaaggatgccctcctgtctgccctgagcatccagaactaccacctcgagtgcaatgaaaccaaatcctggattcgggaaaagaccaaggtcatcgagtccacccaggacctgggcaatgacctggctggcgtcatggccctgcagcgcaagctgaccggcatggagcgggacttggtggccattgaggcaaagctgagtgacctgcagaaggaggcggagaagctggagtccgagcaccccgaccaggcccaggccatcctgtctcggctggccgagatcagcgacgtgtgggaggagatgaagaccaccctgaaaaaccgagaggcctccctgggagaggccagcaagctgcagcagttcctacgggacttggacgacttccagtcctggctctctaggacccagacagcgatcgcctcggaggacatgccaaacaccctgaccgaggctgagaagctgctcacgcagcacgagaacatcaagaacgagatcgacaactacgaggaggactaccagaagatgagggacatgggcgagatggtcacccaggggcagaccgatgcccagtacatgtttctgcggcagcggctgcaggccctggacactggatggaacgagctccacaagatgtgggagaacagacaaaatctcctatcccagtcacatgcctaccagcagttcctcagagacacgaagcaagccgaagcctttcttaacaaccaggagtatgttctggctcacactgaaatgcctaccaccttggaaggagctgaagcagcaattaaaaagcaagaggacttcatgaccaccatggacgccaatgaggagaagatcaatgctgtggtggagactggccggaggctggtgagcgatgggaacatcaactcagatcgcatccaggagaaggtggactctattgatgacagacataggaagaatcgtgagacagccagtgaacttttgatgaggttgaaggacaacagggatctacagaaattcctgcaagattgtcaagagctgtctctctggatcaatgagaagatgctcacagcccaggacatgtcttacgatgaagccagaaatctgcacagtaaatggttgaagcatcaagcatttatggcagaacttgcatccaacaaagaatggcttgacaaaatcgagaaggaaggaatgcagctcatttcagaaaagcctgagacggaagctgtggtgaaggagaaactcactggtttacataaaatgtgggaagtccttgaatccactacccagacaaaggcccagcggctctttgatgcaaacaaggccgaacttttcacccagagctgtgcagatctagacaaatggctgcacggcctggagagtcagattcagtctgatgactatggcaaagacctgaccagtgtcaatatcctgctgaaaaagcaacagatgctggagaatcagatggaagtgcggaagaaggagatcgaagagctccaaagccaagcccaggccctgagtcaggaagggaagagcaccgacgaggcatttgaaaagtctgcagcaacctgggatgagaggttctctgccctggaaaggctgactacattggagttactggaagtgcgcagacagcaagaggaagaggagaggaagaggcggccgccttctcccgagccgagcacgaaggtttcagaggaagccgagtcccagcagcagtgggatacttcaaaaggagaacaagtttcccaaaacggtttgccagctgaacagggatctccacggatggcagaaacggtggacacaagcgaaatggtcaacggcgctacagaacaaaggacgagctctaaagagtccagccccatcccctccccgacctctgatcgtaaagccaagactgccctcccagcccagagtgccgccaccttaccagccagaacccaggagacaccttcggcccagatggaaggcttcctcaatcggaaacacgagtgggaggcccacaataagaaagcctcaagcaggtcctggcacaatgtttattgtgtcataaataaccaagaaatgggtttctacaaagatgcaaagactgctgcttctggaattccctaccacagcgaggtccctgtgagtttgaaagaagctgtctgcgaagtggcccttgattacaaaaagaagaaacacgtattcaagctaagactaaatgatggcaatgagtacctcttccaagccaaagacgatgaggaaatgaacacatggatccaggctatctcttccgccatctcctctgataaacacgaggtgtctgccagcacccagagcacgccagcatccagccgcgcgcagaccctccccaccagcgtcgtcaccatcaccagcgagtccagtcccggcaagcgggaaaaggacaaagagaaagacaaagagaagcggttcagcctttttggcaaaaagaaatgaactcctttccttcacctcctgcccttctcttaccttttcagtgaaattccagcatgcaagctcagaaccaacacattactctctgtgcctaatgttcctcaatgtggttgatttttttttttttttaatttatagagcatttcggggggggtgggggaaacacacctaaacactttatctccaagttacaaaagtttgaggtgcagagggaaggccagattttttttttaatgaaattatatagattagatctcagtatttaaactgttcctcaattttgtgaggctgtgttggaaataacccgcctctagtgctgttggtatgcaaggcagcggtgcttaatcaatatttcctgtgctcaccagaggcaaaatgtaccaatatcctgacaccattctctctccatttacttctggtggttaccctgactcttgactcttagaagtgcccgagatggggctaacctttattaaacagatcgcatattatgatcttgctgcagccacagtgcagctccacattaactctacagaccaaaccatttgtatctggcatcacttactaacacacgacatgcggcttttctgcatcaactgctatgacggttaagaatgtcagtatacaagaaggaatagaaaactgatactgttttaaataatctgtaatttcaattttttttttttttgctgaaatacattatattgtacgtttgagataattctagtacaaagtataataaaactagatgtataataaaccctttaaatcattggtaagtgtacaagtggtggaactgaagcatttactggacaaagtaatgttactctaatggttacttgctcgtgcgttgccacactgtgttataatttgcttcatttccttgctatttgatacatagtgtgcatttctctgtcactgtaactattgtaatgacaaattttcatcttactgcacaatcaaaatgacattgataggaatgaactccagaggctgggcctgaacagggaggtggtcgctcaggcctggtgctcagtcgtacgacctgtacctctcaacttttgccctatctgttaaatatatgctatgtcattaaatgcttttaaatcta
